United States Patent Application Publication US 2023/0026259 A1 - sequence listing, part 63

SEQ ID NO: 160509 - DNA, 1401 bp, Homo sapiens
  Payload ID: 11377
  Gene Symbol: NFKBIL1
  Gene Name: nuclear factor of kappa light polypeptide gene enhancer in B-cells inhibitor-like 1
  ENST ID: ENST00000376145
  CDS Start-End: 83-1183
ccgcctcccgtctccgagcttcttaaacacaggccttgggcctacggctctgggggtacttgggggggcgggggcaggtctgatgagtaacccctccccccaggttccagaggaagaagcctccacatctgtctgccggcccaagagttccatggcctccacttcccgccgccaacgccgagaacgtcgctttcgtcgttacttgtctgcaggacggctggtccgggcccaggccctcctccagcgacacccaggcctcgatgtagatgctgggcagcccccaccactgcaccgggcctgtgcccgccacgatgcccctgccctgtgcctgctgcttcggctcggggctgaccctgcccaccaggaccgccatggggacacggcactgcatgctgctgcccgccagggcccagatgcctacaccgatttcttcctcccgctgctaagccgctgtccctccgccatgggaataaagaataaggatggggagacccctggccaaattttgggctggggacccccctgggattctgctgaagaggaggaagaagatgatgcctccaaggagcgggaatggagacagaagctccagggtgatgcctcccatgaaacccaggaacctgagtccttctcagcctggtcagatcgcctggcccgggaacatgcccagaagtgccagcagcagcagcgagaagcagagggatcccgtcgacccccacgtgctgagggctccagccagagctggcgacagcaggaggaggagcagcggctcttcagggagcgagcccgggccaaggaggaagagctgcgtgagagccgagccaggagggcgcaggaggctctaggggaccgagaacccaagccaaccagggccgggcccagggaagagcaccccagaggagcggggaggggcagcctctggcgatttggtgatgtgccctggccctgccctgggggaggggacccagaggccatggctgcagccctggtggccaggggcccccctttggaggaacagggggctctgaggaggtacttgagggtccagcaggtccgctggcaccctgaccgcttcctgcagcgattccgaagccagattgagacctgggagctgggccgtgtgatgggagcagtgacagccctttctcaggccctgaatcgccatgcagaggccctcaagtgaccctagggaagaagcaagaaacttcggggctgcagcctcaggatgaggcagaaggaagggtaagggaaaggatggggaccacaaggaagagccaggtgctgctcagcagaggatatgggtgggagcgaaagttgtaacaagtgggggtggggggtgcgggccgccaccactgctccttgactctgccgtttcctaataagacctggttccacatctca

SEQ ID NO: 160510 - DNA, 1411 bp, Homo sapiens
  Payload ID: 11377
  Gene Symbol: NFKBIL1
  Gene Name: nuclear factor of kappa light polypeptide gene enhancer in B-cells inhibitor-like 1
  ENST ID: ENST00000376146
  CDS Start-End: 117-1193
agggatgaggcaggggcggagacgggggagtactgaggtgagagaaggagaacttgattggtggtaacagaggaagcataaagggttgtgaatgcggtgaaaagcccaagagttccatggcctccacttcccgccgccaacgccgagaacgtcgctttcgtcgttacttgtctgcaggacggctggtccgggcccaggccctcctccagcgacacccaggcctcgatgtagatgctgggcagcccccaccactgcaccgggcctgtgcccgccacgatgcccctgccctgtgcctgctgcttcggctcggggctgaccctgcccaccaggaccgccatggggacacggcactgcatgctgctgcccgccagggcccagatgcctacaccgatttcttcctcccgctgctaagccgctgtccctccgccatgggaataaagaataaggatggggagacccctggccaaattttgggctggggacccccctgggattctgctgaagaggaggaagaagatgatgcctccaaggagcgggaatggagacagaagctccagggtgagctggaggacgagtggcaggaagtcatggggaggtttgaaggtgatgcctcccatgaaacccaggaacctgagtccttctcagcctggtcagatcgcctggcccgggaacatgcccagaagtgccagcagcagcagcgagaagcagagggatcccgtcgacccccacgtgctgagggctccagccagagctggcgacagcaggaggaggagcagcggctcttcagggagcgagcccgggccaaggaggaagagctgcgtgagagccgagccaggagggcgcaggaggctctaggggaccgagaacccaagccaaccagggccgggcccagggaagagcaccccagaggagcggggaggggcagcctctggcgatttggtgatgtgccctggccctgccctgggggaggggacccagaggccatggctgcagccctggtggccaggggcccccctttggaggaacagggggctctgaggaggtacttgagggtccagcaggtccgctggcaccctgaccgcttcctgcagcgattccgaagccagattgagacctgggagctgggccgtgtgatgggagcagtgacagccctttctcaggccctgaatcgccatgcagaggccctcaagtgaccctagggaagaagcaagaaacttcggggctgcagcctcaggatgaggcagaaggaagggtaagggaaaggatggggaccacaaggaagagccaggtgctgctcagcagaggatatgggtgggagcgaaagttgtaacaagtgggggtggggggtgcgggccgccaccactgctccttgactctgccgtttcctaataagacctggttccacatctca

SEQ ID NO: 160511 - DNA, 1478 bp, Homo sapiens
  Payload ID: 11377
  Gene Symbol: NFKBIL1
  Gene Name: nuclear factor of kappa light polypeptide gene enhancer in B-cells inhibitor-like 1
  Uniprot ID: Q9UBC1
  ENST ID: ENST00000376148
  CDS Start-End: 115-1260
atttcctccagcctggagtgtctccgcccttcccgcctcccgtctccgagcttcttaaacacaggccttgggcctacggctctgggggtacttgggggggcgggggcaggtctgatgagtaacccctccccccaggttccagaggaagaagcctccacatctgtctgccggcccaagagttccatggcctccacttcccgccgccaacgccgagaacgtcgctttcgtcgttacttgtctgcaggacggctggtccgggcccaggccctcctccagcgacacccaggcctcgatgtagatgctgggcagcccccaccactgcaccgggcctgtgcccgccacgatgcccctgccctgtgcctgctgcttcggctcggggctgaccctgcccaccaggaccgccatggggacacggcactgcatgctgctgcccgccagggcccagatgcctacaccgatttcttcctcccgctgctaagccgctgtccctccgccatgggaataaagaataaggatggggagacccctggccaaattttgggctggggacccccctgggattctgctgaagaggaggaagaagatgatgcctccaaggagcgggaatggagacagaagctccagggtgagctggaggacgagtggcaggaagtcatggggaggtttgaaggtgatgcctcccatgaaacccaggaacctgagtccttctcagcctggtcagatcgcctggcccgggaacatgcccagaagtgccagcagcagcagcgagaagcagagggatcccgtcgacccccacgtgctgagggctccagccagagctggcgacagcaggaggaggagcagcggctcttcagggagcgagcccgggccaaggaggaagagctgcgtgagagccgagccaggagggcgcaggaggctctaggggaccgagaacccaagccaaccagggccgggcccagggaagagcaccccagaggagcggggaggggcagcctctggcgatttggtgatgtgccctggccctgccctgggggaggggacccagaggccatggctgcagccctggtggccaggggcccccctttggaggaacagggggctctgaggaggtacttgagggtccagcaggtccgctggcaccctgaccgcttcctgcagcgattccgaagccagattgagacctgggagctgggccgtgtgatgggagcagtgacagccctttctcaggccctgaatcgccatgcagaggccctcaagtgaccctagggaagaagcaagaaacttcggggctgcagcctcaggatgaggcagaaggaagggtaagggaaaggatggggaccacaaggaagagccaggtgctgctcagcagaggatatgggtgggagcgaaagttgtaacaagtgggggtggggggtgcgggccgccaccactgctccttgactctgccgtttcctaataagacctggttccacatctca

SEQ ID NO: 160512 - DNA, 1401 bp, Homo sapiens
  Payload ID: 11377
  Gene Symbol: NFKBIL1
  Gene Name: nuclear factor of kappa light polypeptide gene enhancer in B-cells inhibitor-like 1
  Uniprot ID: Q9UBC1
  ENST ID: ENST00000383500
  CDS Start-End: 83-1183
ccgcctcccgtctccgagcttcttaaacacaggccttgggcctacggctctgggggtacttgggggggcgggggcaggtctgatgagtaacccctccccccaggttccagaggaagaagcctccacatctgtctgccggcccaagagttccatggcctccacttcccgccgccaacgccgagaacgtcgctttcgtcgttacttgtctgcaggacggctggtccgggcccaggccctcctccagcgacacccaggcctcgatgtagatgctgggcagcccccaccactgcaccgggcctgtgcccgccacgatgcccctgccctgtgcctgctgcttcggctcggggctgaccctgcccaccaggaccgccatggggacacggcactgcatgctgctgcccgccagggcccagatgcctacaccgatttcttcctcccgctgctaagccgctgtccctccgccatgggaataaagaataaggatggggagacccctggccaaattttgggctggggacccccctgggattctgctgaagaggaggaagaagatgatgcctccaaggagcgggaatggagacagaagctccagggtgatgcctcccatgaaacccaggaacctgagtccttctcagcctggtcagatcgcctggcccgggaacatgcccagaagtgccagcagcagcagcgagaagcagagggatcctgtcgacccccacgtgctgagggctccagccagagctggcgacagcaggaggaggagcagcggctcttcagggagcgagcccgggccaaggaggaagagctgcgtgagagccgagccaggagggcgcaggaggctctaggggaccgagaacccaagccaaccagggccgggcccagggaagagcaccccagaggagcggggaggggcagcctctggcgatttggtgatgtgccctggccctgccctgggggaggggacccagaggccatggctgcagccctggtggccaggggcccccctttggaggaacagggggctctgaggaggtacttgagggtccagcaggtccgctggcaccctgaccgcttcctgcagcgattccgaagccagattgagacctgggagctgggccgtgtgatgggagcagtgacagccctttctcaggccctgaatcgccatgcagaggccctcaagtgaccctagggaagaagcaagaaacttcggggctgcagcctcaggatgaggcagaaggaagggtaagggaaaggatggggaccacaaggaagagccaggtgctgctcagcagaggatatgggtgggagcgaaagttgtaacaagtgggggtggggggtgcgggccgccaccactgctccttgactctgccgtttcctaataagacctggttccacatctca

SEQ ID NO: 160513 - DNA, 1411 bp, Homo sapiens
  Payload ID: 11377
  Gene Symbol: NFKBIL1
  Gene Name: nuclear factor of kappa light polypeptide gene enhancer in B-cells inhibitor-like 1
  Uniprot ID: Q9UBC1
  ENST ID: ENST00000400279
  CDS Start-End: 117-1193
agggatgaggcaggggcggagacgggggagtactgaggtgagagaaggagaacttgattggtggtaacagaggaagcataaagggttgtgaatgcggtgaaaagcccaagagttccatggcctccacttcccgccgccaacgccgagaacgtcgctttcgtcgttacttgtctgcaggacggctggtccgggcccaggccctcctccagcgacacccaggcctcgatgtagatgctgggcagcccccaccactgcaccgggcctgtgcccgccacgatgcccctgccctgtgcctgctgcttcggctcggggctgaccctgcccaccaggaccgccatggggacacggcactgcatgctgctgcccgccagggcccagatgcctacaccgatttcttcctcccgctgctaagccgctgtccctccgccatgggaataaagaataaggatggggagacccctggccaaattttgggctggggacccccctgggattctgctgaagaggaggaagaagatgatgcctccaaggagcgggaatggagacagaagctccagggtgagctggaggacgagtggcaggaagtcatggggaggtttgaaggtgatgcctcccatgaaacccaggaacctgagtccttctcagcctggtcagatcgcctggcccgggaacatgcccagaagtgccagcagcagcagcgagaagcagagggatcctgtcgacccccacgtgctgagggctccagccagagctggcgacagcaggaggaggagcagcggctcttcagggagcgagcccgggccaaggaggaagagctgcgtgagagccgagccaggagggcgcaggaggctctaggggaccgagaacccaagccaaccagggccgggcccagggaagagcaccccagaggagcggggaggggcagcctctggcgatttggtgatgtgccctggccctgccctgggggaggggacccagaggccatggctgcagccctggtggccaggggcccccctttggaggaacagggggctctgaggaggtacttgagggtccagcaggtccgctggcaccctgaccgcttcctgcagcgattccgaagccagattgagacctgggagctgggccgtgtgatgggagcagtgacagccctttctcaggccctgaatcgccatgcagaggccctcaagtgaccctagggaagaagcaagaaacttcggggctgcagcctcaggatgaggcagaaggaagggtaagggaaaggatggggaccacaaggaagagccaggtgctgctcagcagaggatatgggtgggagcgaaagttgtaacaagtgggggtggggggtgcgggccgccaccactgctccttgactctgccgtttcctaataagacctggttccacatctca

SEQ ID NO: 160514 - DNA, 1478 bp, Homo sapiens
  Payload ID: 11377
  Gene Symbol: NFKBIL1
  Gene Name: nuclear factor of kappa light polypeptide gene enhancer in B-cells inhibitor-like 1
  Uniprot ID: Q9UBC1
  ENST ID: ENST00000400285
  CDS Start-End: 115-1260
atttcctccagcctggagtgtctccgcccttcccgcctcccgtctccgagcttcttaaacacaggccttgggcctacggctctgggggtacttgggggggcgggggcaggtctgatgagtaacccctccccccaggttccagaggaagaagcctccacatctgtctgccggcccaagagttccatggcctccacttcccgccgccaacgccgagaacgtcgctttcgtcgttacttgtctgcaggacggctggtccgggcccaggccctcctccagcgacacccaggcctcgatgtagatgctgggcagcccccaccactgcaccgggcctgtgcccgccacgatgcccctgccctgtgcctgctgcttcggctcggggctgaccctgcccaccaggaccgccatggggacacggcactgcatgctgctgcccgccagggcccagatgcctacaccgatttcttcctcccgctgctaagccgctgtccctccgccatgggaataaagaataaggatggggagacccctggccaaattttgggctggggacccccctgggattctgctgaagaggaggaagaagatgatgcctccaaggagcgggaatggagacagaagctccagggtgagctggaggacgagtggcaggaagtcatggggaggtttgaaggtgatgcctcccatgaaacccaggaacctgagtccttctcagcctggtcagatcgcctggcccgggaacatgcccagaagtgccagcagcagcagcgagaagcagagggatcctgtcgacccccacgtgctgagggctccagccagagctggcgacagcaggaggaggagcagcggctcttcagggagcgagcccgggccaaggaggaagagctgcgtgagagccgagccaggagggcgcaggaggctctaggggaccgagaacccaagccaaccagggccgggcccagggaagagcaccccagaggagcggggaggggcagcctctggcgatttggtgatgtgccctggccctgccctgggggaggggacccagaggccatggctgcagccctggtggccaggggcccccctttggaggaacagggggctctgaggaggtacttgagggtccagcaggtccgctggcaccctgaccgcttcctgcagcgattccgaagccagattgagacctgggagctgggccgtgtgatgggagcagtgacagccctttctcaggccctgaatcgccatgcagaggccctcaagtgaccctagggaagaagcaagaaacttcggggctgcagcctcaggatgaggcagaaggaagggtaagggaaaggatggggaccacaaggaagagccaggtgctgctcagcagaggatatgggtgggagcgaaagttgtaacaagtgggggtggggggtgcgggccgccaccactgctccttgactctgccgtttcctaataagacctggttccacatctca

SEQ ID NO: 160515 - DNA, 1478 bp, Homo sapiens; identical to SEQ ID NO: 160514
  Payload ID: 11377
  Gene Symbol: NFKBIL1
  Gene Name: nuclear factor of kappa light polypeptide gene enhancer in B-cells inhibitor-like 1
  Uniprot ID: Q9UBC1
  ENST ID: ENST00000419122
  CDS Start-End: 115-1260

SEQ ID NO: 160516 - DNA, 1478 bp, Homo sapiens; identical to SEQ ID NO: 160514
  Payload ID: 11377
  Gene Symbol: NFKBIL1
  Gene Name: nuclear factor of kappa light polypeptide gene enhancer in B-cells inhibitor-like 1
  Uniprot ID: Q9UBC1
  ENST ID: ENST00000424652
  CDS Start-End: 115-1260

SEQ ID NO: 160517 - DNA, 1411 bp, Homo sapiens; identical to SEQ ID NO: 160513
  Payload ID: 11377
  Gene Symbol: NFKBIL1
  Gene Name: nuclear factor of kappa light polypeptide gene enhancer in B-cells inhibitor-like 1
  Uniprot ID: Q9UBC1
  ENST ID: ENST00000453377
  CDS Start-End: 117-1193

SEQ ID NO: 160518 - DNA, 1478 bp, Homo sapiens
  Payload ID: 11377
  Gene Symbol: NFKBIL1
  Gene Name: nuclear factor of kappa light polypeptide gene enhancer in B-cells inhibitor-like 1
  Uniprot ID: Q9UBC1
  ENST ID: ENST00000442947
  CDS Start-End: 115-1260
atttcctccagcctggagtgtctccgcccttcccgcctcccgtctccgagcttcttaaacacaggccttgggcctacggctctgggggtacttgggggggcgggggcaggtctgatgagtaacccctccccccaggttccagaggaagaagcctccacatctgtctgccggcccaagagttccatggcctccacttcccgccgccaacgccgagaacgtcgctttcgtcgttacttgtctgcaggacggctggtccgggcccaggccctcctccagcgacacccaggcctcgatgtagatgctgggcagcccccaccactgcaccgggcctgtgcccgccacgatgcccctgccctgtgcctgctgcttcggctcggggctgaccctgcccaccaggaccgccatggggacacggcactgcatgctgctgcccgccagggcccagatgcctacaccgatttcttcctcccgctgctaagccgctgtccctctgccatgggaataaagaataaggatggggagacccctggccaaattttgggctggggacccccctgggattctgctgaagaggaggaagaagatgatgcctccaaggagcgggaatggagacagaagctccagggtgagctggaggacgagtggcaggaagtcatggggaggtttgaaggtgatgcctcccatgaaacccaggaacctgagtccttctcagcctggtcagatcgcctggcccgggaacatgcccagaagtgccagcagcagcagcgagaagcagagggatcctgtcgacccccacgtgctgagggctccagccagagctggcgacagcaggaggaggagcagcggctcttcagggagcgagcccgggccaaggaggaagagctgcgtgagagccgagccaggagggcgcaggaggctctaggggaccgagaacccaagccaaccagggccgggcccagggaagagcaccccagaggagcggggaggggcagcctctggcgatttggtgatgtgccctggccctgccctgggggaggggacccagaggccatggctgcagccctggtggccaggggcccccctttggaggaacagggggctctgaggaggtacttgagggtccagcaggtccgctggcaccctgaccgcttcctgcagcgattccgaagccagattgagacctgggagctgggccgtgtgatgggagcagtgacagccctttctcaggccctgaatcgccatgcagaggccctcaagtgaccctagggaagaagcaagaaacttcggggctgcagcctcaggatgaggcagaaggaagggtaagggaaaggatggggaccacaaggaagagccaggtgctgctcagcagaggatatgggtgggagcgaaagttgtaacaagtgggggtggggggtgcgggccgccaccactgctccttgactctgccgtttcctaataagacctggttccacatctca

SEQ ID NO: 160519 - DNA, 1401 bp, Homo sapiens
  Payload ID: 11377
  Gene Symbol: NFKBIL1
  Gene Name: nuclear factor of kappa light polypeptide gene enhancer in B-cells inhibitor-like 1
  Uniprot ID: Q9UBC1
  ENST ID: ENST00000421396
  CDS Start-End: 83-1183
ccgcctcccgtctccgagcttcttaaacacaggccttgggcctacggctctgggggtacttgggggggcgggggcaggtctgatgagtaacccctccccccaggttccagaggaagaagcctccacatctgtctgccggcccaagagttccatggcctccacttcccgccgccaacgccgagaacgtcgctttcgtcgttacttgtctgcaggacggctggtccgggcccaggccctcctccagcgacacccaggcctcgatgtagatgctgggcagcccccaccactgcaccgggcctgtgcccgccacgatgcccctgccctgtgcctgctgcttcggctcggggctgaccctgcccaccaggaccgccatggggacacggcactgcatgctgctgcccgccagggcccagatgcctacaccgatttcttcctcccgctgctaagccgctgtccctctgccatgggaataaagaataaggatggggagacccctggccaaattttgggctggggacccccctgggattctgctgaagaggaggaagaagatgatgcctccaaggagcgggaatggagacagaagctccagggtgatgcctcccatgaaacccaggaacctgagtccttctcagcctggtcagatcgcctggcccgggaacatgcccagaagtgccagcagcagcagcgagaagcagagggatcctgtcgacccccacgtgctgagggctccagccagagctggcgacagcaggaggaggagcagcggctcttcagggagcgagcccgggccaaggaggaagagctgcgtgagagccgagccaggagggcgcaggaggctctaggggaccgagaacccaagccaaccagggccgggcccagggaagagcaccccagaggagcggggaggggcagcctctggcgatttggtgatgtgccctggccctgccctgggggaggggacccagaggccatggctgcagccctggtggccaggggcccccctttggaggaacagggggctctgaggaggtacttgagggtccagcaggtccgctggcaccctgaccgcttcctgcagcgattccgaagccagattgagacctgggagctgggccgtgtgatgggagcagtgacagccctttctcaggccctgaatcgccatgcagaggccctcaagtgaccctagggaagaagcaagaaacttcggggctgcagcctcaggatgaggcagaaggaagggtaagggaaaggatggggaccacaaggaagagccaggtgctgctcagcagaggatatgggtgggagcgaaagttgtaacaagtgggggtggggggtgcgggccgccaccactgctccttgactctgccgtttcctaataagacctggttccacatctca

SEQ ID NO: 160520 - DNA, 1411 bp, Homo sapiens; identical to SEQ ID NO: 160513
  Payload ID: 11377
  Gene Symbol: NFKBIL1
  Gene Name: nuclear factor of kappa light polypeptide gene enhancer in B-cells inhibitor-like 1
  Uniprot ID: Q9UBC1
  ENST ID: ENST00000456607
  CDS Start-End: 117-1193

SEQ ID NO: 160521 - DNA, 1401 bp, Homo sapiens; identical to SEQ ID NO: 160512
  Payload ID: 11377
  Gene Symbol: NFKBIL1
  Gene Name: nuclear factor of kappa light polypeptide gene enhancer in B-cells inhibitor-like 1
  Uniprot ID: Q9UBC1
  ENST ID: ENST00000430501
  CDS Start-End: 83-1183

SEQ ID NO: 160522 - DNA, 1411 bp, Homo sapiens; identical to SEQ ID NO: 160513
  Payload ID: 11377
  Gene Symbol: NFKBIL1
  Gene Name: nuclear factor of kappa light polypeptide gene enhancer in B-cells inhibitor-like 1
  Uniprot ID: Q9UBC1
  ENST ID: ENST00000428467
  CDS Start-End: 117-1193

SEQ ID NO: 160523 - DNA, 1478 bp, Homo sapiens; identical to SEQ ID NO: 160514
  Payload ID: 11377
  Gene Symbol: NFKBIL1
  Gene Name: nuclear factor of kappa light polypeptide gene enhancer in B-cells inhibitor-like 1
  Uniprot ID: Q9UBC1
  ENST ID: ENST00000455376
  CDS Start-End: 115-1260

SEQ ID NO: 160524 - DNA, 1411 bp, Homo sapiens
  Payload ID: 11377
  Gene Symbol: NFKBIL1
  Gene Name: nuclear factor of kappa light polypeptide gene enhancer in B-cells inhibitor-like 1
  Uniprot ID: Q9UBC1
  ENST ID: ENST00000430961
  CDS Start-End: 117-1193
agggatgaggcaggggcggagacgggggagtactgaggtgagagaaggagaacttgattggtggtaacagaggaagcataaagggttgtgaatgcggtgaaaagcccaagagttccatggcctccacttcccgccgccaacgccgagaacgtcgctttcgtcgttacttgtctgcaggacggctggtccgggcccaggccctcctccagcgacacccaggcctcgatgtagatgctgggcagcccccaccactgcaccgggcctgtgcccgccacgatgcccctgccctgtgcctgctgcttcggctcggggctgaccctgcccaccaggaccgccatggggacacggcactgcatgctgctgcccgccagggcccagatgcctacaccgatttcttcctcccgctgctaagccgctgtccctctgccatgggaataaagaataaggatggggagacccctggccaaattttgggctggggacccccctgggattctgctgaagaggaggaagaagatgatgcctccaaggagcgggaatggagacagaagctccagggtgagctggaggacgagtggcaggaagtcatggggaggtttgaaggtgatgcctcccatgaaacccaggaacctgagtccttctcagcctggtcagatcgcctggcccgggaacatgcccagaagtgccagcagcagcagcgagaagcagagggatcctgtcgacccccacgtgctgagggctccagccagagctggcgacagcaggaggaggagcagcggctcttcagggagcgagcccgggccaaggaggaagagctgcgtgagagccgagccaggagggcgcaggaggctctaggggaccgagaacccaagccaaccagggccgggcccagggaagagcaccccagaggagcggggaggggcagcctctggcgatttggtgatgtgccctggccctgccctgggggaggggacccagaggccatggctgcagccctggtggccaggggcccccctttggaggaacagggggctctgaggaggtacttgagggtccagcaggtccgctggcaccctgaccgcttcctgcagcgattccgaagccagattgagacctgggagctgggccgtgtgatgggagcagtgacagccctttctcaggccctgaatcgccatgcagaggccctcaagtgaccctagggaagaagcaagaaacttcggggctgcagcctcaggatgaggcagaaggaagggtaagggaaaggatggggaccacaaggaagagccaggtgctgctcagcagaggatatgggtgggagcgaaagttgtaacaagtgggggtggggggtgcgggccgccaccactgctccttgactctgccgtttcctaataagacctggttccacatctca

SEQ ID NO: 160525 - DNA, 1478 bp, Homo sapiens; identical to SEQ ID NO: 160514
  Payload ID: 11377
  Gene Symbol: NFKBIL1
  Gene Name: nuclear factor of kappa light polypeptide gene enhancer in B-cells inhibitor-like 1
  Uniprot ID: Q9UBC1
  ENST ID: ENST00000432160
  CDS Start-End: 115-1260

SEQ ID NO: 160526 - DNA, 1401 bp, Homo sapiens; identical to SEQ ID NO: 160512
  Payload ID: 11377
  Gene Symbol: NFKBIL1
  Gene Name: nuclear factor of kappa light polypeptide gene enhancer in B-cells inhibitor-like 1
  Uniprot ID: Q9UBC1
  ENST ID: ENST00000451911
  CDS Start-End: 83-1183

SEQ ID NO: 160527 - DNA, 1411 bp, Homo sapiens; identical to SEQ ID NO: 160513
  Payload ID: 11377
  Gene Symbol: NFKBIL1
  Gene Name: nuclear factor of kappa light polypeptide gene enhancer in B-cells inhibitor-like 1
  Uniprot ID: Q9UBC1
  ENST ID: ENST00000434332
  CDS Start-End: 117-1193

SEQ ID NO: 160528 - DNA, 1401 bp, Homo sapiens; identical to SEQ ID NO: 160512
  Payload ID: 11377
  Gene Symbol: NFKBIL1
  Gene Name: nuclear factor of kappa light polypeptide gene enhancer in B-cells inhibitor-like 1
  Uniprot ID: Q9UBC1
  ENST ID: ENST00000414391
  CDS Start-End: 83-1183

SEQ ID NO: 160529 - DNA, 1401 bp, Homo sapiens; identical to SEQ ID NO: 160512
  Payload ID: 11377
  Gene Symbol: NFKBIL1
  Gene Name: nuclear factor of kappa light polypeptide gene enhancer in B-cells inhibitor-like 1
  Uniprot ID: Q9UBC1
  ENST ID: ENST00000419623
  CDS Start-End: 83-1183

SEQ ID NO: 160530 - DNA, 700 bp, Homo sapiens
  Payload ID: 11377
  Gene Symbol: NFKBIL1
  Gene Name: nuclear factor of kappa light polypeptide gene enhancer in B-cells inhibitor-like 1
  ENST ID: ENST00000468464
  CDS Start-End: 35-700
tctgggggtacttgggggggcgggggcaggtctgatgagtaacccctccccccaggttccagaggaagaagcctccacatctgtctgccggcccaagagttccatggcctccacttcccgccgccaacgccgagaacgtcgctttcgtcgttacttgtctgcaggacggctggtccgggcccaggccctcctccagcgacacccaggcctcgatgtagatgctgggcagcccccaccactgcaccgggcctgtgcccgccacgatgcccctgccctgtgcctgctgcttcggctcggggctgaccctgcccaccaggaccgccatggggacacggcactgcatgctgctgcccgccagggcccagatgcctacaccgatttcttcctcccgctgctaagccgctgtccctccgccatgggaataaagaataaggatggggagacccctggccaaattttgggctggggacccccctgggattctgctgaagaggaggaagaagatgatgcctccaaggagcgggaatggagacagaagctccagggtgagctggaggacgagtggcaggaagtcatggggaggtttgaaggtgagaagtccactgctatccacagctgcccttccccactggctgctttccatctgcatgaatgcgtcacactaggctcctctgccccctcctctgtgcttccctgcttc

SEQ ID NO: 160531 - DNA, 554 bp, Homo sapiens
  Payload ID: 11377
  Gene Symbol: NFKBIL1
  Gene Name: nuclear factor of kappa light polypeptide gene enhancer in B-cells inhibitor-like 1
  ENST ID: ENST00000460131
  CDS Start-End: 56-433
cacaggccttgggcctacggctctgggggtacttgggggggcgggggcaggtctgatgagtaacccctccccccaggttccagaggaagaagcctccacatctgtctgccggcccaagagttccatggcctccacttcccgccgccaacgccgagaacgtcgctttcgtcgttacttgtctgcaggacggctggtccgggcccaggccctcctccagcgacacccaggcctcgatgtagatgctgggcagcccccaccactgcaccgggcctgtgcccgccacgatgcccctgccctgtgcctgctgcttcggctcggggctgaccctgcccaccaggaccgccatggggacacggcactgcatgctgctgcccgccagggcccagatggtcagcagtcatttggaaagagcttgctctgccgccggccatagttgttgccggttcacctccccacccctctcccatcatcccctgcctacaccgatttcttcctcccgctgctaagccgctgtccctccgccatgggaataaagaataaggatggggagaccc

SEQ ID NO: 160532 - DNA, 554 bp, Homo sapiens; identical to SEQ ID NO: 160531
  Payload ID: 11377
  Gene Symbol: NFKBIL1
  Gene Name: nuclear factor of kappa light polypeptide gene enhancer in B-cells inhibitor-like 1
  ENST ID: ENST00000496233
  CDS Start-End: 56-433

SEQ ID NO: 160533 - DNA, 5093 bp, Homo sapiens
  Payload ID: 11378
  Gene Symbol: NFRKB
  Gene Name: nuclear factor related to kappaB binding protein
  Uniprot ID: Q6P4R8
  ENST ID: ENST00000446488
  CDS Start-End: 105-4004
caggattccagaattggaaataacgggagggaggacctggtccagcttcccttcctcaaataaggaaattgacacctggcgtgagtacctgtggagaagaaacaatggattccttagaccatatgctgacagatcctctggaacttggtccgtgtggagatggccatggcacgcgcatcatggaggattgcctcctgggaggcaccagagttagtctgcccgaggaccttctggaggatcctgagatcttctttgatgttgtcagcctctcaacatggcaggaagtgttaagtgattctcaacgtgaacacctccagcagtttctgccccagtttcctgaagacagtgctgagcagcagaatgaactcatcttagccttgttcagtggggagaacttccgctttggaaaccctctgcacattgcccagaagcttttccgagacggacactttaaccccgaggtggtcaagtaccggcagttatgcttcaagtcacagtacaagcgctacctcaactcccagcagcagtatttccatcggctgctgaagcaaattcttgcttcccggagtgatctgctggagatggcccggcggagtggccccgcccttcccttccggcagaaacgcccttcaccatcccgcacacctgaggagcgggagtggcggacccagcagcgctacttgaaggtcttaagggaagtgaaagaggagtgtggtgacacagccctgtcatctgatgaagaggatctcagctcatggcttccgagctctccagcacgttctcctagtcctgcggtgcccctgcgggtggtgcccacactttcaaccacggatatgaaaactgcagataaagtagaactgggggacagtgacctgaagataatgttaaagaagcaccacgagaagcggaaacatcagccagatcacccggaccttttgacaggggacctgactctcaatgacatcatgactcgagtaaatgctggcaggaagggctctctggcagccttatatgacttggctgtccttaaaaaaaaggttaaggaaaaagaggaaaagaagaagaagaaaataaaaacgatcaaatcagaggcagaggacctggccgagccgctaagcagtactgaaggggtcgcacctctctcacaggccccctctccgctggcaattcctgctatcaaggaagagccccttgaagacctcaagccttgccttggaatcaatgaaatatcttccagcttcttctctcttctattagagatcttgctgctggagagtcaggctagccttcctatgctagaggagcgagttttggattggcagtcatcgccagccagctccctcaacagctggttctctgcggcccccaactgggctgagttggtactaccagccctgcagtatcttgctggagaaagtcgagctgttccttccagtttctctccatttgttgaattcaaagagaaaacccagcagtggaagttgcttggccaatcccaagataatgaaaaggaattagctgccctcttccagctatggctagagaccaaagatcaggccttctgtaagcaagaaaatgaagacagctcagatgccacaacacctgtccctcgggtaagaactgactatgtggtgcgtcccagcacgggggaggagaaacgggtttttcaggagcaggagcgttacaggtatagccaaccccataaggcgttcacctttcgcatgcacggctttgagtctgtggtggggccagtgaagggcgtgtttgacaaggagacctcgctcaacaaggctcgggagcactccctgctgcgctccgaccggcctgcctacgtcaccattctgtctcttgttcgggacgctgcggctcgactgcctaatggagaaggcacacgggcagagatctgtgaactgcttaaggactcccagtttcttgcaccagatgtcaccagcactcaggtaaatacagtagtgagtggtgcactggatcggctacattacgaaaaagatccctgtgtgaaatacgacattggacgaaagctgtggatctacctgcatcgtgaccggagtgaagaagagtttgagcggattcaccaagcacaagcagctgcagctaaagccagaaaagctcttcagcaaaaacccaagcccccatccaaggtgaagtccagtagcaaggagagctccataaaggtccttagcagtggcccttctgagcagagccagatgagcctcagtgactccagtatgccacccaccccagtcacacctgtaacccccaccacaccagcattgcccgccattcccatctcccctccacctgtatcggcagtgaacaaaagcggcccttccacagtctcagaaccagctaagtctagctcgggtgttcttctggtgtcttcaccaacaatgccacatctgggaacaatgctttccccagcttccagccagactgcacccagttctcaggctgccgcccgggtcgtgagccactctggctctgctggactgtctcaggtgcgagtggtggcccagcctagccttcctgctgttccccagcagtcgggagggccggcacagacattgccacagatgccagcaggaccgcagatccgggttccagccactgccacacagaccaaagtagtgccccagacagtaatggccactgtgcccgtcaaagcgcagactacggcagccactgtgcagcggcctggacccgggcagacagggctcacggtgacaagtctccctgccacagccagccctgtgagtaagccagccacgagttctcctgggacctctgctcccagtgcctccacggctgccgtcattcaaaatgtcacaggacagaacatcatcaagcaggtggcaatcactgggcagcttggtgtgaagccccaaacaggcaacagcattccactcacagccactaacttccgcatccagggtaaggatgtattgcgtctgccgccctcttccatcaccacagatgccaagggccagacggttctgcgaatcactccggacatgatggccacattggccaagtcccaggttaccacagtcaaattgacccaggacctcttcgggacaggaggcaacactacaggcaaaggcatctctgccaccttacacgtcacttccaatccagtacatgcagctgatagccctgccaaggccagttcagccagtgccccttcatccactccaacaggtaccactgtggtcaaagtgactcctgacctcaagccaacagaagcctcaagttcggcttttcgcttgatgccagctcttggcgtgagtgtggctgaccagaagggaaaaagcacagtggcctcttcagaagcaaaaccagctgccacgatccgcatcgtgcagggactgggagtgatgcctcccaaagcaggccagaccatcaccgttgcaacccacgccaagcaaggggcctcggtggccagtgggtctggaactgtccatacttcagcggtgtccttacccagtatgaatgctgctgtgtccaagactgtagctgtggcttctggggctgcaagcacccccatcagcatcagcacaggagcccccaccgtgcggcaggtccctgtcagcaccacggttgtgtccacgtcccaggctgggaagttgcctacacggatcacagttcccctctctgtgatcagccagccaatgaagggcaagagcgtggtcacagcccccatcatcaaaggcaaccttggagccaacctcagtgggttgggccgcaacatcatcctcacaactatgccagcaggcactaagctcattgctggcaataagcctgttagtttcctcactgctcagcagttgcagcagcttcagcagcaaggtcaggccacacaggtgcgcatccagactgtccctgcatcccatctccaacagggaacagcttctggctcctccaaagcagtctccactgttgttgtgactacagctccgtctcctaaacaggcacctgagcaacaatgattatgagagaggatggcttccgtgaaagaccatgcctggtctgtcctggctgagaagggaccagggaggttgcatcattgttttaagcttgcctgttcaaggcagccaggcgaggggtgatggcaacggtggcctggattcgtggcctggattctgctgccacgtgccatagtggagcaccctgagaaaggttcactccagggttccaaggtctgctctctaccaatctaggagaatattctgttgaaattgcaggaattaccagttacgtccaacaagccagagttctgagagtaagacccccagggaaggcttaccagttgcagagtgcacacagcgaataggctggttctccatgaggattgtattttttggcttctggtcttctccatgactagtggtctggataggagttttgtgtccagaaaattttatgtaatttatttttttaaagaacctgttgtacatctttctcaaatacaaacttgggctttagctgccccctccactaaaccgatgacttacttttttgactagaatgagaaaatggcaagaatcttagtaaggtggtagccagcttggtaactgcatagtaatcgagaggctgtaagatgggaattcatcgtaggcagcgaggtagagtgggtcccctgaaatgggattcgcttggcactgcctcttaaagataggggtgttgggatcttgattgtggccgccccccccagctttacctgcccactttgtccttcttggcaagcctgttcacatggacgtccagagccagtggacagagaggaggggacggacagcagaggtgctgcttttgcagcagaaactttgttgcagttcagagtataccttctgctctgctccagagcaagagttgcaaaccaggcccttggggctggccatttgtttttgtaaataaagttttattggaacacagcccagaccaatttgtgtttgtattatctgtggctgctttcagattcgaaggcagaattgagtagttgacatagagactggatggccctgaagcctaaagtatttcctatatggccttttaagtaaaagcgttttttgtttgtt

SEQ ID NO: 160534 - DNA, 568 bp, Homo sapiens
  Payload ID: 11378
  Gene Symbol: NFRKB
  Gene Name: nuclear factor related to kappaB binding protein
  ENST ID: ENST00000526884
  CDS Start-End: 293-568
gcgtctgggagcccgcggccggagaagggctgcgggttagggggccggcgcccgcggttcaggattccagaattggaaataacgggagggaggacctggtccagcttcccttcctcaaataaggaaattgacacctggcgtgagaaggggttttgccatgttcgctaggctggtctcaaactcatggattcaaggggactgcccgcctggacctcccaaagtactgagattgagttactgtaggagcattctgagaaaagagctcttccagagtacctgtggagaagaaacaatggattccttagaccatatgctgacagatcctctggaacttggtccgtgtggagatggccatggcacgcgcatcatggaggattgcctcctgggaggcaccagagttagtctgcccgaggaccttctggaggatcctgagatcttctttgatgttgtcagcctctcaacatggcaggaagtgttaagtgattctcaacgtgaacacctccagcagtttctgccccagtttcctgaagacagtgctgagcagcagaatgaactcatcttagccttg

SEQ ID NO: 160535 - DNA, 938 bp, Homo sapiens
  Payload ID: 11378
  Gene Symbol: NFRKB
  Gene Name: nuclear factor related to kappaB binding protein
  ENST ID: ENST00000532225
  CDS Start-End: 375-938
gcacccagactccttgcgggagcgagtgcgtctgggagcccgcggccggagaagggctgcgggttagggggccggcgcccgcggttcaggattccagaattggaaataacgggagggaggacctggtccagcttcccttcctcaaataaggaaattgacacctggcgtgagaaggggttttgccatgttcgctaggctggtctcaaactcatggattcaaggggactgcccgcctggacctcccaaagtactgagattgtagtctcattttactcatctgtaaaatgaaggcatatgaaatttatgaatttaggagttactgtaggagcattctgagaaaagagctcttccagagtacctgtggagaagaaacaatggattccttagaccatatgctgacagatcctctggaacttggtccgtgtggagatggccatggcacgcgcatcatggaggattgcctcctgggaggcaccagagttagtctgcccgaggaccttctggaggatcctgagatcttctttgatgttgtcagcctctcaacatggcaggaagtgttaagtgattctcaacgtgaacacctccagcagtttctgccccagtttcctgaagacagtgctgagcagcagaatgaactcatcttagccttgttcagtggggagaacttccgctttggaaaccctctgcacattgcccagaagcttttccgagacggacactttaaccccgaggtggtcaagtaccggcagttatgcttcaagtcacagtacaagcgctacctcaactcccagcagcagtatttccatcggctgctgaagcaaattcttgcttcccggagtgatctgctggagatggcccggcggagtggccccgcccttcccttccggcagaaacgcccttcaccatcccgcacacctgaggagcgggagtggcggacc

SEQ ID NO: 160536 - DNA, 539 bp, Homo sapiens
  Payload ID: 11378
  Gene Symbol: NFRKB
  Gene Name: nuclear factor related to kappaB binding protein
  ENST ID: ENST00000526940
  CDS Start-End: 28-396
gtccagagtacctgtggagaagaaacaatggattccttagaccatatgctgacagatcctctggaacttggtccgtgtggagatggccatggcacgcgcatcatggaggattgcctcctgggaggcaccagagttagtctgcccgaggaccttctggaggatcctgagatcttctttgatgttgtcagcctctcaacatggcaggaagtgttaagtgattctcaacgtgaacacctccagcagtttctgccccagtttcctgaagacagtgctgagcagcagaatgaactcatcttagccttgttcagtggggagaacttccgctttggaaaccctctgcacattgcccagaagcttttccgagatactgaggcagcaaagagcggttttgtgtaacactttgctgtctaggctgtgttctaaaaaacaaaaatgtattgacttatatagaaaatacataatatgaattcagcttgtaaccagcatcagcttgtaaccagcatctacataaaaaaataaaacatttccagcatactaga

SEQ ID NO: 160537 - DNA, 3066 bp, Homo sapiens
  Payload ID: 11378
  Gene Symbol: NFRKB
  Gene Name: nuclear factor related to kappaB binding protein
  ENST ID: ENST00000531755
  CDS Start-End: 105-3066
caggattccagaattggaaataacgggagggaggacctggtccagcttcccttcctcaaataaggaaattgacacctggcgtgagtacctgtggagaagaaacaatggattccttagaccatatgctgacagatcctctggaacttggtccgtgtggagatggccatggcacgcgcatcatggaggattgcctcctgggaggcaccagagttagtctgcccgaggaccttctggaggatcctgagatcttctttgatgttgtcagcctctcaacatggcaggaagtgttaagtgattctcaacgtgaacacctccagcagtttctgccccagtttcctgaagacagtgctgagcagcagaatgaactcatcttagccttgttcagtggggagaacttccgctttggaaaccctctgcacattgcccagaagcttttccgagacggacactttaaccccgaggtggtcaagtaccggcagttatgcttcaagtcacagtacaagcgctacctcaactcccagcagcagtatttccatcggctgctgaagcaaattcttgcttcccggagtgatctgctggagatggcccggcggagtggccccgcccttcccttccggcagaaacgcccttcaccatcccgcacacctgaggagcgggagtggcggacccagcagcgctacttgaaggtcttaagggaagtgaaagaggagtgtggtgacacagccctgtcatctgatgaagaggccacgttggatttacaagaacaattttcttttgaagatctcagctcatggcttccgagctctccagcacgttctcctagtcctgcggtgcccctgcgggtggtgcccacactttcaaccacggatatgaaaactgcagataaagtagaactgggggacagtgacctgaagataatgttaaagaagcaccacgagaagcggaaacatcagccagatcacccggaccttttgacaggggacctgactctcaatgacatcatgactcgagtaaatgctggcaggaagggctctctggcagccttatatgacttggctgtccttaaaaaaaaggttaaggaaaaagaggaaaagaagaagaagaaaataaaaacgatcaaatcagaggcagaggacctggccgagccgctaagcagtactgaaggggtcgcacctctctcacaggccccctctccgctggcaattcctgctatcaaggaagagccccttgaagacctcaagccttgccttggaatcaatgaaatatcttccagcttcttctctcttctattagagatcttgctgctggagagtcaggctagccttcctatgctagaggagcgagttttggattggcagtcatcgccagccagctccctcaacagctggttctctgcggcccccaactgggctgagttggtactaccagccctgcagtatcttgctggagaaagtcgagctgttccttccagtttctctccatttgttgaattcaaagagaaaacccagcagtggaagttgcttggccaatcccaagataatgaaaaggaattagctgccctcttccagctatggctagagaccaaagatcaggccttctgtaagaaaatgaagacagctcagatgccacaacacctgtccctcggaagaactgactatgtggtgcgtcccagcacgggggaggagaaacgggtttttcaggagcaggagcgttacaggtatagccaaccccataaggcgttcacctttcgcatgcacggctttgagtctgtggtggggccagtgaagggcgtgtttgacaaggagacctcgctcaacaaggctcgggagcactccctgctgcgctccgaccggcctgcctacgtcaccattctgtctcttgttcgggacgctgcggctcgactgcctaatggagaaggcacacgggcagagatctgtgaactgcttaaggactcccagtttcttgcaccagatgtcaccagcactcaggtaaatacagtagtgagtggtgcactggatcggctacattacgaaaaagatccctgtgtgaaatacgacattggacgaaagctgtggatctacctgcatcgtgaccggagtgaagaagagtttgagcggattcaccaagcacaagcagctgcagctaaagccagaaaagctcttcagcaaaaacccaagcccccatccaaggtgaagtccagtagcaaggagagctccataaaggtccttagcagtggcccttctgagcagagccagatgagcctcagtgactccagtatgccacccaccccagtcacacctgtaacccccaccacaccagcattgcccgccattcccatctcccctccacctgtatcggcagtgaacaaaagcggcccttccacagtctcagaaccagctaagtctagctcgggtgttcttctggtgtcttcaccaacaatgccacatctgggaacaatgctttccccagcttccagccagactgcacccagttctcaggctgccgcccgggtcgtgagccactctggctctgctggactgtctcaggtgcgagtggtggcccagcctagccttcctgctgttccccagcagtcgggagggccggcacagacattgccacagatgccagcaggaccgcagatccgggttccagccactgccacacagaccaaagtagtgccccagacagtaatggccactgtgcccgtcaaagcgcagactacggcagccactgtgcagcggcctggacccgggcagacagggctcacggtgacaagtctccctgccacagccagccctgtgagtaagccagccacgagttctcctgggacctctgctcccagtgcctccacggctgccgtcattcaaaatgtcacaggacagaacatcatcaagcaggtggcaatcactgggcagcttggtgtgaagccccaaacaggcaacagcattccactcacagccactaacttccgcatccagggtaaggatgtattgcgtctgccgccctcttccatcaccacagatgccaagggccagacggttctgcgaatcactccggacatgatgg

SEQ ID NO: 160538 - DNA, 4114 bp, Homo sapiens
  Payload ID: 11378
  Gene Symbol: NFRKB
  Gene Name: nuclear factor related to kappaB binding protein
  Uniprot ID: Q6P4R8
  ENST ID: ENST00000524746
  CDS Start-End: 194-4093
caggattccagaattggaaataacgggagggaggacctggtccagcttcccttcctcaaataaggaaattgacacctggcgtgagaaggggttttgccatgttcgctaggctggtctcaaactcatggattcaaggggactgcccgcctggacctcccaaagtactgagattagtacctgtggagaagaaacaatggattccttagaccatatgctgacagatcctctggaacttggtccgtgtggagatggccatggcacgcgcatcatggaggattgcctcctgggaggcaccagagttagtctgcccgaggaccttctggaggatcctgagatcttctttgatgttgtcagcctctcaacatggcaggaagtgttaagtgattctcaacgtgaacacctccagcagtttctgccccagtttcctgaagacagtgctgagcagcagaatgaactcatcttagccttgttcagtggggagaacttccgctttggaaaccctctgcacattgcccagaagcttttccgagacggacactttaaccccgaggtggtcaagtaccggcagttatgcttcaagtcacagtacaagcgctacctcaactcccagcagcagtatttccatcggctgctgaagcaaattcttgcttcccggagtgatctgctggagatggcccggcggagtggccccgcccttcccttccggcagaaacgcccttcaccatcccgcacacctgaggagcgggagtggcggacccagcagcgctacttgaaggtcttaagggaagtgaaagaggagtgtggtgacacagccctgtcatctgatgaagaggatctcagctcatggcttccgagctctccagcacgttctcctagtcctgcggtgcccctgcgggtggtgcccacactttcaaccacggatatgaaaactgcagataaagtagaactgggggacagtgacctgaagataatgttaaagaagcaccacgagaagcggaaacatcagccagatcacccggaccttttgacaggggacctgactctcaatgacatcatgactcgagtaaatgctggcaggaagggctctctggcagccttatatgacttggctgtccttaaaaaaaaggttaaggaaaaagaggaaaagaagaagaagaaaataaaaacgatcaaatcagaggcagaggacctggccgagccgctaagcagtactgaaggggtcgcacctctctcacaggccccctctccgctggcaattcctgctatcaaggaagagccccttgaagacctcaagccttgccttggaatcaatgaaatatcttccagcttcttctctcttctattagagatcttgctgctggagagtcaggctagccttcctatgctagaggagcgagttttggattggcagtcatcgccagccagctccctcaacagctggttctctgcggcccccaactgggctgagttggtactaccagccctgcagtatcttgctggagaaagtcgagctgttccttccagtttctctccatttgttgaattcaaagagaaaacccagcagtggaagttgcttggccaatcccaagataatgaaaaggaattagctgccctcttccagctatggctagagaccaaagatcaggccttctgtaagcaagaaaatgaagacagctcagatgccacaacacctgtccctcgggtaagaactgactatgtggtgcgtcccagcacgggggaggagaaacgggtttttcaggagcaggagcgttacaggtatagccaaccccataaggcgttcacctttcgcatgcacggctttgagtctgtggtggggccagtgaagggcgtgtttgacaaggagacctcgctcaacaaggctcgggagcactccctgctgcgctccgaccggcctgcctacgtcaccattctgtctcttgttcgggacgctgcggctcgactgcctaatggagaaggcacacgggcagagatctgtgaactgcttaaggactcccagtttcttgcaccagatgtcaccagcactcaggtaaatacagtagtgagtggtgcactggatcggctacattacgaaaaagatccctgtgtgaaatacgacattggacgaaagctgtggatctacctgcatcgtgaccggagtgaagaagagtttgagcggattcaccaagcacaagcagctgcagctaaagccagaaaagctcttcagcaaaaacccaagcccccatccaaggtgaagtccagtagcaaggagagctccataaaggtccttagcagtggcccttctgagcagagccagatgagcctcagtgactccagtatgccacccaccccagtcacacctgtaacccccaccacaccagcattgcccgccattcccatctcccctccacctgtatcggcagtgaacaaaagcggcccttccacagtctcagaaccagctaagtctagctcgggtgttcttctggtgtcttcaccaacaatgccacatctgggaacaatgctttccccagcttccagccagactgcacccagttctcaggctgccgcccgggtcgtgagccactctggctctgctggactgtctcaggtgcgagtggtggcccagcctagccttcctgctgttccccagcagtcgggagggccggcacagacattgccacagatgccagcaggaccgcagatccgggttccagccactgccacacagaccaaagtagtgccccagacagtaatggccactgtgcccgtcaaagcgcagactacggcagccactgtgcagcggcctggacccgggcagacagggctcacggtgacaagtctccctgccacagccagccctgtgagtaagccagccacgagttctcctgggacctctgctcccagtgcctccacggctgccgtcattcaaaatgtcacaggacagaacatcatcaagcaggtggcaatcactgggcagcttggtgtgaagccccaaacaggcaacagcattccactcacagccactaacttccgcatccagggtaaggatgtattgcgtctgccgccctcttccatcaccacagatgccaagggccagacggttctgcgaatcactccggacatgatggccacattggccaagtcccaggttaccacagtcaaattgacccaggacctcttcgggacaggaggcaacactacaggcaaaggcatctctgccaccttacacgtcacttccaatccagtacatgcagctgatagccctgccaaggccagttcagccagtgccccttcatccactccaacaggtaccactgtggtcaaagtgactcctgacctcaagccaacagaagcctcaagttcggcttttcgcttgatgccagctcttggcgtgagtgtggctgaccagaagggaaaaagcacagtggcctcttcagaagcaaaaccagctgccacgatccgcatcgtgcagggactgggagtgatgcctcccaaagcaggccagaccatcaccgttgcaacccacgccaagcaaggggcctcggtggccagtgggtctggaactgtccatacttcagcggtgtccttacccagtatgaatgctgctgtgtccaagactgtagctgtggcttctggggctgcaagcacccccatcagcatcagcacaggagcccccaccgtgcggcaggtccctgtcagcaccacggttgtgtccacgtcccaggctgggaagttgcctacacggatcacagttcccctctctgtgatcagccagccaatgaagggcaagagcgtggtcacagcccccatcatcaaaggcaaccttggagccaacctcagtgggttgggccgcaacatcatcctcacaactatgccagcaggcactaagctcattgctggcaataagcctgttagtttcctcactgctcagcagttgcagcagcttcagcagcaaggtcaggccacacaggtgcgcatccagactgtccctgcatcccatctccaacagggaacagcttctggctcctccaaagcagtctccactgttgttgtgactacagctccgtctcctaaacaggcacctgagcaacaatgattatgagagaggatggcttcc

SEQ ID NO: 160539 - DNA, 895 bp, Homo sapiens
  Payload ID: 11378
  Gene Symbol: NFRKB
  Gene Name: nuclear factor related to kappaB binding protein
  ENST ID: ENST00000530278
  CDS Start-End: 117-559
gtgcgcgcacccagactccttgcgggagcgagtgcgtctgggagcccgcggccggagaagggctgcgggttagggggccggcgcccgcggttcagagtacctgtggagaagaaacaatggattccttagaccatatgctgacagatcctctggaacttggtccgtgtggagatggccatggcacgcgcatcatggaggattgcctcctgggaggcaccagagttagtctgcccgaggaccttctggaggatcctgagatcttctttgatgttgtcagcctctcaacatggcaggaagtgttaagtgattctcaacgtgaacacctccagcagtttctgccccagtttcctgaagacagtgctgagcagcagaatgaactcatcttagccttgttcagtggggagaacttccgctttggaaaccctctgcacattgcccagaagcttttccgagacggacactttaaccccgaggtggtcaagtaccggcagttatgcttcaagtcacagtacaagcgctacctcaactcccagcagcagtatttccatcggctgctgaagcaaattcttgcttcccggagtgatctgctggagatggcccggcggagtggccccgcccttcccttccggcagaaacgcccttcaccatcccgcacacctgaggagcgggagtggcggacccagcagcgctacttgaaggtcttaagggaagtgaaagaggagtgtggtgacacagccctgtcatctgatgaagaggccacgttggatttacaagaacaattttcttttgaagatctcagctcatggcttccgagctctccagcacgttctcctagtcctgcggtgcccctgcgggtggtgcccacactttcaaccacggatatgaaaactgcagg

SEQ ID NO: 160540 - DNA, 564 bp, Homo sapiens
  Payload ID: 11378
  Gene Symbol: NFRKB
  Gene Name: nuclear factor related to kappaB binding protein
  ENST ID: ENST00000531318
  CDS Start-End: 425-564
attttagtatgctttttagcccactttgtaggaataggagctggaaaggatggatttagtaaatgttggtagagtgattgagtttaagctccctgtggtcctgttagcattgtgcagtcctgtgctatcaacttgacccctaatcccagccatcagtctgaaaatgttgtggtatgtagttttctgaaggtgatcagcagtgttctgttattacacgaaggagaaaagtagcattaatttacatgattatacggatcaaatggaccaactaaaggcagattggccattgactttactggtggttatggtcagtctcattttactcatctgtaaaatgaaggcatatgaaatttatgaatttaggagttactgtaggagcattctgagaaaagagctcttccagagtacctgtggagaagaaacaatggattccttagaccatatgctgacagatcctctggaacttggtccgtgtggagatggccatggcacgcgcatcatggaggattgcctcctgggaggcaccagagttagtctgcccgaggaccttctggaggatgtgag

SEQ ID NO: 160541 - DNA, 843 bp, Homo sapiens
  Payload ID: 11378
  Gene Symbol: NFRKB
  Gene Name: nuclear factor related to kappaB binding protein
  ENST ID: ENST00000529319
  CDS Start-End: 280-843
gcacccagactccttgcgggagcgagtgcgtctgggagcccgcggccggagaagggctgcgggttagggggccggcgcccgcggttcaggattccagaattggaaataacgggagggaggacctggtccagcttcccttcctcaaataaggaaattgacacctggcgtgagaaggggttttgccatgttcgctaggctggtctcaaactcatggattcaaggggactgcccgcctggacctcccaaagtactgagattagtacctgtggagaagaaacaatggattccttagaccatatgctgacagatcctctggaacttggtccgtgtggagatggccatggcacgcgcatcatggaggattgcctcctgggaggcaccagagttagtctgcccgaggaccttctggaggatcctgagatcttctttgatgttgtcagcctctcaacatggcaggaagtgttaagtgattctcaacgtgaacacctccagcagtttctgccccagtttcctgaagacagtgctgagcagcagaatgaactcatcttagccttgttcagtggggagaacttccgctttggaaaccctctgcacattgcccagaagcttttccgagacggacactttaaccccgaggtggtcaagtaccggcagttatgcttcaagtcacagtacaagcgctacctcaactcccagcagcagtatttccatcggctgctgaagcaaattcttgcttcccggagtgatctgctggagatggcccggcggagtggccccgcccttcccttccggcagaaacgcccttcaccatcccgcacacctgaggagcgggagtggcggacc

SEQ ID NO: 160542 - DNA, 4351 bp, Homo sapiens
  Payload ID: 11378
  Gene Symbol: NFRKB
  Gene Name: nuclear factor related to kappaB binding protein
  Uniprot ID: Q6P4R8
  ENST ID: ENST00000524794
  CDS Start-End: 122-4096
gctgtttagctgtaattagggtgcaaggataaggtgtaagaactggctggaggttgaatgttttcctggaggagtgttagcatcaactagatccctggaatttctgcctttctgtctcaagatgcatgtctttgtccagagtacctgtggagaagaaacaatggattccttagaccatatgctgacagatcctctggaacttggtccgtgtggagatggccatggcacgcgcatcatggaggattgcctcctgggaggcaccagagttagtctgcccgaggaccttctggaggatcctgagatcttctttgatgttgtcagcctctcaacatggcaggaagtgttaagtgattctcaacgtgaacacctccagcagtttctgccccagtttcctgaagacagtgctgagcagcagaatgaactcatcttagccttgttcagtggggagaacttccgctttggaaaccctctgcacattgcccagaagcttttccgagacggacactttaaccccgaggtggtcaagtaccggcagttatgcttcaagtcacagtacaagcgctacctcaactcccagcagcagtatttccatcggctgctgaagcaaattcttgcttcccggagtgatctgctggagatggcccggcggagtggccccgcccttcccttccggcagaaacgcccttcaccatcccgcacacctgaggagcgggagtggcggacccagcagcgctacttgaaggtcttaagggaagtgaaagaggagtgtggtgacacagccctgtcatctgatgaagaggccacgttggatttacaagaacaattttcttttgaagatctcagctcatggcttccgagctctccagcacgttctcctagtcctgcggtgcccctgcgggtggtgcccacactttcaaccacggatatgaaaactgcagataaagtagaactgggggacagtgacctgaagataatgttaaagaagcaccacgagaagcggaaacatcagccagatcacccggaccttttgacaggggacctgactctcaatgacatcatgactcgagtaaatgctggcaggaagggctctctggcagccttatatgacttggctgtccttaaaaaaaaggttaaggaaaaagaggaaaagaagaagaagaaaataaaaacgatcaaatcagaggcagaggacctggccgagccgctaagcagtactgaaggggtcgcacctctctcacaggccccctctccgctggcaattcctgctatcaaggaagagccccttgaagacctcaagccttgccttggaatcaatgaaatatcttccagcttcttctctcttctattagagatcttgctgctggagagtcaggctagccttcctatgctagaggagcgagttttggattggcagtcatcgccagccagctccctcaacagctggttctctgcggcccccaactgggctgagttggtactaccagccctgcagtatcttgctggagaaagtcgagctgttccttccagtttctctccatttgttgaattcaaagagaaaacccagcagtggaagttgcttggccaatcccaagataatgaaaaggaattagctgccctcttccagctatggctagagaccaaagatcaggccttctgtaagcaagaaaatgaagacagctcagatgccacaacacctgtccctcgggtaagaactgactatgtggtgcgtcccagcacgggggaggagaaacgggtttttcaggagcaggagcgttacaggtatagccaaccccataaggcgttcacctttcgcatgcacggctttgagtctgtggtggggccagtgaagggcgtgtttgacaaggagacctcgctcaacaaggctcgggagcactccctgctgcgctccgaccggcctgcctacgtcaccattctgtctcttgttcgggacgctgcggctcgactgcctaatggagaaggcacacgggcagagatctgtgaactgcttaaggactcccagtttcttgcaccagatgtcaccagcactcaggtaaatacagtagtgagtggtgcactggatcggctacattacgaaaaagatccctgtgtgaaatacgacattggacgaaagctgtggatctacctgcatcgtgaccggagtgaagaagagtttgagcggattcaccaagcacaagcagctgcagctaaagccagaaaagctcttcagcaaaaacccaagcccccatccaaggtgaagtccagtagcaaggagagctccataaaggtccttagcagtggcccttctgagcagagccagatgagcctcagtgactccagtatgccacccaccccagtcacacctgtaacccccaccacaccagcattgcccgccattcccatctcccctccacctgtatcggcagtgaacaaaagcggcccttccacagtctcagaaccagctaagtctagctcgggtgttcttctggtgtcttcaccaacaatgccacatctgggaacaatgctttccccagcttccagccagactgcacccagttctcaggctgccgcccgggtcgtgagccactctggctctgctggactgtctcaggtgcgagtggtggcccagcctagccttcctgctgttccccagcagtcgggagggccggcacagacattgccacagatgccagcaggaccgcagatccgggttccagccactgccacacagaccaaagtagtgccccagacagtaatggccactgtgcccgtcaaagcgcagactacggcagccactgtgcagcggcctggacccgggcagacagggctcacggtgacaagtctccctgccacagccagccctgtgagtaagccagccacgagttctcctgggacctctgctcccagtgcctccacggctgccgtcattcaaaatgtcacaggacagaacatcatcaagcaggtggcaatcactgggcagcttggtgtgaagccccaaacaggcaacagcattccactcacagccactaacttccgcatccagggtaaggatgtattgcgtctgccgccctcttccatcaccacagatgccaagggccagacggttctgcgaatcactccggacatgatggccacattggccaagtcccaggttaccacagtcaaattgacccaggacctcttcgggacaggaggcaacactacaggcaaaggcatctctgccaccttacacgtcacttccaatccagtacatgcagctgatagccctgccaaggccagttcagccagtgccccttcatccactccaacaggtaccactgtggtcaaagtgactcctgacctcaagccaacagaagcctcaagttcggcttttcgcttgatgccagctcttggcgtgagtgtggctgaccagaagggaaaaagcacagtggcctcttcagaagcaaaaccagctgccacgatccgcatcgtgcagggactgggagtgatgcctcccaaagcaggccagaccatcaccgttgcaacccacgccaagcaaggggcctcggtggccagtgggtctggaactgtccatacttcagcggtgtccttacccagtatgaatgctgctgtgtccaagactgtagctgtggcttctggggctgcaagcacccccatcagcatcagcacaggagcccccaccgtgcggcaggtccctgtcagcaccacggttgtgtccacgtcccaggctgggaagttgcctacacggatcacagttcccctctctgtgatcagccagccaatgaagggcaagagcgtggtcacagcccccatcatcaaaggcaaccttggagccaacctcagtgggttgggccgcaacatcatcctcacaactatgccagcaggcactaagctcattgctggcaataagcctgttagtttcctcactgctcagcagttgcagcagcttcagcagcaaggtcaggccacacaggtgcgcatccagactgtccctgcatcccatctccaacagggaacagcttctggctcctccaaagcagtctccactgttgttgtgactacagctccgtctcctaaacaggcacctgagcaacaatgattatgagagaggatggcttccgtgaaagaccatgcctggtctgtcctggctgagaagggaccagggaggttgcatcattgttttaagcttgcctgttcaaggcagccaggcgaggggtgatggcaacggtggcctggattcgtggcctggattctgctgccacgtgccatagtggagcaccctgagaaaggttcactccagggttccaaggtctgctctctaccaatctaggagaatattctgttgaaattgcag

SEQ ID NO: 160543 - DNA, 1658 bp, Homo sapiens
  Payload ID: 11379
  Gene Symbol: NFE2
  Gene Name: nuclear factor, erythroid 2
  Uniprot ID: Q16621
  ENST ID: ENST00000312156
  CDS Start-End: 274-1395
gcatatactgtcatcatcttggaaagaaaaggctgagaacgtaaaactgaggacagaggaggaaagcagggtgacccctgatgttgccctagaaaatggaaaacaaaacacagcaaaacagaaaaacagaagatctgactctgcctttagccaggaaaacagtttgggggagtaaaaagtattagggaaaagagtgggcattttgcctggaaaaaaggtttctagagccatctgggctttccgggaacctggaccagactctggcccagtaggatgtccccgtgtcctccccagcagagcaggaacagggtgatacagctgtccacttcagagctaggagagatggaactgacttggcaggagatcatgtccatcaccgagctgcagggtctgaatgctccaagtgagccatcatttgagccccaagccccagctccataccttggacctccaccacccacaacttactgcccctgctcaatccacccagattctggcttcccacttcctccaccaccttatgagctcccagcatccacatcccatgtcccagatcccccatactcctatggcaacatggccataccagtctccaagccactgagcctctcaggcctgctcagtgagccgctccaagaccccttagccctcctggacattgggctgccagcagggccacctaagccccaagaagacccagaatccgactcaggattatccctcaactatagcgatgctgaatctcttgagctggaggggacagaggctggtcggcggcgcagcgaatatgtagagatgtacccagtggagtacccctactcactcatgcccaactccttggcccactccaactataccttgccagctgctgagacccccttggccttagagccctcctcaggccctgtgcgggctaagcccactgcacggggggaggcagggagtcgggatgaacgtcgggccttggccatgaagattccttttcctacggacaagattgtcaacttgccggtagatgactttaatgagctattggcaaggtacccgctgacagagagccagctagcgctagtccgggacatccgacgacggggcaaaaacaaggtggcagcccagaactgccgcaagaggaagctggaaaccattgtgcagctggagcgggagctggagcggctgaccaatgaacgggagcggcttctcagggcccgcggggaggcagaccggaccctggaggtcatgcgccaacagctgacagagctgtaccgtgacattttccagcaccttcgggatgaatcaggcaacagctactctcctgaagagtacgcgctgcaacaggctgccgatgggaccatcttccttgtgccccgggggaccaagatggaggccacagactgagctggcccagaggggtggaactgctgatgggatttccttcattcccttctgataaaggtactccccaaccctgagtcccagaaggagctgagttctctagaccagaagaggatgacaatggcaacaagtgtttggaagttccaaggtgtgttcaaagaggcttgccttgagggagggctggaatctgtcttccctgactcggctcctcaggtctttagcctccaccttgtctaagctttggtctataaagtgcgctacagaaa

SEQ ID NO: 160544 - DNA, 1762 bp, Homo sapiens
  Payload ID: 11379
  Gene Symbol: NFE2
  Gene Name: nuclear factor, erythroid 2
  Uniprot ID: Q16621
  ENST ID: ENST00000435572
  CDS Start-End: 378-1499
atcgggctcaagtttcctctcttggccgaaaggggcaggaggagaggagagccacggggaaaggggagggttggaggaaggactgagaactcaggccgagggcttcagacgctggtgcgcctgcttggggctcctgtgctcagctcagcctgagcttccacactcagcgctcagcaatggcccgggggcggggcgcggtcctcgcagattctcaaaggtagccgggatcctcgtccagcagtgtcagctcaggctcagcctccccagagacaacaccgggagcctcatctctctcctcaccctgctgtgactccaccacaggtttctagagccatctgggctttccgggaacctggaccagactctggcccagtaggatgtccccgtgtcctccccagcagagcaggaacagggtgatacagctgtccacttcagagctaggagagatggaactgacttggcaggagatcatgtccatcaccgagctgcagggtctgaatgctccaagtgagccatcatttgagccccaagccccagctccataccttggacctccaccacccacaacttactgcccctgctcaatccacccagattctggcttcccacttcctccaccaccttatgagctcccagcatccacatcccatgtcccagatcccccatactcctatggcaacatggccataccagtctccaagccactgagcctctcaggcctgctcagtgagccgctccaagaccccttagccctcctggacattgggctgccagcagggccacctaagccccaagaagacccagaatccgactcaggattatccctcaactatagcgatgctgaatctcttgagctggaggggacagaggctggtcggcggcgcagcgaatatgtagagatgtacccagtggagtacccctactcactcatgcccaactccttggcccactccaactataccttgccagctgctgagacccccttggccttagagccctcctcaggccctgtgcgggctaagcccactgcacggggggaggcagggagtcgggatgaacgtcgggccttggccatgaagattccttttcctacggacaagattgtcaacttgccggtagatgactttaatgagctattggcaaggtacccgctgacagagagccagctagcgctagtccgggacatccgacgacggggcaaaaacaaggtggcagcccagaactgccgcaagaggaagctggaaaccattgtgcagctggagcgggagctggagcggctgaccaatgaacgggagcggcttctcagggcccgcggggaggcagaccggaccctggaggtcatgcgccaacagctgacagagctgtaccgtgacattttccagcaccttcgggatgaatcaggcaacagctactctcctgaagagtacgcgctgcaacaggctgccgatgggaccatcttccttgtgccccgggggaccaagatggaggccacagactgagctggcccagaggggtggaactgctgatgggatttccttcattcccttctgataaaggtactccccaaccctgagtcccagaaggagctgagttctctagaccagaagaggatgacaatggcaacaagtgtttggaagttccaaggtgtgttcaaagaggcttgccttgagggagggctggaatctgtcttccctgactcggctcctcaggtctttagcctccaccttgtctaagctttggtctataaagtgcgctacagaaa

SEQ ID NO: 160545 - DNA, 1833 bp, Homo sapiens
  Payload ID: 11379
  Gene Symbol: NFE2
  Gene Name: nuclear factor, erythroid 2
  Uniprot ID: Q16621
  ENST ID: ENST00000540264
  CDS Start-End: 511-1632
atatactgtcatcatcttggaaagaaaaggctgagaacgtaaaactgaggacagaggaggaaagcagggtgacccctgatgttgccctagaaaatggaaaacaaaacacagcaaaacagaaaaacagaagatctgactctgcctttagccaggaaaacagtttgggggagtaaaaagtattagggaaaagagtgggcattttgcctggaaaaaaggtaaagacctcctgtgctaccaaaggaactgactgtggccatagttggcgaggtggagatcacaacacaggaaaagactttccatcttaagggattgatgaatccagcatgagtgaggatggggaggaggcggtctctccttccctcaggggaagctggagggagcccctccaaggaggtagtgcaaacttgctgaccctagcaggtgtagctctaacacctcttttcctttgacacaggtttctagagccatctgggctttccgggaacctggaccagactctggcccagtaggatgtccccgtgtcctccccagcagagcaggaacagggtgatacagctgtccacttcagagctaggagagatggaactgacttggcaggagatcatgtccatcaccgagctgcagggtctgaatgctccaagtgagccatcatttgagccccaagccccagctccataccttggacctccaccacccacaacttactgcccctgctcaatccacccagattctggcttcccacttcctccaccaccttatgagctcccagcatccacatcccatgtcccagatcccccatactcctatggcaacatggccataccagtctccaagccactgagcctctcaggcctgctcagtgagccgctccaagaccccttagccctcctggacattgggctgccagcagggccacctaagccccaagaagacccagaatccgactcaggattatccctcaactatagcgatgctgaatctcttgagctggaggggacagaggctggtcggcggcgcagcgaatatgtagagatgtacccagtggagtacccctactcactcatgcccaactccttggcccactccaactataccttgccagctgctgagacccccttggccttagagccctcctcaggccctgtgcgggctaagcccactgcacggggggaggcagggagtcgggatgaacgtcgggccttggccatgaagattccttttcctacggacaagattgtcaacttgccggtagatgactttaatgagctattggcaaggtacccgctgacagagagccagctagcgctagtccgggacatccgacgacggggcaaaaacaaggtggcagcccagaactgccgcaagaggaagctggaaaccattgtgcagctggagcgggagctggagcggctgaccaatgaacgggagcggcttctcagggcccgcggggaggcagaccggaccctggaggtcatgcgccaacagctgacagagctgtaccgtgacattttccagcaccttcgggatgaatcaggcaacagctactctcctgaagagtacgcgctgcaacaggctgccgatgggaccatcttccttgtgccccgggggaccaagatggaggccacagactgagctggcccagaggggtggaactgctgatgggatttccttcattcccttctgataaaggtactccccaaccctgagtcccagaaggagctgagttctctagaccagaagaggatgacaatggcaacaagtgtttggaagttccaaggtgtgttcaaagaggcttgccttgagggagggctggaatctgtcttccctgactcg

SEQ ID NO: 160546 - DNA, 1208 bp, Homo sapiens
  Payload ID: 11379
  Gene Symbol: NFE2
  Gene Name: nuclear factor, erythroid 2
  ENST ID: ENST00000553198
  CDS Start-End: 178-1208
ggatggaggcaagggctaggggagatactctttcaaaaggatcatttgtagttcctactaattttgtggtaagtcgaagagaagattccatattaaattgctgtgatgggccatccttgtggtttctagagccatctgggctttccgggaacctggaccagactctggcccagtaggatgtccccgtgtcctccccagcagagcaggaacagggtgatacagctgtccacttcagagctaggagagatggaactgacttggcaggagatcatgtccatcaccgagctgcagggtctgaatgctccaagtgagccatcatttgagccccaagccccagctccataccttggacctccaccacccacaacttactgcccctgctcaatccacccagattctggcttcccacttcctccaccaccttatgagctcccagcatccacatcccatgtcccagatcccccatactcctatggcaacatggccataccagtctccaagccactgagcctctcaggcctgctcagtgagccgctccaagaccccttagccctcctggacattgggctgccagcagggccacctaagccccaagaagacccagaatccgactcaggattatccctcaactatagcgatgctgaatctcttgagctggaggggacagaggctggtcggcggcgcagcgaatatgtagagatgtacccagtggagtacccctactcactcatgcccaactccttggcccactccaactataccttgccagctgctgagacccccttggccttagagccctcctcaggccctgtgcgggctaagcccactgcacggggggaggcagggagtcgggatgaacgtcgggccttggccatgaagattccttttcctacggacaagattgtcaacttgccggtagatgactttaatgagctattggcaaggtacccgctgacagagagccagctagcgctagtccgggacatccgacgacggggcaaaaacaaggtggcagcccagaactgccgcaagaggaagctggaaaccattgtgcagctggagcgggagctggagcggctgaccaatgaacgggagcggcttctcagggcccgcggggaggcagaccggaccctggaggtcatgcgccaacagctgacagagctgtaccgtgacattttccagcaccttcgggatgaatcaggcaacag

SEQ ID NO: 160547 - DNA, 1523 bp, Homo sapiens
  Payload ID: 11379
  Gene Symbol: NFE2
  Gene Name: nuclear factor, erythroid 2
  Uniprot ID: Q16621
  ENST ID: ENST00000553070
  CDS Start-End: 402-1523
agacgctggtgcgcctgcttggggctcctgtgctcagctcagcctgagcttccacactcagcgctcagcaatggcccgggggcggggcgcggtcctcgcagattctcaaaggtagccgggatcctcgtccagcagtgtcagctcaggctcagcctccccagagacaacaccgggagcctcatctctctcctcaccctgctgtgactccaccacaggggcagtagagatcagctggacctggagggagaaggaagacatcccaaccccagcatagttgcttctaactggaactcttggctgcttgggaaataggggcttgggaagcagtggaagagaagagaggaggtttctagagccatctgggctttccgggaacctggaccagactctggcccagtaggatgtccccgtgtcctccccagcagagcaggaacagggtgatacagctgtccacttcagagctaggagagatggaactgacttggcaggagatcatgtccatcaccgagctgcagggtctgaatgctccaagtgagccatcatttgagccccaagccccagctccataccttggacctccaccacccacaacttactgcccctgctcaatccacccagattctggcttcccacttcctccaccaccttatgagctcccagcatccacatcccatgtcccagatcccccatactcctatggcaacatggccataccagtctccaagccactgagcctctcaggcctgctcagtgagccgctccaagaccccttagccctcctggacattgggctgccagcagggccacctaagccccaagaagacccagaatccgactcaggattatccctcaactatagcgatgctgaatctcttgagctggaggggacagaggctggtcggcggcgcagcgaatatgtagagatgtacccagtggagtacccctactcactcatgcccaactccttggcccactccaactataccttgccagctgctgagacccccttggccttagagccctcctcaggccctgtgcgggctaagcccactgcacggggggaggcagggagtcgggatgaacgtcgggccttggccatgaagattccttttcctacggacaagattgtcaacttgccggtagatgactttaatgagctattggcaaggtacccgctgacagagagccagctagcgctagtccgggacatccgacgacggggcaaaaacaaggtggcagcccagaactgccgcaagaggaagctggaaaccattgtgcagctggagcgggagctggagcggctgaccaatgaacgggagcggcttctcagggcccgcggggaggcagaccggaccctggaggtcatgcgccaacagctgacagagctgtaccgtgacattttccagcaccttcgggatgaatcaggcaacagctactctcctgaagagtacgcgctgcaacaggctgccgatgggaccatcttccttgtgccccgggggaccaagatggaggccacagactga

SEQ ID NO: 160548 - DNA, 4672 bp, Homo sapiens
  Payload ID: 11380
  Gene Symbol: NFE2L1
  Gene Name: nuclear factor, erythroid 2-like 1
  Uniprot ID: Q14494
  ENST ID: ENST00000357480
  CDS Start-End: 606-2834
ccgagctctaggccggccggcggtggcggcggcgaggccgggactcgggcttagggcctgctgtggaggcagcggcggacgccgagctaagcagtttctctggaaacccccctggtaagtgtggaggaggcgggacactctgacccaagacgaaaggcctgtagctccagccaaagaaaataaaccttaggagggagaaggaaaaaaaaaatccatcagctgttcctgagaacagcctgcattggaatctacagagaggacaactaatgtgagtgaggaagtgactgtatgtggactgtggagaaagtaagtcacgtgggcccttgaggacctggactgggttaggaacagttgtactttcagaggtgaggtgtcgagaagggaaagtgaatgtggtctggagtgtgtccttggccttggctccacagggtgtgctttcctctggggccgtcagggagctcatcccttgtgttctgccagggtggggtacggggtttgacactgaggagggtaacctgctggctggagcggcagagcagtggccttgatttgtcttttggaagattttaaaaaccaaaaagcataaacattctggtccttcagcaatgctttctctgaagaaatacttaacggaaggacttctccagttcaccattctgctgagtttgattggggtacgggtggacgtggatacttacctgacctcacagcttcccccactccgggagatcatcctggggcccagttctgcctatactcagacccagttccacaacctgaggaataccttggatggctatggtatccaccccaagagcatagacctggacaattacttcactgcccggcggctcctcagtcaggtgagggccctggacaggttccaggtgccaaccactgaggtaaatgcctggctggttcaccgagacccagaggggtctgtctctggcagtcagcccaactcaggcctcgccctcgagagttccagtggcctccaagatgtgacaggcccagacaacggggtgcgagaaagcgaaacggagcagggattcggtgaagatttggaggatttgggggctgtagcccccccagtcagtggagacttaaccaaagaggacatagatctgattgacatcctttggcgacaggatattgatctgggggctgggcgtgaggtttttgactatagtcaccgccagaaggagcaggatgtggagaaggagctgcgagatggaggcgagcaggacacctgggcaggcgagggcgcggaagctctggcacggaacctgctagtggatggagagactggggagagcttccctgcacagtttccagcagacatttccagcataacagaagcagtgcctagtgagagtgagccccctgctcttcaaaacaacctcttgtctcctcttctgaccgggacagagtcaccatttgatttggaacagcagtggcaagatctcatgtccatcatggaaatgcaggccatggaagtgaacacatcagcaagtgaaatcctgtacagtgcccctcctggagacccactgagcaccaactacagccttgcccccaacactcccatcaatcagaatgtcagcctgcatcaggcgtccctggggggctgcagccaggacttcttactcttcagccccgaggtggaaagcctgcctgtggccagtagctccacgctgctcccgttggcccccagcaattctaccagcctcaactccaccttcggctccaccaacctgacagggctcttctttccaccccagctcaatggcacagccaatgacacagcaggcccagagctgcctgaccctttggggggtctgttagatgaagctatgttggatgagatcagccttatggacctggccattgaagaaggctttaaccctgtgcaggcctcccagctggaggaggaatttgactctgactcaggcctttccttagactcgagccatagcccttcttccctaagcagctctgaaggcagttcttcctcttcttcctcctcctcttcctcttcttcctctgcttcttcctctgcctcttcctccttttctgaggaaggtgcggttggctacagctctgactctgagaccctggatctggaagaggccgagggtgctgtgggctaccagcctgagtattccaagttctgccgcatgagctaccaggatccagctcagctctcatgcctgccctacctggagcacgtgggccacaaccacacatacaacatggcacccagtgccctggactcagccgacctgccaccacccagtgccctcaagaaaggcagcaaggagaagcaggctgacttcctggacaagcagatgagccgggatgagcaccgagcccgagccatgaagatccctttcaccaatgacaaaatcatcaacctgcctgtggaggagttcaatgaactgctgtccaaataccagttgagtgaagcccagctgagcctcatccgagacatccggcgccggggcaagaacaagatggcggcgcagaactgccgcaagcgcaagctggacaccatcctgaatctggagcgtgatgtggaggacctgcagcgtgacaaagcccggctgctgcgggagaaagtggagttcctgcgctccctgcgacagatgaagcagaaggtccagagcctgtaccaggaggtgtttgggcggctgcgagatgagaacggacgaccctactcgcccagtcagtatgcgctccagtacgccggggacggcagtgtcctcctcatcccccgcacgatggccgaccagcaggcccggcggcaggagaggaagccaaaggaccggagaaagtgagcctggggaagaagggggtttgaagcccaccaagaccgaaactggagaagggctggacctggacctggacctggacctacagcggggacttaaatgccttcttatccaatatatcttctcagatgggatgactgcgggtcagtgtacaggaagaggcaggcactggctggctcagctccactcgggtggagtggaagtggccagaccatttagacggacagggtcctcaccctacccctttcctgtgaggcaggggtggtggtggagttgctggaggtagaggagctatgtggagcaaaggccgacagaggggaaggaatggacctgtgagaggaagggaaggtggcagaaagtctcatttcaggaaggagggatagaaggaaggaaggaaggaacccccccccccccgaaaaaaaaatcaaagcgggaagaaaatcagagggaaggttaaggttggctctggccaggattccaggcagcaggttggagtgactggtgggcctagatcactggtgtgataaaccccaattttcaccccggggggggtggggtacacagacacagggtgggggtggggagggacggtgttaactctttctgctccttgcattttgacatccctgaaggggagctcttggatatcattggccatgtttcaatcgaatggagccactgggccccaacactggctttgagatttagagtcaaagggtagagtgaacaggaaagggtcacgtggtcccatgttgcaacagccccaacatcacgcatgtcattcactgccttgccactccatctccctccgtgctccagccacccctgagctgaggctcccattgtctccatcagagcctgcatgtgtatgccgtcctcccctggtccggtgtttgtgttccccacccctcacagactgcctgagctcttctgtaagctggggtagggtgatggcagtgctccgggaactgggcctgcagccttcctcttctgggactgctgtgaggcagaggaatgatggagaatctagtgtagcagcctccaggcaggattcagcacaacactggggagtcacccttccctcgggcctctgcctaccaacaactgggcttatcactgggaaaacacaaaaaattacacaacccagcaacaacaaaagaactagtcctcttagaatttcttgcgctttgatttttttagggcttgtgccctgtttcacttatagggtctagaatgcttgtgttgagtaaaaaggagatgcccaatattcaaagctgctaaatgttctctttgccataaagactccgtgtaactgtgtgaacacttgggatttttctcctctgtcccgaggtcgtcgtctgctttcttttttgggtttctttctagaagattgagaagtgcatatgacaggctgagagcacctccccaaacacacaagctctcagccacaggcagcttctccacagccccagcttcgcacaggctcctggagggctgcctgggggaggcagacatgggagtgccaaggtggccagatggttccaggactacaatgtctttatttttaactgtttgccactgctgccctcacccctgcccggctctggagtaccgtctgccccagacaagtgggagtgaaatgggggtggggggaagcactgattcccagttagggggtgcctaactgagcagtagggatagaaggtgtgaacctgggagtgcttttataaattattttccttgtagattttatttttaatttatctctgtgacctgccagggagaggggagagagagagagatgctgttgagcacatgacaaaataaaataaaatggatgattc

SEQ ID NO: 160549 - DNA, 4774 bp, Homo sapiens
  Payload ID: 11380
  Gene Symbol: NFE2L1
  Gene Name: nuclear factor, erythroid 2-like 1
  Uniprot ID: Q14494
  ENST ID: ENST00000362042
  CDS Start-End: 617-2935
aagcggaggctccgagctctaggccggccggcggtggcggcggcgaggccgggactcgggcttagggcctgctgtggaggcagcggcggacgccgagctaagcagtttctctggaaacccccctggtaagtgtggaggaggcgggacactctgacccaagacgaaaggcctgtagctccagccaaagaaaataaaccttaggagggagaaggaaaaaaaaaatccatcagctgttcctgagaacagcctgcattggaatctacagagaggacaactaatgtgagtgaggaagtgactgtatgtggactgtggagaaagtaagtcacgtgggcccttgaggacctggactgggttaggaacagttgtactttcagaggtgaggtgtcgagaagggaaagtgaatgtggtctggagtgtgtccttggccttggctccacagggtgtgctttcctctggggccgtcagggagctcatcccttgtgttctgccagggtggggtacggggtttgacactgaggagggtaacctgctggctggagcggcagagcagtggccttgatttgtcttttggaagattttaaaaaccaaaaagcataaacattctggtccttcagcaatgctttctctgaagaaatacttaacggaaggacttctccagttcaccattctgctgagtttgattggggtacgggtggacgtggatacttacctgacctcacagcttcccccactccgggagatcatcctggggcccagttctgcctatactcagacccagttccacaacctgaggaataccttggatggctatggtatccaccccaagagcatagacctggacaattacttcactgcccggcggctcctcagtcaggtgagggccctggacaggttccaggtgccaaccactgaggtaaatgcctggctggttcaccgagacccagaggggtctgtctctggcagtcagcccaactcaggcctcgccctcgagagttccagtggcctccaagatgtgacaggcccagacaacggggtgcgagaaagcgaaacggagcagggattcggtgaagatttggaggatttgggggctgtagcccccccagtcagtggagacttaaccaaagaggacatagatctgattgacatcctttggcgacaggatattgatctgggggctgggcgtgaggtttttgactatagtcaccgccagaaggagcaggatgtggagaaggagctgcgagatggaggcgagcaggacacctgggcaggcgagggcgcggaagctctggcacggaacctgctagtggatggagagactggggagagcttccctgcacaggtgcctagtggggaggaccagacggccctgtccctggaagagtgccttaggctgctggaagccacctgcccctttggggagaatgctgagtttccagcagacatttccagcataacagaagcagtgcctagtgagagtgagccccctgctcttcaaaacaacctcttgtctcctcttctgaccgggacagagtcaccatttgatttggaacagcagtggcaagatctcatgtccatcatggaaatgcaggccatggaagtgaacacatcagcaagtgaaatcctgtacagtgcccctcctggagacccactgagcaccaactacagccttgcccccaacactcccatcaatcagaatgtcagcctgcatcaggcgtccctggggggctgcagccaggacttcttactcttcagccccgaggtggaaagcctgcctgtggccagtagctccacgctgctcccgttggcccccagcaattctaccagcctcaactccaccttcggctccaccaacctgacagggctcttctttccaccccagctcaatggcacagccaatgacacagcaggcccagagctgcctgaccctttggggggtctgttagatgaagctatgttggatgagatcagccttatggacctggccattgaagaaggctttaaccctgtgcaggcctcccagctggaggaggaatttgactctgactcaggcctttccttagactcgagccatagcccttcttccctaagcagctctgaaggcagttcttcctcttcttcctcctcctcttcctcttcttcctctgcttcttcctctgcctcttcctccttttctgaggaaggtgcggttggctacagctctgactctgagaccctggatctggaagaggccgagggtgctgtgggctaccagcctgagtattccaagttctgccgcatgagctaccaggatccagctcagctctcatgcctgccctacctggagcacgtgggccacaaccacacatacaacatggcacccagtgccctggactcagccgacctgccaccacccagtgccctcaagaaaggcagcaaggagaagcaggctgacttcctggacaagcagatgagccgggatgagcaccgagcccgagccatgaagatccctttcaccaatgacaaaatcatcaacctgcctgtggaggagttcaatgaactgctgtccaaataccagttgagtgaagcccagctgagcctcatccgagacatccggcgccggggcaagaacaagatggcggcgcagaactgccgcaagcgcaagctggacaccatcctgaatctggagcgtgatgtggaggacctgcagcgtgacaaagcccggctgctgcgggagaaagtggagttcctgcgctccctgcgacagatgaagcagaaggtccagagcctgtaccaggaggtgtttgggcggctgcgagatgagaacggacgaccctactcgcccagtcagtatgcgctccagtacgccggggacggcagtgtcctcctcatcccccgcacgatggccgaccagcaggcccggcggcaggagaggaagccaaaggaccggagaaagtgagcctggggaagaagggggtttgaagcccaccaagaccgaaactggagaagggctggacctggacctggacctggacctacagcggggacttaaatgccttcttatccaatatatcttctcagatgggatgactgcgggtcagtgtacaggaagaggcaggcactggctggctcagctccactcgggtggagtggaagtggccagaccatttagacggacagggtcctcaccctacccctttcctgtgaggcaggggtggtggtggagttgctggaggtagaggagctatgtggagcaaaggccgacagaggggaaggaatggacctgtgagaggaagggaaggtggcagaaagtctcatttcaggaaggagggatagaaggaaggaaggaaggaacccccccccccccgaaaaaaaaatcaaagcgggaagaaaatcagagggaaggttaaggttggctctggccaggattccaggcagcaggttggagtgactggtgggcctagatcactggtgtgataaaccccaattttcaccccggggggggtggggtacacagacacagggtgggggtggggagggacggtgttaactctttctgctccttgcattttgacatccctgaaggggagctcttggatatcattggccatgtttcaatcgaatggagccactgggccccaacactggctttgagatttagagtcaaagggtagagtgaacaggaaagggtcacgtggtcccatgttgcaacagccccaacatcacgcatgtcattcactgccttgccactccatctccctccgtgctccagccacccctgagctgaggctcccattgtctccatcagagcctgcatgtgtatgccgtcctcccctggtccggtgtttgtgttccccacccctcacagactgcctgagctcttctgtaagctggggtagggtgatggcagtgctccgggaactgggcctgcagccttcctcttctgggactgctgtgaggcagaggaatgatggagaatctagtgtagcagcctccaggcaggattcagcacaacactggggagtcacccttccctcgggcctctgcctaccaacaactgggcttatcactgggaaaacacaaaaaattacacaacccagcaacaacaaaagaactagtcctcttagaatttcttgcgctttgatttttttagggcttgtgccctgtttcacttatagggtctagaatgcttgtgttgagtaaaaaggagatgcccaatattcaaagctgctaaatgttctctttgccataaagactccgtgtaactgtgtgaacacttgggatttttctcctctgtcccgaggtcgtcgtctgctttcttttttgggtttctttctagaagattgagaagtgcatatgacaggctgagagcacctccccaaacacacaagctctcagccacaggcagcttctccacagccccagcttcgcacaggctcctggagggctgcctgggggaggcagacatgggagtgccaaggtggccagatggttccaggactacaatgtctttatttttaactgtttgccactgctgccctcacccctgcccggctctggagtaccgtctgccccagacaagtgggagtgaaatgggggtggggggaagcactgattcccagttagggggtgcctaactgagcagtagggatagaaggtgtgaacctgggagtgcttttataaattattttccttgtagattttatttttaatttatctctgtgacctgccagggagaggggagagagagagagatgctgttgagcacatgacaaaataaaataaaatggatgattca

SEQ ID NO: 160550 - DNA, 4729 bp, Homo sapiens
  Payload ID: 11380
  Gene Symbol: NFE2L1
  Gene Name: nuclear factor, erythroid 2-like 1
  ENST ID: ENST00000361665
  CDS Start-End: 605-2890
agggaagtagcacttgttcgctggccgcccctggaggctagaagctccggcgccgagagtgggcatggcgacttggtctcagccggactcgggtttctctggaaacccccctggtaagtgtggaggaggcgggacactctgacccaagacgaaaggcctgtagctccagccaaagaaaataaaccttaggagggagaaggaaaaaaaaaatccatcagctgttcctgagaacagcctgcattggaatctacagagaggacaactaatgtgagtgaggaagtgactgtatgtggactgtggagaaagtaagtcacgtgggcccttgaggacctggactgggttaggaacagttgtactttcagaggtgaggtgtcgagaagggaaagtgaatgtggtctggagtgtgtccttggccttggctccacagggtgtgctttcctctggggccgtcagggagctcatcccttgtgttctgccagggtggggtacggggtttgacactgaggagggtaacctgctggctggagcggcagagcagtggccttgatttgtcttttggaagattttaaaaaccaaaaagcataaacattctggtccttcagcaatgctttctctgaagaaatacttaacggaaggacttctccagttcaccattctgctgagtttgattggggtacgggtggacgtggatacttacctgacctcacagcttcccccactccgggagatcatcctggggcccagttctgcctatactcagacccagttccacaacctgaggaataccttggatggctatggtatccaccccaagagcatagacctggacaattacttcactgcccggcggctcctcagtcaggtgagggccctggacaggttccaggtgccaaccactgaggtaaatgcctggctggttcaccgagacccagaggggtctgtctctggcagtcagcccaactcaggcctcgccctcgagagttccagtggcctccaagatgtgacaggcccagacaacggggtgcgagaaagcgaaacggagcagggattcggtgaagatttggaggatttgggggctgtagcccccccagtcagtggagacttaaccaaagaggatattgatctgggggctgggcgtgaggtttttgactatagtcaccgccagaaggagcaggatgtggagaaggagctgcgagatggaggcgagcaggacacctgggcaggcgagggcgcggaagctctggcacggaacctgctagtggatggagagactggggagagcttccctgcacaggtgcctagtggggaggaccagacggccctgtccctggaagagtgccttaggctgctggaagccacctgcccctttggggagaatgctgagtttccagcagacatttccagcataacagaagcagtgcctagtgagagtgagccccctgctcttcaaaacaacctcttgtctcctcttctgaccgggacagagtcaccatttgatttggaacagcagtggcaagatctcatgtccatcatggaaatgcaggccatggaagtgaacacatcagcaagtgaaatcctgtacagtgcccctcctggagacccactgagcaccaactacagccttgcccccaacactcccatcaatcagaatgtcagcctgcatcaggcgtccctggggggctgcagccaggacttcttactcttcagccccgaggtggaaagcctgcctgtggccagtagctccacgctgctcccgttggcccccagcaattctaccagcctcaactccaccttcggctccaccaacctgacagggctcttctttccaccccagctcaatggcacagccaatgacacagcaggcccagagctgcctgaccctttggggggtctgttagatgaagctatgttggatgagatcagccttatggacctggccattgaagaaggctttaaccctgtgcaggcctcccagctggaggaggaatttgactctgactcaggcctttccttagactcgagccatagcccttcttccctaagcagctctgaaggcagttcttcctcttcttcctcctcctcttcctcttcttcctctgcttcttcctctgcctcttcctccttttctgaggaaggtgcggttggctacagctctgactctgagaccctggatctggaagaggccgagggtgctgtgggctaccagcctgagtattccaagttctgccgcatgagctaccaggatccagctcagctctcatgcctgccctacctggagcacgtgggccacaaccacacatacaacatggcacccagtgccctggactcagccgacctgccaccacccagtgccctcaagaaaggcagcaaggagaagcaggctgacttcctggacaagcagatgagccgggatgagcaccgagcccgagccatgaagatccctttcaccaatgacaaaatcatcaacctgcctgtggaggagttcaatgaactgctgtccaaataccagttgagtgaagcccagctgagcctcatccgagacatccggcgccggggcaagaacaagatggcggcgcagaactgccgcaagcgcaagctggacaccatcctgaatctggagcgtgatgtggaggacctgcagcgtgacaaagcccggctgctgcgggagaaagtggagttcctgcgctccctgcgacagatgaagcagaaggtccagagcctgtaccaggaggtgtttgggcggctgcgagatgagaacggacgaccctactcgcccagtcagtatgcgctccagtacgccggggacggcagtgtcctcctcatcccccgcacgatggccgaccagcaggcccggcggcaggagaggaagccaaaggaccggagaaagtgagcctggggaagaagggggtttgaagcccaccaagaccgaaactggagaagggctggacctggacctggacctggacctacagcggggacttaaatgccttcttatccaatatatcttctcagatgggatgactgcgggtcagtgtacaggaagaggcaggcactggctggctcagctccactcgggtggagtggaagtggccagaccatttagacggacagggtcctcaccctacccctttcctgtgaggcaggggtggtggtggagttgctggaggtagaggagctatgtggagcaaaggccgacagaggggaaggaatggacctgtgagaggaagggaaggtggcagaaagtctcatttcaggaaggagggatagaaggaaggaaggaaggaacccccccccccccgaaaaaaaaatcaaagcgggaagaaaatcagagggaaggttaaggttggctctggccaggattccaggcagcaggttggagtgactggtgggcctagatcactggtgtgataaaccccaattttcaccccggggggggtggggtacacagacacagggtgggggtggggagggacggtgttaactctttctgctccttgcattttgacatccctgaaggggagctcttggatatcattggccatgtttcaatcgaatggagccactgggccccaacactggctttgagatttagagtcaaagggtagagtgaacaggaaagggtcacgtggtcccatgttgcaacagccccaacatcacgcatgtcattcactgccttgccactccatctccctccgtgctccagccacccctgagctgaggctcccattgtctccatcagagcctgcatgtgtatgccgtcctcccctggtccggtgtttgtgttccccacccctcacagactgcctgagctcttctgtaagctggggtagggtgatggcagtgctccgggaactgggcctgcagccttcctcttctgggactgctgtgaggcagaggaatgatggagaatctagtgtagcagcctccaggcaggattcagcacaacactggggagtcacccttccctcgggcctctgcctaccaacaactgggcttatcactgggaaaacacaaaaaattacacaacccagcaacaacaaaagaactagtcctcttagaatttcttgcgctttgatttttttagggcttgtgccctgtttcacttatagggtctagaatgcttgtgttgagtaaaaaggagatgcccaatattcaaagctgctaaatgttctctttgccataaagactccgtgtaactgtgtgaacacttgggatttttctcctctgtcccgaggtcgtcgtctgctttcttttttgggtttctttctagaagattgagaagtgcatatgacaggctgagagcacctccccaaacacacaagctctcagccacaggcagcttctccacagccccagcttcgcacaggctcctggagggctgcctgggggaggcagacatgggagtgccaaggtggccagatggttccaggactacaatgtctttatttttaactgtttgccactgctgccctcacccctgcccggctctggagtaccgtctgccccagacaagtgggagtgaaatgggggtggggggaagcactgattcccagttagggggtgcctaactgagcagtagggatagaaggtgtgaacctgggagtgcttttataaattattttccttgtagattttatttttaatttatctctgtgacctgccagggagaggggagagagagagagatgctgttgagcacatgacaaaataaaataaaatggatgattca

SEQ ID NO: 160551 - DNA, 2172 bp, Homo sapiens
  Payload ID: 11380
  Gene Symbol: NFE2L1
  Gene Name: nuclear factor, erythroid 2-like 1
  ENST ID: ENST00000536222
  CDS Start-End: 310-2160
agcttgagcacggagcatggggtgggagtcccatctcactgcagcctctgcggtgagctcagggtgggggcagctgggcgcctgagtggaactggggttgtgaggtgggagggggctgctcaaggatggaggaagggggctggctgggccgcccaggcagcagcacgggcggggcaccctcctcaggcccctcggagctagcaaggggccacccttccagcctggtgtgctccctgaaagccaagagctccttgcagccccctgtccggcttcccggcaccggctgccctggggctcatctcgcagaccatgacccgcctggaccgcagctctcacagtggtgggggccatgccaaaggcagccggccccttaactctttgctggctggtcaccgggtggcccagcccgcctctgctcctgggtccagggcttctgttcaggacatagatctgattgacatcctttggcgacaggatattgatctgggggctgggcgtgaggtttttgactatagtcaccgccagaaggagcaggatgtggagaaggagctgcgagatggaggcgagcaggacacctgggcaggcgagggcgcggaagctctggcacggaacctgctagtggatggagagactggggagagcttccctgcacagtttccagcagacatttccagcataacagaagcagtgcctagtgagagtgagccccctgctcttcaaaacaacctcttgtctcctcttctgaccgggacagagtcaccatttgatttggaacagcagtggcaagatctcatgtccatcatggaaatgcaggccatggaagtgaacacatcagcaagtgaaatcctgtacagtgcccctcctggagacccactgagcaccaactacagccttgcccccaacactcccatcaatcagaatgtcagcctgcatcaggcgtccctggggggctgcagccaggacttcttactcttcagccccgaggtggaaagcctgcctgtggccagtagctccacgctgctcccgttggcccccagcaattctaccagcctcaactccaccttcggctccaccaacctgacagggctcttctttccaccccagctcaatggcacagccaatgacacagcaggcccagagctgcctgaccctttggggggtctgttagatgaagctatgttggatgagatcagccttatggacctggccattgaagaaggctttaaccctgtgcaggcctcccagctggaggaggaatttgactctgactcaggcctttccttagactcgagccatagcccttcttccctaagcagctctgaaggcagttcttcctcttcttcctcctcctcttcctcttcttcctctgcttcttcctctgcctcttcctccttttctgaggaaggtgcggttggctacagctctgactctgagaccctggatctggaagaggccgagggtgctgtgggctaccagcctgagtattccaagttctgccgcatgagctaccaggatccagctcagctctcatgcctgccctacctggagcacgtgggccacaaccacacatacaacatggcacccagtgccctggactcagccgacctgccaccacccagtgccctcaagaaaggcagcaaggagaagcaggctgacttcctggacaagcagatgagccgggatgagcaccgagcccgagccatgaagatccctttcaccaatgacaaaatcatcaacctgcctgtggaggagttcaatgaactgctgtccaaataccagttgagtgaagcccagctgagcctcatccgagacatccggcgccggggcaagaacaagatggcggcgcagaactgccgcaagcgcaagctggacaccatcctgaatctggagcgtgatgtggaggacctgcagcgtgacaaagcccggctgctgcgggagaaagtggagttcctgcgctccctgcgacagatgaagcagaaggtccagagcctgtaccaggaggtgtttgggcggctgcgagatgagaacggacgaccctactcgcccagtcagtatgcgctccagtacgccggggacggcagtgtcctcctcatcccccgcacgatggccgaccagcaggcccggcggcaggagaggaagccaaaggaccggagaaagtgagcctggggaaga

SEQ ID NO: 160552 - DNA, 4390 bp, Homo sapiens
  Payload ID: 11380
  Gene Symbol: NFE2L1
  Gene Name: nuclear factor, erythroid 2-like 1
  Uniprot ID: Q14494
  ENST ID: ENST00000585291
  CDS Start-End: 316-2544
ggaggctccgagctctaggccggccggcggtggcggcggcgaggccgggactcgggcttagggcctgctgtggaggcagcggcggacgccgagctaagcagtttctctggaaacccccctggtaagtgtggaggaggcgggacactctgacccaagacgaaaggcctgtagctccagccaaagaaaataaaccttaggagggagaaggaaaaaaaaaatccatcagctgttcctgagaacagcctgcattggaatctacagagaggacaactaatgtgagtgaggaagtgactgtatgtggactgtggagaaacaatgctttctctgaagaaatacttaacggaaggacttctccagttcaccattctgctgagtttgattggggtacgggtggacgtggatacttacctgacctcacagcttcccccactccgggagatcatcctggggcccagttctgcctatactcagacccagttccacaacctgaggaataccttggatggctatggtatccaccccaagagcatagacctggacaattacttcactgcccggcggctcctcagtcaggtgagggccctggacaggttccaggtgccaaccactgaggtaaatgcctggctggttcaccgagacccagaggggtctgtctctggcagtcagcccaactcaggcctcgccctcgagagttccagtggcctccaagatgtgacaggcccagacaacggggtgcgagaaagcgaaacggagcagggattcggtgaagatttggaggatttgggggctgtagcccccccagtcagtggagacttaaccaaagaggacatagatctgattgacatcctttggcgacaggatattgatctgggggctgggcgtgaggtttttgactatagtcaccgccagaaggagcaggatgtggagaaggagctgcgagatggaggcgagcaggacacctgggcaggcgagggcgcggaagctctggcacggaacctgctagtggatggagagactggggagagcttccctgcacagtttccagcagacatttccagcataacagaagcagtgcctagtgagagtgagccccctgctcttcaaaacaacctcttgtctcctcttctgaccgggacagagtcaccatttgatttggaacagcagtggcaagatctcatgtccatcatggaaatgcaggccatggaagtgaacacatcagcaagtgaaatcctgtacagtgcccctcctggagacccactgagcaccaactacagccttgcccccaacactcccatcaatcagaatgtcagcctgcatcaggcgtccctggggggctgcagccaggacttcttactcttcagccccgaggtggaaagcctgcctgtggccagtagctccacgctgctcccgttggcccccagcaattctaccagcctcaactccaccttcggctccaccaacctgacagggctcttctttccaccccagctcaatggcacagccaatgacacagcaggcccagagctgcctgaccctttggggggtctgttagatgaagctatgttggatgagatcagccttatggacctggccattgaagaaggctttaaccctgtgcaggcctcccagctggaggaggaatttgactctgactcaggcctttccttagactcgagccatagcccttcttccctaagcagctctgaaggcagttcttcctcttcttcctcctcctcttcctcttcttcctctgcttcttcctctgcctcttcctccttttctgaggaaggtgcggttggctacagctctgactctgagaccctggatctggaagaggccgagggtgctgtgggctaccagcctgagtattccaagttctgccgcatgagctaccaggatccagctcagctctcatgcctgccctacctggagcacgtgggccacaaccacacatacaacatggcacccagtgccctggactcagccgacctgccaccacccagtgccctcaagaaaggcagcaaggagaagcaggctgacttcctggacaagcagatgagccgggatgagcaccgagcccgagccatgaagatccctttcaccaatgacaaaatcatcaacctgcctgtggaggagttcaatgaactgctgtccaaataccagttgagtgaagcccagctgagcctcatccgagacatccggcgccggggcaagaacaagatggcggcgcagaactgccgcaagcgcaagctggacaccatcctgaatctggagcgtgatgtggaggacctgcagcgtgacaaagcccggctgctgcgggagaaagtggagttcctgcgctccctgcgacagatgaagcagaaggtccagagcctgtaccaggaggtgtttgggcggctgcgagatgagaacggacgaccctactcgcccagtcagtatgcgctccagtacgccggggacggcagtgtcctcctcatcccccgcacgatggccgaccagcaggcccggcggcaggagaggaagccaaaggaccggagaaagtgagcctggggaagaagggggtttgaagcccaccaagaccgaaactggagaagggctggacctggacctggacctggacctacagcggggacttaaatgccttcttatccaatatatcttctcagatgggatgactgcgggtcagtgtacaggaagaggcaggcactggctggctcagctccactcgggtggagtggaagtggccagaccatttagacggacagggtcctcaccctacccctttcctgtgaggcaggggtggtggtggagttgctggaggtagaggagctatgtggagcaaaggccgacagaggggaaggaatggacctgtgagaggaagggaaggtggcagaaagtctcatttcaggaaggagggatagaaggaaggaaggaaggaacccccccccccccgaaaaaaaaatcaaagcgggaagaaaatcagagggaaggttaaggttggctctggccaggattccaggcagcaggttggagtgactggtgggcctagatcactggtgtgataaaccccaattttcaccccggggggggtggggtacacagacacagggtgggggtggggagggacggtgttaactctttctgctccttgcattttgacatccctgaaggggagctcttggatatcattggccatgtttcaatcgaatggagccactgggccccaacactggctttgagatttagagtcaaagggtagagtgaacaggaaagggtcacgtggtcccatgttgcaacagccccaacatcacgcatgtcattcactgccttgccactccatctccctccgtgctccagccacccctgagctgaggctcccattgtctccatcagagcctgcatgtgtatgccgtcctcccctggtccggtgtttgtgttccccacccctcacagactgcctgagctcttctgtaagctggggtagggtgatggcagtgctccgggaactgggcctgcagccttcctcttctgggactgctgtgaggcagaggaatgatggagaatctagtgtagcagcctccaggcaggattcagcacaacactggggagtcacccttccctcgggcctctgcctaccaacaactgggcttatcactgggaaaacacaaaaaattacacaacccagcaacaacaaaagaactagtcctcttagaatttcttgcgctttgatttttttagggcttgtgccctgtttcacttatagggtctagaatgcttgtgttgagtaaaaaggagatgcccaatattcaaagctgctaaatgttctctttgccataaagactccgtgtaactgtgtgaacacttgggatttttctcctctgtcccgaggtcgtcgtctgctttcttttttgggtttctttctagaagattgagaagtgcatatgacaggctgagagcacctccccaaacacacaagctctcagccacaggcagcttctccacagccccagcttcgcacaggctcctggagggctgcctgggggaggcagacatgggagtgccaaggtggccagatggttccaggactacaatgtctttatttttaactgtttgccactgctgccctcacccctgcccggctctggagtaccgtctgccccagacaagtgggagtgaaatgggggtggggggaagcactgattcccagttagggggtgcctaactgagcagtagggatagaaggtgtgaacctgggagtgcttttataaattattttccttgtagattttatttttaatttatctctgtgacctgccagggagaggggagagagagagagatgctgttgagcacatgacaaaataaaataaaatggatgattcattcttaa

SEQ ID NO: 160553 - DNA, 481 bp, Homo sapiens
  Payload ID: 11380
  Gene Symbol: NFE2L1
  Gene Name: nuclear factor, erythroid 2-like 1
  ENST ID: ENST00000581319
  CDS Start-End: 1-402
tctgaggaaggtgcggttggctacagctctgactctgagaccctggatctggaagaggccgagggtgctgtgggctaccagcctgagtattccaagttctgccgcatgagctaccaggatccagctcagctctcatgcctgccctacctggagcacgtgggccacaaccacacatacaacatggcacccagtgccctggactcagccgacctgccaccacccagtgccctcaagaaaggcagcaaggagaagcaggctgacttcctggacaagcagatgagccgggatgagcaccgagcccgagccatgaagatccctttcaccaatgacaaaatcatcaacctgcctgtagaggagctatgtggagcaaaggccgacagaggggaaggaatggacctgtgagaggaagggaaggtggcagaaagtctcatttcaggaaggagggatagaaggaaggaaggaaggaacccccccccccccg

SEQ ID NO: 160554 - DNA, 568 bp, Homo sapiens
  Payload ID: 11380
  Gene Symbol: NFE2L1
  Gene Name: nuclear factor, erythroid 2-like 1
  ENST ID: ENST00000579889
  CDS Start-End: 541-568
gagtgcggtagcaggagggggcggggaggtttctctggaaacccccctggtaagtgtggaggaggcgggacactctgacccaagacgaaaggcctgtagctccagccaaagaaaataaaccttaggagggagaaggaaaaaaaaaatccatcagctgttcctgagaacagcctgcattggaatctacagagaggacaactaatgtgagtgaggaagtgactgtatgtggactgtggagaaagtaagtcacgtgggcccttgaggacctggactgggttaggaacagttgtactttcagaggtgaggtgtcgagaagggaaagtgaatgtggtctggagtgtgtccttggccttggctccacagggtgtgctttcctctggggccgtcagggagctcatcccttgtgttctgccagggtggggtacggggtttgacactgaggagggtaacctgctggctggagcggcagagcagtggccttgatttgtcttttggaagattttaaaaaccaaaaagcataaacattctggtccttcagcaatgctttctctgaagaaatacttaacgg

SEQ ID NO: 160555 - DNA, 552 bp, Homo sapiens
  Payload ID: 11380
  Gene Symbol: NFE2L1
  Gene Name: nuclear factor, erythroid 2-like 1
  ENST ID: ENST00000581441
  CDS Start-End: 542-552
atgggtcacaacgcaggagaggagaggcggtttctctggaaacccccctggtaagtgtggaggaggcgggacactctgacccaagacgaaaggcctgtagctccagccaaagaaaataaaccttaggagggagaaggaaaaaaaaaatccatcagctgttcctgagaacagcctgcattggaatctacagagaggacaactaatgtgagtgaggaagtgactgtatgtggactgtggagaaagtaagtcacgtgggcccttgaggacctggactgggttaggaacagttgtactttcagaggtgaggtgtcgagaagggaaagtgaatgtggtctggagtgtgtccttggccttggctccacagggtgtgctttcctctggggccgtcagggagctcatcccttgtgttctgccagggtggggtacggggtttgacactgaggagggtaacctgctggctggagcggcagagcagtggccttgatttgtcttttggaagattttaaaaaccaaaaagcataaacattctggtccttcagcaatgctttctct

SEQ ID NO: 160556 - DNA, 372 bp, Homo sapiens
  Payload ID: 11380
  Gene Symbol: NFE2L1
  Gene Name: nuclear factor, erythroid 2-like 1
  ENST ID: ENST00000579537
  CDS Start-End: 182-372
aaggagacggaggcggcccagggatgggctggttccttgcggcagcttctccagctgccctgatgcagagattggctcccgtctgcagctagcctggtgtgctccctgaaagccaagagctccttgcagccccctgtccggcttcccggcaccggctgccctggggctcatctcgcagaccatgacccgcctggaccgcagctctcacagtggtgggggccatgccaaaggcagccggccccttaactctttgctggctggtcaccgggtggcccagcccgcctctgctcctgggtccagggcttctgttcaggacatagatctgattgacatcctttggcgacaggatattgatctgggggctgggcgtga

SEQ ID NO: 160557 - DNA, 562 bp, Homo sapiens
  Payload ID: 11380
  Gene Symbol: NFE2L1
  Gene Name: nuclear factor, erythroid 2-like 1
  ENST ID: ENST00000577411
  CDS Start-End: 375-562
gattggctctcggcgcagcctaggacatagatctgattgacatcctttggcgacaggatattgatctgggggctgggcgtgaggtttttgactatagtcaccgccagaaggagcaggatgtggagaaggagctgcgagatggaggcgagcaggacacctgggcaggcgagggcgcggaagctctggcacggaacctgctagtggatggagagactggggagagcttccctgcacagtttccagcagacatttccagcataacagaagcagtgcctagtgagagtgagccccctgctcttcaaaacaacctcttgtctcctcttctgaccgggacagagtcaccatttgatttggaacagcagtggcaagatctcatgtccatcatggaaatgcaggccatggaagtgaacacatcagcaagtgaaatcctgtacagtgcccctcctggagacccactgagcaccaactacagccttgcccccaacactcccatcaatcagaatgtcagcctgcatcaggcgtccctggggggctgcagccaggacttcttactcttcagccc

SEQ ID NO: 160558 - DNA, 588 bp, Homo sapiens
  Payload ID: 11380
  Gene Symbol: NFE2L1
  Gene Name: nuclear factor, erythroid 2-like 1
  ENST ID: ENST00000584634
  CDS Start-End: 531-588
gacctgggggaggggattggctctctgcagcctcagcagtgacctgcggggtgggagggggtggggattggctccctgctgcagcctaggacatagatctgattgacatcctttggcgacaggatattgatctgggggctgggcgtgaggtttttgactatagtcaccgccagaaggagcaggatgtggagaaggagctgcgagatggaggcgagcaggacacctgggcaggcgagggcgcggaagctctggcacggaacctgctagtggatggagagactggggagagcttccctgcacaggtgcctagtggggaggaccagacggccctgtccctggaagagtgccttaggctgctggaagccacctgcccctttggggagaatgctgagtttccagcagacatttccagcataacagaagcagtgcctagtgagagtgagccccctgctcttcaaaacaacctcttgtctcctcttctgaccgggacagagtcaccatttgatttggaacagcagtggcaagatctcatgtccatcatggaaatgcaggccatggaagtgaacacatcagcaagtgaaatcctgt

SEQ ID NO: 160559 - DNA, 2051 bp, Homo sapiens
  Payload ID: 11380
  Gene Symbol: NFE2L1
  Gene Name: nuclear factor, erythroid 2-like 1
  ENST ID: ENST00000583378
  CDS Start-End: 35-1756
gagcttgctttcctctgcagcttgagcacggagcatggggtgggagtcccatctcactgcagcctctgcggatattgatctgggggctgggcgtgaggtttttgactatagtcaccgccagaaggagcaggatgtggagaaggagctgcgagatggaggcgagcaggacacctgggcaggcgagggcgcggaagctctggcacggaacctgctagtggatggagagactggggagagcttccctgcacagtttccagcagacatttccagcataacagaagcagtgcctagtgagagtgagccccctgctcttcaaaacaacctcttgtctcctcttctgaccgggacagagtcaccatttgatttggaacagcagtggcaagatctcatgtccatcatggaaatgcaggccatggaagtgaacacatcagcaagtgaaatcctgtacagtgcccctcctggagacccactgagcaccaactacagccttgcccccaacactcccatcaatcagaatgtcagcctgcatcaggcgtccctggggggctgcagccaggacttcttactcttcagccccgaggtggaaagcctgcctgtggccagtagctccacgctgctcccgttggcccccagcaattctaccagcctcaactccaccttcggctccaccaacctgacagggctcttctttccaccccagctcaatggcacagccaatgacacagcaggcccagagctgcctgaccctttggggggtctgttagatgaagctatgttggatgagatcagccttatggacctggccattgaagaaggctttaaccctgtgcaggcctcccagctggaggaggaatttgactctgactcaggcctttccttagactcgagccatagcccttcttccctaagcagctctgaaggcagttcttcctcttcttcctcctcctcttcctcttcttcctctgcttcttcctctgcctcttcctccttttctgaggaaggtgcggttggctacagctctgactctgagaccctggatctggaagaggccgagggtgctgtgggctaccagcctgagtattccaagttctgccgcatgagctaccaggatccagctcagctctcatgcctgccctacctggagcacgtgggccacaaccacacatacaacatggcacccagtgccctggactcagccgacctgccaccacccagtgccctcaagaaaggcagcaaggagaagcaggctgacttcctggacaagcagatgagccgggatgagcaccgagcccgagccatgaagatccctttcaccaatgacaaaatcatcaacctgcctgtggaggagttcaatgaactgctgtccaaataccagttgagtgaagcccagctgagcctcatccgagacatccggcgccggggcaagaacaagatggcggcgcagaactgccgcaagcgcaagctggacaccatcctgaatctggagcgtgatgtggaggacctgcagcgtgacaaagcccggctgctgcgggagaaagtggagttcctgcgctccctgcgacagatgaagcagaaggtccagagcctgtaccaggaggtgtttgggcggctgcgagatgagaacggacgaccctactcgcccagtcagtatgcgctccagtacgccggggacggcagtgtcctcctcatcccccgcacgatggccgaccagcaggcccggcggcaggagaggaagccaaaggaccggagaaagtgagcctggggaagaagggggtttgaagcccaccaagaccgaaactggagaagggctggacctggacctggacctggacctacagcggggacttaaatgccttcttatccaatatatcttctcagatgggatgactgcgggtcagtgtacaggaagaggcaggcactggctggctcagctccactcgggtggagtggaagtggccagaccatttagacggacagggtcctcaccctacccctttcctgtgaggcaggggtggtggtggagttgctggaggtagaggagctatgtggag

SEQ ID NO: 160560 - DNA, 529 bp, Homo sapiens
  Payload ID: 11380
  Gene Symbol: NFE2L1
  Gene Name: nuclear factor, erythroid 2-like 1
  ENST ID: ENST00000584137
  CDS Start-End: 282-529
aagcggaggctccgagctctaggccggccggcggtggcggcggcgaggccgggactcgggcttagggcctgctgtggaggcagcggcggacgccgagctaagcagtttctctggaaacccccctggtaagtgtggaggaggcgggacactctgacccaagacgaaaggcctgtagctccagccaaagaaaataaaccttaggagggagaaggaaaaaaaaaatccatcagctgttcctgagaacagcctgcattggaatctacagagaggacaactaatcaatgctttctctgaagaaatacttaacggaaggacttctccagttcaccattctgctgagtttgattggggtacgggtggacgtggatacttacctgacctcacagcttcccccactccgggagatcatcctggggcccagttctgcctatactcagacccagttccacaacctgaggaataccttggatggctatggtatccaccccaagagcatagacctggacaattacttcactgcccggcggct

SEQ ID NO: 160561 - DNA, 583 bp, Homo sapiens
  Payload ID: 11380
  Gene Symbol: NFE2L1
  Gene Name: nuclear factor, erythroid 2-like 1
  ENST ID: ENST00000580037
  CDS Start-End: 441-583
aagtaattctgcatgacaattcgctcttgcttgccatggccagcttcctccaaaccaagttttaaggggtccaatccccaaagctagaggacatagatctgattgacatcctttggcgacaggatattgatctgggggctgggcgtgaggtttttgactatagtcaccgccagaaggagcaggatgtggagaaggagctgcgagatggaggcgagcaggacacctgggcaggcgagggcgcggaagctctggcacggaacctgctagtggatggagagactggggagagcttccctgcacagtttccagcagacatttccagcataacagaagcagtgcctagtgagagtgagccccctgctcttcaaaacaacctcttgtctcctcttctgaccgggacagagtcaccatttgatttggaacagcagtggcaagatctcatgtccatcatggaaatgcaggccatggaagtgaacacatcagcaagtgaaatcctgtacagtgcccctcctggagacccactgagcaccaactacagccttgcccccaacactcccatcaatcagaatgtcagcctgcatca

SEQ ID NO: 160562 - DNA, 583 bp, Homo sapiens
  Payload ID: 11380
  Gene Symbol: NFE2L1
  Gene Name: nuclear factor, erythroid 2-like 1
  ENST ID: ENST00000577431
  CDS Start-End: 100-583
acccttccagcctggtgtgctccctgaaagccaagagctccttgcagccccctgtccggcttcccggcaccggctgccctggggctcatctcgcagaccatgacccgcctggaccgcagctctcacagtggtgggggccatgccaaaggcagccggccccttaactctttgctggctggtcaccgggtggcccagcccgcctctgctcctgggtccagggcttctgttcaggatattgatctgggggctgggcgtgaggtttttgactatagtcaccgccagaaggagcaggatgtggagaaggagctgcgagatggaggcgagcaggacacctgggcaggcgagggcgcggaagctctggcacggaacctgctagtggatggagagactggggagagcttccctgcacagtttccagcagacatttccagcataacagaagcagtgcctagtgagagtgagccccctgctcttcaaaacaacctcttgtctcctcttctgaccgggacagagtcaccatttgatttggaacagcagtggcaagatctcatgtccatcatggaaatgcaggccatggaagtga

SEQ ID NO: 160563 - DNA, 556 bp, Homo sapiens
  Payload ID: 11380
  Gene Symbol: NFE2L1
  Gene Name: nuclear factor, erythroid 2-like 1
  ENST ID: ENST00000585062
  CDS Start-End: 259-556
acttgttcgctggccgcccctggaggctagaagctccggcgccgagagtgggcatggcgacttggtctcagccggactcgggtttctctggaaacccccctggtaagtgtggaggaggcgggacactctgacccaagacgaaaggcctgtagctccagccaaagaaaataaaccttaggagggagaaggaaaaaaaaaatccatcagctgttcctgagaacagcctgcattggaatctacagagaggacaactaatcaatgctttctctgaagaaatacttaacggaaggacttctccagttcaccattctgctgagtttgattggggtacgggtggacgtggatacttacctgacctcacagcttcccccactccgggagatcatcctggggcccagttctgcctatactcagacccagttccacaacctgaggaataccttggatggctatggtatccaccccaagagcatagacctggacaattacttcactgcccggcggctcctcagtcaggtgagggccctggacaggttccaggtgccaaccactgagg

SEQ ID NO: 160564 - DNA, 512 bp, Homo sapiens
  Payload ID: 11380
  Gene Symbol: NFE2L1
  Gene Name: nuclear factor, erythroid 2-like 1
  ENST ID: ENST00000583210
  CDS Start-End: 444-512
aaggagacggaggcggcccagggatgggctggttccttgcggcagcttctccagctgccctgatgcagagattggctcccgtctgcagctaggacatagatctgattgacatcctttggcgacaggatattgatctgggggctgggcgtgaggtttttgactatagtcaccgccagaaggagcaggatgtggagaaggagctgcgagatggaggcgagcaggacacctgggcaggcgagggcgcggaagctctggcacggaacctgctagtggatggagagactggggagagcttccctgcacagtttccagcagacatttccagcataacagaagcagtgcctagtgagagtgagccccctgctcttcaaaacaacctcttgtctcctcttctgaccgggacagagtcaccatttgatttggaacagcagtggcaagatctcatgtccatcatggaaatgcaggccatggaagtgaacacatcagcaagtgaaatcctgtacagtgcccct

SEQ ID NO: 160565 - DNA, 476 bp, Homo sapiens
  Payload ID: 11380
  Gene Symbol: NFE2L1
  Gene Name: nuclear factor, erythroid 2-like 1
  ENST ID: ENST00000580050
  CDS Start-End: 142-476
agtgacctgcggggtgggagggggtggggattggctccctgctgcagcctagcctggtgtgctccctgaaagccaagagctccttgcagccccctgtccggcttcccggcaccggctgccctggggctcatctcgcagaccatgacccgcctggaccgcagctctcacagtggtgggggccatgccaaaggcagccggccccttaactctttgctggctggtcaccgggtggcccagcccgcctctgctcctgggtccagggcttctgttcaggacatagatctgattgacatcctttggcgacaggatattgatctgggggctgggcgtgaggtttttgactatagtcaccgccagaaggagcaggatgtggagaaggagctgcgagatggaggcgagcaggacacctgggcaggcgagggcgcggaagctctggcacggaacctgctagtggatggagagactggggagagctt

SEQ ID NO: 160566 - DNA, 1998 bp, Homo sapiens
  Payload ID: 11380
  Gene Symbol: NFE2L1
  Gene Name: nuclear factor, erythroid 2-like 1
  ENST ID: ENST00000582155
  CDS Start-End: 52-1806
aggataggcccaggagggagcttgctttcctctgcagcttgagcacggagcatggggtgggagtcccatctcactgcagcctctgcggacatagatctgattgacatcctttggcgacaggatattgatctgggggctgggcgtgaggtttttgactatagtcaccgccagaaggagcaggatgtggagaaggagctgcgagatggaggcgagcaggacacctgggcaggcgagggcgcggaagctctggcacggaacctgctagtggatggagagactggggagagcttccctgcacagtttccagcagacatttccagcataacagaagcagtgcctagtgagagtgagccccctgctcttcaaaacaacctcttgtctcctcttctgaccgggacagagtcaccatttgatttggaacagcagtggcaagatctcatgtccatcatggaaatgcaggccatggaagtgaacacatcagcaagtgaaatcctgtacagtgcccctcctggagacccactgagcaccaactacagccttgcccccaacactcccatcaatcagaatgtcagcctgcatcaggcgtccctggggggctgcagccaggacttcttactcttcagccccgaggtggaaagcctgcctgtggccagtagctccacgctgctcccgttggcccccagcaattctaccagcctcaactccaccttcggctccaccaacctgacagggctcttctttccaccccagctcaatggcacagccaatgacacagcaggcccagagctgcctgaccctttggggggtctgttagatgaagctatgttggatgagatcagccttatggacctggccattgaagaaggctttaaccctgtgcaggcctcccagctggaggaggaatttgactctgactcaggcctttccttagactcgagccatagcccttcttccctaagcagctctgaaggcagttcttcctcttcttcctcctcctcttcctcttcttcctctgcttcttcctctgcctcttcctccttttctgaggaaggtgcggttggctacagctctgactctgagaccctggatctggaagaggccgagggtgctgtgggctaccagcctgagtattccaagttctgccgcatgagctaccaggatccagctcagctctcatgcctgccctacctggagcacgtgggccacaaccacacatacaacatggcacccagtgccctggactcagccgacctgccaccacccagtgccctcaagaaaggcagcaaggagaagcaggctgacttcctggacaagcagatgagccgggatgagcaccgagcccgagccatgaagatccctttcaccaatgacaaaatcatcaacctgcctgtggaggagttcaatgaactgctgtccaaataccagttgagtgaagcccagctgagcctcatccgagacatccggcgccggggcaagaacaagatggcggcgcagaactgccgcaagcgcaagctggacaccatcctgaatctggagcgtgatgtggaggacctgcagcgtgacaaagcccggctgctgcgggagaaagtggagttcctgcgctccctgcgacagatgaagcagaaggtccagagcctgtaccaggaggtgtttgggcggctgcgagatgagaacggacgaccctactcgcccagtcagtatgcgctccagtacgccggggacggcagtgtcctcctcatcccccgcacgatggccgaccagcaggcccggcggcaggagaggaagccaaaggaccggagaaagtgagcctggggaagaagggggtttgaagcccaccaagaccgaaactggagaagggctggacctggacctggacctggacctacagcggggacttaaatgccttcttatccaatatatcttctcagatgggatgactgcgggtcagtgtacaggaagaggcaggcactggctggctcagctccactcgggtggagt

SEQ ID NO: 160567 - DNA, 2853 bp, Homo sapiens
  Payload ID: 11381
  Gene Symbol: NFE2L2
  Gene Name: nuclear factor, erythroid 2-like 2
  Uniprot ID: Q16236
  ENST ID: ENST00000397062
  CDS Start-End: 556-2373
aaatcagggaggcgcagctcctacaccaacgcctttccggggctccgggtgtgtttgttccaactgtttaaactgtttcaaagcgtccgaactccagcgaccttcgcaaacaactctttatctcgcgggcgagagcgctgcccttatttgcgggggagggcaaactgaacgccggcaccggggagctaacggagacctcctctaggtcccccgcctgctgggaccccagctggcagtcccttcccgcccccggaccgcgagcttcttgcgtcagccccggcgcgggtgggggattttcggaagctcagcccgcgcggccggcgggggaaggaagggcccggactcttgccccgcccttgtggggcgggaggcggagcggggcaggggcccgccggcgtgtagccgattaccgagtgccggggagcccggaggagccgccgacgcagccgccaccgccgccgccgccgccaccagagccgccctgtccgcgccgcgcctcggcagccggaacagggccgccgtcggggagccccaacacacggtccacagctcatcatgatggacttggagctgccgccgccgggactcccgtcccagcaggacatggatttgattgacatactttggaggcaagatatagatcttggagtaagtcgagaagtatttgacttcagtcagcgacggaaagagtatgagctggaaaaacagaaaaaacttgaaaaggaaagacaagaacaactccaaaaggagcaagagaaagcctttttcgctcagttacaactagatgaagagacaggtgaatttctcccaattcagccagcccagcacatccagtcagaaaccagtggatctgccaactactcccaggttgcccacattcccaaatcagatgctttgtactttgatgactgcatgcagcttttggcgcagacattcccgtttgtagatgacaatgaggtttcttcggctacgtttcagtcacttgttcctgatattcccggtcacatcgagagcccagtcttcattgctactaatcaggctcagtcacctgaaacttctgttgctcaggtagcccctgttgatttagacggtatgcaacaggacattgagcaagtttgggaggagctattatccattcctgagttacagtgtcttaatattgaaaatgacaagctggttgagactaccatggttccaagtccagaagccaaactgacagaagttgacaattatcatttttactcatctataccctcaatggaaaaagaagtaggtaactgtagtccacattttcttaatgcttttgaggattccttcagcagcatcctctccacagaagaccccaaccagttgacagtgaactcattaaattcagatgccacagtcaacacagattttggtgatgaattttattctgctttcatagctgagcccagtatcagcaacagcatgccctcacctgctactttaagccattcactctctgaacttctaaatgggcccattgatgtttctgatctatcactttgcaaagctttcaaccaaaaccaccctgaaagcacagcagaattcaatgattctgactccggcatttcactaaacacaagtcccagtgtggcatcaccagaacactcagtggaatcttccagctatggagacacactacttggcctcagtgattctgaagtggaagagctagatagtgcccctggaagtgtcaaacagaatggtcctaaaacaccagtacattcttctggggatatggtacaacccttgtcaccatctcaggggcagagcactcacgtgcatgatgcccaatgtgagaacacaccagagaaagaattgcctgtaagtcctggtcatcggaaaaccccattcacaaaagacaaacattcaagccgcttggaggctcatctcacaagagatgaacttagggcaaaagctctccatatcccattccctgtagaaaaaatcattaacctccctgttgttgacttcaacgaaatgatgtccaaagagcagttcaatgaagctcaacttgcattaattcgggatatacgtaggaggggtaagaataaagtggctgctcagaattgcagaaaaagaaaactggaaaatatagtagaactagagcaagatttagatcatttgaaagatgaaaaagaaaaattgctcaaagaaaaaggagaaaatgacaaaagccttcacctactgaaaaaacaactcagcaccttatatctcgaagttttcagcatgctacgtgatgaagatggaaaaccttattctcctagtgaatactccctgcagcaaacaagagatggcaatgttttccttgttcccaaaagtaagaagccagatgttaagaaaaactagatttaggaggatttgaccttttctgagctagtttttttgtactattatactaaaagctcctactgtgatgtgaaatgctcatactttataagtaattctatgcaaaatcatagccaaaactagtatagaaaataatacgaaactttaaaaagcattggagtgtcagtatgttgaatcagtagtttcactttaactgtaaacaatttcttaggacaccatttgggctagtttctgtgtaagtgtaaatactacaaaaacttatttatactgttcttatgtcatttgttatattcatagatttatatgatgatatgacatctggctaaaaagaaattattgcaaaactaaccactatgtacttttttataaatactgtatggacaaaaaatggcattttttatattaaattgtttagctctggcaaaaaaaaaaaattttaagagctggtactaataaaggattattatgactgttaaatta

SEQ ID NO: 160568 - DNA, 2651 bp, Homo sapiens
  Payload ID: 11381
  Gene Symbol: NFE2L2
  Gene Name: nuclear factor, erythroid 2-like 2
  Uniprot ID: Q16236
  ENST ID: ENST00000397063
  CDS Start-End: 402-2171
actttctcggccggggaggggttcgggctcgggcacccggagttggcccctcgtaacgccgcgggaaagtgcgggcgagggcagtggactctgaggccggagtcggcggcacccggggcttctagttcggacgcggtgccccctggtggcgctcaccgcgcgcgtggccttggcttccgtgacagcgctcggttggccgtcacagcagccctcggttggccctttcctgctttatagcgtgcaaacctcgccgcgccagggccaagggacaggttggagctgttgatctgttgcgcaattgctattttccccagagcggctttgtctttggatttagcgtttcagaattgcaattccaaaatgtgtaagacgggatattctcttctgtgctgtcaagggacatggatttgattgacatactttggaggcaagatatagatcttggagtaagtcgagaagtatttgacttcagtcagcgacggaaagagtatgagctggaaaaacagaaaaaacttgaaaaggaaagacaagaacaactccaaaaggagcaagagaaagcctttttcgctcagttacaactagatgaagagacaggtgaatttctcccaattcagccagcccagcacatccagtcagaaaccagtggatctgccaactactcccaggttgcccacattcccaaatcagatgctttgtactttgatgactgcatgcagcttttggcgcagacattcccgtttgtagatgacaatgaggtttcttcggctacgtttcagtcacttgttcctgatattcccggtcacatcgagagcccagtcttcattgctactaatcaggctcagtcacctgaaacttctgttgctcaggtagcccctgttgatttagacggtatgcaacaggacattgagcaagtttgggaggagctattatccattcctgagttacagtgtcttaatattgaaaatgacaagctggttgagactaccatggttccaagtccagaagccaaactgacagaagttgacaattatcatttttactcatctataccctcaatggaaaaagaagtaggtaactgtagtccacattttcttaatgcttttgaggattccttcagcagcatcctctccacagaagaccccaaccagttgacagtgaactcattaaattcagatgccacagtcaacacagattttggtgatgaattttattctgctttcatagctgagcccagtatcagcaacagcatgccctcacctgctactttaagccattcactctctgaacttctaaatgggcccattgatgtttctgatctatcactttgcaaagctttcaaccaaaaccaccctgaaagcacagcagaattcaatgattctgactccggcatttcactaaacacaagtcccagtgtggcatcaccagaacactcagtggaatcttccagctatggagacacactacttggcctcagtgattctgaagtggaagagctagatagtgcccctggaagtgtcaaacagaatggtcctaaaacaccagtacattcttctggggatatggtacaacccttgtcaccatctcaggggcagagcactcacgtgcatgatgcccaatgtgagaacacaccagagaaagaattgcctgtaagtcctggtcatcggaaaaccccattcacaaaagacaaacattcaagccgcttggaggctcatctcacaagagatgaacttagggcaaaagctctccatatcccattccctgtagaaaaaatcattaacctccctgttgttgacttcaacgaaatgatgtccaaagagcagttcaatgaagctcaacttgcattaattcgggatatacgtaggaggggtaagaataaagtggctgctcagaattgcagaaaaagaaaactggaaaatatagtagaactagagcaagatttagatcatttgaaagatgaaaaagaaaaattgctcaaagaaaaaggagaaaatgacaaaagccttcacctactgaaaaaacaactcagcaccttatatctcgaagttttcagcatgctacgtgatgaagatggaaaaccttattctcctagtgaatactccctgcagcaaacaagagatggcaatgttttccttgttcccaaaagtaagaagccagatgttaagaaaaactagatttaggaggatttgaccttttctgagctagtttttttgtactattatactaaaagctcctactgtgatgtgaaatgctcatactttataagtaattctatgcaaaatcatagccaaaactagtatagaaaataatacgaaactttaaaaagcattggagtgtcagtatgttgaatcagtagtttcactttaactgtaaacaatttcttaggacaccatttgggctagtttctgtgtaagtgtaaatactacaaaaacttatttatactgttcttatgtcatttgttatattcatagatttatatgatgatatgacatctggctaaaaagaaattattgcaaaactaaccactatgtacttttttataaatactgtatggacaaaaaatggcattttttatattaaattgtttagctctggcaaaaaaaaaaaattttaagagctggtactaataaaggattattatgactgttaaatta

SEQ ID NO: 160569 - DNA, 451 bp, Homo sapiens
  Payload ID: 11381
  Gene Symbol: NFE2L2
  Gene Name: nuclear factor, erythroid 2-like 2
  ENST ID: ENST00000430047
  CDS Start-End: 248-451
cccgcgcggccggcgggggaaggaagggcccggactcttgccccgcccttgtggggcgggaggcggagcggggcaggggcccgccggcgtgtagccgattaccgagtgccggggagcccggaggagccgccgacgcagccgccaccgccgccgccgccgccaccagagccgccctgtccgcgccgcgcctcggcagccggaacagggccgccgtcggggagccccaacacacggtccacagctcatcatgatggacttggagctgccgccgccgggactcccgtcccagcaggacatggatttgattgacaattatcatttttactcatctataccctcaatggaaaaagaagtaggtaactgtagtccacattttcttaatgcttttgaggattccttcagcagcatcctctccacagaagaccccaaccagttgacagtgaactcatta

SEQ ID NO: 160570 - DNA, 909 bp, Homo sapiens
  Payload ID: 11381
  Gene Symbol: NFE2L2
  Gene Name: nuclear factor, erythroid 2-like 2
  ENST ID: ENST00000449627
  CDS Start-End: 113-909
gttgcgcaattgctattttccccagagcggctttgtctttggatttagcgtttcagaattgcaattccaaaatgtgtaagacgggatattctcttctgtgctgtcaagggacatggatttgattgacatactttggaggcaagatatagatcttggagtaagtcgagaagtatttgacttcagtcagcgacggaaagagtatgagctggaaaaacagaaaaaacttgaaaaggaaagacaagaacaactccaaaaggagcaagagaaagcctttttcgctcagttacaactagatgaagagacagcagaattcaatgattctgactccggcatttcactaaacacaagtcccagtgtggcatcaccagaacactcagtggaatcttccagctatggagacacactacttggcctcagtgattctgaagtggaagagctagatagtgcccctggaagtgtcaaacagaatggtcctaaaacaccagtacattcttctggggatatggtacaacccttgtcaccatctcaggggcagagcactcacgtgcatgatgcccaatgtgagaacacaccagagaaagaattgcctgtaagtcctggtcatcggaaaaccccattcacaaaagacaaacattcaagccgcttggaggctcatctcacaagagatgaacttagggcaaaagctctccatatcccattccctgtagaaaaaatcattaacctccctgttgttgacttcaacgaaatgatgtccaaagagcagttcaatgaagctcaacttgcattaattcgggatatacgtaggaggggtaagaataaagtggctgctcagaattgcagaaaaagaaaactggaaaatatagtagaactagagcaagatttagatcatttgaaagatgaaaaagaaaa

SEQ ID NO: 160571 - DNA, 975 bp, Homo sapiens
  Payload ID: 11381
  Gene Symbol: NFE2L2
  Gene Name: nuclear factor, erythroid 2-like 2
  ENST ID: ENST00000448782
  CDS Start-End: 135-975
atagcgtgcaaacctcgccgcgccagggccaagggacaggttggagctgttgatctgttgcgcaattgctattttccccagagcggctttgtctttggatttagcgtttcagaattgcaattccaaaatgtgacatggatttgattgacatactttggaggcaagatatagatcttggagtaagtcgagaagtatttgacttcagtcagcgacggaaagagtatgagctggaaaaacagaaaaaacttgaaaaggaaagacaagaacaactccaaaaggagcaagagaaagcctttttcgctcagttacaactagatgaagagacaggtgaatttctcccaattcagccagcccagcacatccagtcagaaaccagtggatctgccaactactcccaggttgcccacattcccaaatcagatgctttgtactttgatgactgcatgcagcttttggcgcagacattcccgtttgtagatgacaatgaggtttcttcggctacgtttcagtcacttgttcctgatattcccggtcacatcgagagcccagtcttcattgctactaatcaggctcagtcacctgaaacttctgttgctcaggtagcccctgttgatttagacggtatgcaacaggacattgagcaagtttgggaggagctattatccattcctgagttacagtgtcttaatattgaaaatgacaagctggttgagactaccatggttccaagtccagaagccaaactgacagaagttgacaattatcatttttactcatctataccctcaatggaaaaagaagtaggtaactgtagtccacattttcttaatgcttttgaggattccttcagcagcatcctctccacagaagaccccaaccagttgacagtgaactcattaaattcagatgccacagtcaacacagattttggtgatgaattttattctgctttcatagctgagcccagtatcagca

SEQ ID NO: 160572 - DNA, 1382 bp, Homo sapiens
  Payload ID: 11381
  Gene Symbol: NFE2L2
  Gene Name: nuclear factor, erythroid 2-like 2
  ENST ID: ENST00000423513
  CDS Start-End: 56-481
attgcaattccaaaatgtgtaagacgggatattctcttctgtgctgtcaagggacatggatttgattgacatactttggaggcaagatatagatcttggagtaagtcgagaagtatttgacttcagtcagcgacggaaagagtatgagctggaaaaacagaaaaaacttgaaaaggaaagacaagaacaactccaaaaggagcaagagaaagcctttttcgctcagttacaactagatgaagagacaggtgaatttctcccaattcagccagcccagcacatccagtcagaaaccagtggatctgccaactactcccaggttgcccacattcccaaatcagatgctttgtactttgatgactgcatgcagcttttggcgcagacattcccgtttgtagatgacaatgaggtgaggtataaaataacctggttaatagaaaaactccatcataactataaaataacaatctattctatgtaagtcccgtcaatgaatctccatttaaaagaataaaaacatttttaggaggaaattttttaaccaaggaaatactcttgtcaaggaaaccttagcctataaataactttacaattaagaaaaaaaaaaacccttcacacaatacaaaaccaaaaccattgactattgcatagccagaaacatggacagcataaccatggaaacaaataacccatttgctgcaagtatctaagaggtttggtgagtaaagagccagctgggcaataaacgaagacttgttcagttaacaattttaataaatctgttttatctagtaccactgtgctagatattatataaactaaatcctaaagattgtacttacgcattttaaagtttactttcaaatgcttaagctgaaacagaccagcaaattataaatttgagtcagtggggtaggaaaaaaagatttgttatttacaaacggggtcatgactggttagtaagtagagagacacagaactgcagctgattccattttgttttgtagtggtgccttagagcttactcatcccctgttggtggaagactcataaatcaatgccttatcaattttaggtttcttcggctacgtttcagtcacttgttcctgatattcccggtcacatcgagagcccagtcttcattgctactaatcaggctcagtcacctgaaacttctgttgctcaggtagcccctgttgatttagacggtatgcaacaggacattgagcaagtttgggaggagctattatccattcctgagttacaggtaactaaaatagaatgtaatactggagattttttttatattcagtgcctttagtcattctgattatttatataccacctatttataggaaggattggagggtgctattaactta

SEQ ID NO: 160573 - DNA, 2399 bp, Homo sapiens
  Payload ID: 11381
  Gene Symbol: NFE2L2
  Gene Name: nuclear factor, erythroid 2-like 2
  Uniprot ID: Q16236
  ENST ID: ENST00000446151
  CDS Start-End: 174-1922
gctttatagcgtgcaaacctcgccgcgccagggccaagggacaggttggagctgttgatctgttgcgcaattgctattttccccagagcggctttgtctttggatttagcgtttcagaattgcaattccaaaatgtgtaagacgggatattctcttctgtgctgtcaagggacatggatttgattgacatactttggaggcaagatatagatcttggagtaagtcgagaagtatttgacttcagtcagcgacggaaagagtatgagctggaaaaacagaaaaaacttgaaaaggaaagacaagaacaactccaaaaggagcaagagaaagcctttttcgctcagttacaactagatgaagagacaggtgaatttctcccaattcagccagcccagcacatccagtcagaaaccagtggatctgccaactactcccaggttgcccacattcccaaatcagatgctttgtactttgatgactgcatgcagcttttggcgcagacattcccgtttgtagatgacaatgagtcacttgttcctgatattcccggtcacatcgagagcccagtcttcattgctactaatcaggctcagtcacctgaaacttctgttgctcaggtagcccctgttgatttagacggtatgcaacaggacattgagcaagtttgggaggagctattatccattcctgagttacagtgtcttaatattgaaaatgacaagctggttgagactaccatggttccaagtccagaagccaaactgacagaagttgacaattatcatttttactcatctataccctcaatggaaaaagaagtaggtaactgtagtccacattttcttaatgcttttgaggattccttcagcagcatcctctccacagaagaccccaaccagttgacagtgaactcattaaattcagatgccacagtcaacacagattttggtgatgaattttattctgctttcatagctgagcccagtatcagcaacagcatgccctcacctgctactttaagccattcactctctgaacttctaaatgggcccattgatgtttctgatctatcactttgcaaagctttcaaccaaaaccaccctgaaagcacagcagaattcaatgattctgactccggcatttcactaaacacaagtcccagtgtggcatcaccagaacactcagtggaatcttccagctatggagacacactacttggcctcagtgattctgaagtggaagagctagatagtgcccctggaagtgtcaaacagaatggtcctaaaacaccagtacattcttctggggatatggtacaacccttgtcaccatctcaggggcagagcactcacgtgcatgatgcccaatgtgagaacacaccagagaaagaattgcctgtaagtcctggtcatcggaaaaccccattcacaaaagacaaacattcaagccgcttggaggctcatctcacaagagatgaacttagggcaaaagctctccatatcccattccctgtagaaaaaatcattaacctccctgttgttgacttcaacgaaatgatgtccaaagagcagttcaatgaagctcaacttgcattaattcgggatatacgtaggaggggtaagaataaagtggctgctcagaattgcagaaaaagaaaactggaaaatatagtagaactagagcaagatttagatcatttgaaagatgaaaaagaaaaattgctcaaagaaaaaggagaaaatgacaaaagccttcacctactgaaaaaacaactcagcaccttatatctcgaagttttcagcatgctacgtgatgaagatggaaaaccttattctcctagtgaatactccctgcagcaaacaagagatggcaatgttttccttgttcccaaaagtaagaagccagatgttaagaaaaactagatttaggaggatttgaccttttctgagctagtttttttgtactattatactaaaagctcctactgtgatgtgaaatgctcatactttataagtaattctatgcaaaatcatagccaaaactagtatagaaaataatacgaaactttaaaaagcattggagtgtcagtatgttgaatcagtagtttcactttaactgtaaacaatttcttaggacaccatttgggctagtttctgtgtaagtgtaaatactacaaaaacttatttatactgttcttatgtcatttgttatattcatagatttatatgatgatatgacatctggctaaaaagaaattattgcaaaactaaccactatgtacttttttataaatactgtatggacaaaaaatggcattttttatattaaattgtttagctctggcaaaaaaaaaaaattttaagagctggtactaataaaggattattatgactgttaaa

SEQ ID NO: 160574 - DNA, 979 bp, Homo sapiens
  Payload ID: 11381
  Gene Symbol: NFE2L2
  Gene Name: nuclear factor, erythroid 2-like 2
  ENST ID: ENST00000421929
  CDS Start-End: 276-979
actttctcggccggggaggggttcgggctcgggcacccggagttggcccctcgtaacgccgcgggaaagtgcgggcgagggcagtggactctgaggccggagtcggcggcacccggggcttctagttcggacgcggtgccccctggtggcgctcaccgcgcgcgtggccttggcttccgtgacagcgctcggttggccgtcacagcagccctcggttggccctttcctgctttatagcgtgcaaacctcgccgcgccagggccaagggacaggacatggatttgattgacatactttggaggcaagatatagatcttggagtaagtcgagaagtatttgacttcagtcagcgacggaaagagtatgagctggaaaaacagaaaaaacttgaaaaggaaagacaagaacaactccaaaaggagcaagagaaagcctttttcgctcagttacaactagatgaagagacaggtgaatttctcccaattcagccagcccagcacatccagtcagaaaccagtggatctgccaactactcccaggttgcccacattcccaaatcagatgctttgtactttgatgactgcatgcagcttttggcgcagacattcccgtttgtagatgacaatgaggtttcttcggctacgtttcagtcacttgttcctgatattcccggtcacatcgagagcccagtcttcattgctactaatcaggctcagtcacctgaaacttctgttgctcaggtagcccctgttgatttagacggtatgcaacaggacattgagcaagtttgggaggagctattatccattcctgagttacagtgtcttaatattgaaaatgacaagctggttgagactaccatggttccaagtccagaagccaaactgacagaagttgacaattatcatttttactcatctataccctcaatggaaaaagaagtaggtaactgtagtccacattttcttaatgcttttga

SEQ ID NO: 160575 - DNA, 455 bp, Homo sapiens
  Payload ID: 11381
  Gene Symbol: NFE2L2
  Gene Name: nuclear factor, erythroid 2-like 2
  ENST ID: ENST00000458603
  CDS Start-End: 1-144
acttctgttgctcaggtagcccctgttgatttagacggtatgcaacaggacattgagcaagtttgggaggagctattatccattcctgagttacagtggagacagggtttcaccatgttgaccagggtggtatggaactcctgacctcaagtgatctgcctgccttggcctcccaaagtgctaggattacacgggagccaccacaccaagccaagtgtgaagatttggggtcctgaatatttttcacgtgctatcaaggaacttccttcctctgatggtgtggtgatggggaatctcgggagaagacatcacttttccaaactcagaacataatcccaggtcttgaacaaactgtctattcttagaccaaattgtgagtgcagagatggtggcaagaatctcagcagcagctatctggagcacctaacattgactgatatttgaagggggaagag

SEQ ID NO: 160576 - DNA, 942 bp, Homo sapiens
  Payload ID: 11381
  Gene Symbol: NFE2L2
  Gene Name: nuclear factor, erythroid 2-like 2
  ENST ID: ENST00000586532
  CDS Start-End: 148-942
ggctttctaacaagctcccagtagagatggggtttcaccatgttgcccaggctggtctcaaactcctgagctcaggccatctgcccgcctcggcctcccaaagtgctaggattacagaaggtgcctgcttccccttcaccttccaccatgattgtaagtttcctgaggcctccccagacatgtggaactgacatggatttgattgacatactttggaggcaagatatagatcttggagtaagtcgagaagtatttgacttcagtcagcgacggaaagagtatgagctggaaaaacagaaaaaacttgaaaaggaaagacaagaacaactccaaaaggagcaagagaaagcctttttcgctcagttacaactagatgaagagacaggtgaatttctcccaattcagccagcccagcacatccagtcagaaaccagtggatctgccaactactcccaggttgcccacattcccaaatcagatgctttgtactttgatgactgcatgcagcttttggcgcagacattcccgtttgtagatgacaatgaggtttcttcggctacgtttcagtcacttgttcctgatattcccggtcacatcgagagcccagtcttcattgctactaatcaggctcagtcacctgaaacttctgttgctcaggtagcccctgttgatttagacggtatgcaacaggacattgagcaagtttgggaggagctattatccattcctgagttacagtgtcttaatattgaaaatgacaagctggttgagactaccatggttccaagtccagaagccaaactgacagaagttgacaattatcatttttactcatctataccctcaatggaaaaagaagtaggtaactgtagtccacattttcttaatgcttttgaggattccttcagcagcatcctctccacagaagaccccaaccagttg

SEQ ID NO: 160577 - DNA, 2749 bp, Homo sapiens
  Payload ID: 11381
  Gene Symbol: NFE2L2
  Gene Name: nuclear factor, erythroid 2-like 2
  Uniprot ID: Q16236
  ENST ID: ENST00000464747
  CDS Start-End: 503-2272
cccggcagccaccgcggcgacttggcggcgggtgccatgcgtctggagcttcacattctctgccccccacccaccgcgccggcgctcccttgtcacgcctcgggaagcgcgcacctgccaagcaggatgaataatctgatatcatgtgaaatgaggaaataagaagctttctgctgacttcattttgacccagggtccaaaaggtgatgtaatcctgtggcaagaagattcaaaactgtggactatcttgcaaaaaatacaagaagatattgaaagttttcatgagtgcctaccacctaatctcaaacactatcattcatatgtgcctcattgagcaaatctttaatgaggatctatatgccagaaacagaaagtacatgatggacttcattgaaggatggagatttggaagacatgaatggatgaagaaccaagtgcgtgagggcacctatcaggattattgctgaaatccttatggagttaactggctgagaggaaggacatggatttgattgacatactttggaggcaagatatagatcttggagtaagtcgagaagtatttgacttcagtcagcgacggaaagagtatgagctggaaaaacagaaaaaacttgaaaaggaaagacaagaacaactccaaaaggagcaagagaaagcctttttcgctcagttacaactagatgaagagacaggtgaatttctcccaattcagccagcccagcacatccagtcagaaaccagtggatctgccaactactcccaggttgcccacattcccaaatcagatgctttgtactttgatgactgcatgcagcttttggcgcagacattcccgtttgtagatgacaatgaggtttcttcggctacgtttcagtcacttgttcctgatattcccggtcacatcgagagcccagtcttcattgctactaatcaggctcagtcacctgaaacttctgttgctcaggtagcccctgttgatttagacggtatgcaacaggacattgagcaagtttgggaggagctattatccattcctgagttacagtgtcttaatattgaaaatgacaagctggttgagactaccatggttccaagtccagaagccaaactgacagaagttgacaattatcatttttactcatctataccctcaatggaaaaagaagtaggtaactgtagtccacattttcttaatgcttttgaggattccttcagcagcatcctctccacagaagaccccaaccagttgacagtgaactcattaaattcagatgccacagtcaacacagattttggtgatgaattttattctgctttcatagctgagcccagtatcagcaacagcatgccctcacctgctactttaagccattcactctctgaacttctaaatgggcccattgatgtttctgatctatcactttgcaaagctttcaaccaaaaccaccctgaaagcacagcagaattcaatgattctgactccggcatttcactaaacacaagtcccagtgtggcatcaccagaacactcagtggaatcttccagctatggagacacactacttggcctcagtgattctgaagtggaagagctagatagtgcccctggaagtgtcaaacagaatggtcctaaaacaccagtacattcttctggggatatggtacaacccttgtcaccatctcaggggcagagcactcacgtgcatgatgcccaatgtgagaacacaccagagaaagaattgcctgtaagtcctggtcatcggaaaaccccattcacaaaagacaaacattcaagccgcttggaggctcatctcacaagagatgaacttagggcaaaagctctccatatcccattccctgtagaaaaaatcattaacctccctgttgttgacttcaacgaaatgatgtccaaagagcagttcaatgaagctcaacttgcattaattcgggatatacgtaggaggggtaagaataaagtggctgctcagaattgcagaaaaagaaaactggaaaatatagtagaactagagcaagatttagatcatttgaaagatgaaaaagaaaaattgctcaaagaaaaaggagaaaatgacaaaagccttcacctactgaaaaaacaactcagcaccttatatctcgaagttttcagcatgctacgtgatgaagatggaaaaccttattctcctagtgaatactccctgcagcaaacaagagatggcaatgttttccttgttcccaaaagtaagaagccagatgttaagaaaaactagatttaggaggatttgaccttttctgagctagtttttttgtactattatactaaaagctcctactgtgatgtgaaatgctcatactttataagtaattctatgcaaaatcatagccaaaactagtatagaaaataatacgaaactttaaaaagcattggagtgtcagtatgttgaatcagtagtttcactttaactgtaaacaatttcttaggacaccatttgggctagtttctgtgtaagtgtaaatactacaaaaacttatttatactgttcttatgtcatttgttatattcatagatttatatgatgatatgacatctggctaaaaagaaattattgcaaaactaaccactatgtacttttttataaatactgtatggacaaaaaatggcattttttatattaaattgtttagctctggcaaaaaaaaaaaattttaagagctggtactaataaaggattattatgactgttaaa

SEQ ID NO: 160578 - DNA, 814 bp, Homo sapiens
  Payload ID: 11381
  Gene Symbol: NFE2L2
  Gene Name: nuclear factor, erythroid 2-like 2
  ENST ID: ENST00000588123
  CDS Start-End: 376-814
atactgaatgtccatggagagtttaacataaggaagaagaggcctgtctcccagctgaaactggtgcagcagatcatgcaaagtaaaacctcagcagctgtgatgaagtagagcagagggcctgggtgtctgtcagctccaagcggaagatttccccagctttctagatttctgacttcatatctgtgggatccacacaatggggaggtactggccttggaatccatggttccccagctatcattttactttagaattacagtgttctctgttagtgtcaagggaatgaacctgacgagaaaagaccaaacataggactgttacagggaagaaaaatatgaaaagacctaaagatgcacgtcctcattatatgacatggatttgattgacatactttggaggcaagatatagatcttggagtaagtcgagaagtatttgacttcagtcagcgacggaaagagtatgagctggaaaaacagaaaaaacttgaaaaggaaagacaagaacaactccaaaaggagcaagagaaagcctttttcgctcagttacaactagatgaagagacaggtgaatttctcccaattcagccagcccagcacatccagtcagaaaccagtggatctgccaactactcccaggttgcccacattcccaaatcagatgctttgtactttgatgactgcatgcagcttttggcgcagacattcccgtttgtagatgacaatgaggtttcttcggctacgtttcagtcacttgttcctgatattcccggtcacatcgagagcccagtcttcattgctactaatcaggctc

SEQ ID NO: 160579 - DNA, 3686 bp, Homo sapiens
  Payload ID: 11382
  Gene Symbol: NFE2L3
  Gene Name: nuclear factor, erythroid 2-like 3
  Uniprot ID: Q9Y4A8
  ENST ID: ENST00000056233
  CDS Start-End: 260-2344
gggctcggcgctcaggtggctccttcttcgcttctcccgatccccggcggtgccaggcacggtgccggctgccgagggaacgcctttgtgcccggtgctgggaacccgcgacggccgccacgcgccccggtccattgtttcgcttatctgggttccaggcaggtgcgggcggcgcgcggggtccgcacgtgtcaccccggcggctggggcgccgggacccgcgggcgccggcaggggcgttcccgggcgcgcggcggcgatgaagcacctgaagcggtggtggtcggccggcggcggcctcctgcacctcaccctcctgctgagcttggcggggctccgcgtagacctagatctttacctgctgctgccgccgcccaccctgctgcaggacgagctgctgttcctgggcggcccggccagctccgcctacgcgctcagccccttctcggcctcgggagggtgggggcgcgcgggccacttgcaccccaagggccgggagctggaccctgccgcgccgcccgagggccagctgctccgggaggtgcgcgcgctcggggtccccttcgtccctcgcaccagcgtggatgcatggctggtgcacagcgtggctgccgggagcgcggacgaggcccacgggctgctcggcgccgccgccgcctcgtccaccggaggagccggcgccagcgtggacggcggcagccaggctgtgcaggggggcggcggggacccccgagcggctcggagtggccccttggacgccggggaagaggagaaggcacccgcggaaccgacggctcaggtgccggacgctggcggatgtgcgagcgaggagaatggggtactaagagaaaagcacgaagctgtggatcatagttcccagcatgaggaaaatgaagaaagggtgtcagcccagaaggagaactcacttcagcagaatgatgatgatgaaaacaaaatagcagagaaacctgactgggaggcagaaaagaccactgaatctagaaatgagagacatctgaatgggacagatacttctttctctctggaagacttattccagttgctttcatcacagcctgaaaattcactggagggcatctcattgggagatattcctcttccaggcagtatcagtgatggcatgaattcttcagcacattatcatgtaaacttcagccaggctataagtcaggatgtgaatcttcatgaggccatcttgctttgtcccaacaatacatttagaagagatccaacagcaaggacttcacagtcacaagaaccatttctgcagttaaattctcataccaccaatcctgagcaaacccttcctggaactaatttgacaggatttctttcaccggttgacaatcatatgaggaatctaacaagccaagacctactgtatgaccttgacataaatatatttgatgagataaacttaatgtcattggccacagaagacaactttgatccaatcgatgtttctcagctttttgatgaaccagattctgattctggcctttctttagattcaagtcacaataatacctctgtcatcaagtctaattcctctcactctgtgtgtgatgaaggtgctataggttattgcactgaccatgaatctagttcccatcatgacttagaaggtgctgtaggtggctactacccagaacccagtaagctttgtcacttggatcaaagtgattctgatttccatggagatcttacatttcaacacgtatttcataaccacacttaccacttacagccaactgcaccagaatctacttctgaaccttttccgtggcctgggaagtcacagaagataaggagtagataccttgaagacacagatagaaacttgagccgtgatgaacagcgtgctaaagctttgcatatccctttttctgtagatgaaattgtcggcatgcctgttgattctttcaatagcatgttaagtagatattatctgacagacctacaagtctcacttatccgtgacatcagacgaagagggaaaaataaagttgctgcgcagaactgtcgtaaacgcaaattggacataattttgaatttagaagatgatgtatgtaacttgcaagcaaagaaggaaactcttaagagagagcaagcacaatgtaacaaagctattaacataatgaaacagaaactgcatgacctttatcatgatatttttagtagattaagagatgaccaaggtaggccagtcaatcccaaccactatgctctccagtgtacccatgatggaagtatcttgatagtacccaaagaactggtggcctcaggccacaaaaaggaaacccaaaagggaaagagaaagtgagaagaaactgaagatggactctattatgtgaagtagtaatgttcagaaactgattatttggatcagaaaccattgaaactgcttcaagaattgtatctttaagtactgctacttgaataactcagttaacgctgttttgaagcttacatggacaaatgtttaggacttcaagatcacacttgtgggcaatctgggggagccacaacttttcatgaagtgcattgtatacaaaattcatagttatgtccaaagaataggttaacatgaaaacccagtaagactttccatcttggcagccatcctttttaagagtaagttggttacttcaaaaagagcaaacactggggatcaaattattttaagaggtatttcagttttaaatgcaaaatagccttattttcatttagtttgttagcactatagtgagcttttcaaacactattttaatctttatatttaacttataaattttgctttctatggaaataaattttgtatttgtattaaaaattaacttttcccttttatacagaatctgaaccaaatttaccttactttccttccaaaatatccacattcaggaatataggtgaataacaaataaggcagcatagcaaactgctcagactcaagccaaattgaggtcaacatagtatgccaaatccatagtaaggcaaatccacccccctaccccaatacttaacacacagaatactatgtgatatagaatgcactgaagacctacggtcactggtagtttgagccacaggccttcctcatgtaaccagagacagaatgggctacttgcaaaaacgtaactccttgtgtgtatattaaatccataaaatctctggcagtaaagccagcctgaagggatggcctcaccatcttagaatactgagatctcaccagaacactgtaagccatataaacagtagggaaagagtcagcaacagtgaaaccatctgtttaaaatgggcaaaagcgattaagggaaaaaaaacaggtgaatttgaaaataaaccagggtaaggtaaattctagaaataatagcatttgaaatgaaaacctcacttaagttcactagaacagtaaacaggagattgctgaattttttgaagacagcaatgacctcacctagatgactcaagtttggggaacatcaagattttgacgggtactataatgcttaatatgtccaaattttcaaaatgaagtttctcagatattatttctgccataggagctacagtgtagagtatcacataagtatcttgggctagagaaatgcagtttatatataccgttggatttttataataaagtttcccaagacctgtta

SEQ ID NO: 160580 - DNA, 294 bp, Homo sapiens
  Payload ID: 11382
  Gene Symbol: NFE2L3
  Gene Name: nuclear factor, erythroid 2-like 3
  ENST ID: ENST00000607375
  CDS Start-End: 1-252
aatgaagaaagggtgtcagcccagaaggagaactcacttcagcagaatgatgatgatgaaaacaaaatagcagagaaacctgactgggaggcagaaaagaccactgaatctagaaatgagagacatctgaatgggacagatacttctttctctctggaagacttattccagttgctttcatcacagcctgaaaattcactggaggtaattggaactttggcttttatcctcgcaggaacatatctgcactgaccttttggtgaacaaatacaactcctttacttggatgacaca

SEQ ID NO: 160581 - DNA, 2085 bp, Homo sapiens
  Payload ID: 11383
  Gene Symbol: NFIL3
  Gene Name: nuclear factor, interleukin 3 regulated
  Uniprot ID: Q16649
  ENST ID: ENST00000297689
  CDS Start-End: 396-1784
acgtagcgcggcgctcggaactgacctactaacacacatctctccgcgcggccacggcgcccgcggacccggcgcgcccgcccgcctcccgcgccgcgccctcgccgccgcccgcctcccgccgcggccccggaggcccggcccggcccgagccccgagcgccggcggcccgactcccggccgcccctttctttctcctcgccggcccgagagcaggaacacgataacgaaggaggcccaacttcattcaataaggagcctgacggatttatcccagacggtagaacaaaaggaagaatattgatggattttaaaccagagtttttaaagagcttgagaatacggggaaattaatttgttctcctacacacatagatagggtaaggttgtttctgatgcagctgagaaaaatgcagaccgtcaaaaaggagcaggcgtctcttgatgccagtagcaatgtggacaagatgatggtccttaattctgctttaacggaagtgtcagaagactccacaacaggtgaggagctgcttctcagtgaaggaagtgtggggaagaacaaatcttctgcatgtcggaggaaacgggaattcattcctgatgaaaagaaagatgctatgtattgggaaaaaaggcggaaaaataatgaagctgccaaaagatctcgtgagaagcgtcgactgaatgacctggttttagagaacaaactaattgcactgggagaagaaaacgccactttaaaagctgagctgctttcactaaaattaaagtttggtttaattagctccacagcatatgctcaagagattcagaaactcagtaattctacagctgtgtactttcaagattaccagacttccaaatccaatgtgagttcatttgtggacgagcacgaaccctcgatggtgtcaagtagttgtatttctgtcattaaacactctccacaaagctcgctgtccgatgtttcagaagtgtcctcagtagaacacacgcaggagagctctgtgcagggaagctgcagaagtcctgaaaacaagttccagattatcaagcaagagccgatggaattagagagctacacaagggagccaagagatgaccgaggctcttacacagcgtccatctatcaaaactatatggggaattctttctctgggtactcacactctcccccactactgcaagtcaaccgatcctccagcaactccccgagaacgtcggaaactgatgatggtgtggtaggaaagtcatctgatggagaagacgagcaacaggtccccaagggccccatccattctccagttgaactcaagcatgtgcatgcaactgtggttaaagttccagaagtgaattcctctgccttgccacacaagctccggatcaaagccaaagccatgcagatcaaagtagaagcctttgataatgaatttgaggccacgcaaaaactttcctcacctattgacatgacatctaaaagacatttcgaactcgaaaagcatagtgccccaagtatggtacattcttctcttactcctttctcagtgcaagtgactaacattcaagattggtctctcaaatcggagcactggcatcaaaaagaactgagtggcaaaactcagaatagtttcaaaactggagttgttgaaatgaaagacagtggctacaaagtttctgacccagagaacttgtatttgaagcaggggatagcaaacttatctgcagaggttgtctcactcaagagacttatagccacacaaccaatctctgcttcagactctgggtaaattactactgagtaagagctgggcatttagaaagatgtcatttgcaatagagcagtccattttgtattatgctgaattttcactggacctgtgatgtcatttcactgtgatgtgcacatgttgtctgtttggtgtctttttgtgcacagattatgatgaagattagattgtgttatcactctgcctgtgtatagtcagatagtccatgcgaaggctgtatatattgaacattatttttgttgttctattataaagtgtgtaagttaccagtttcaataaaggattggtgacaaacacagaa

SEQ ID NO: 160582 - DNA, 3492 bp, Homo sapiens
  Payload ID: 11384
  Gene Symbol: NUFIP1
  Gene Name: nuclear fragile X mental retardation protein interacting protein 1
  Uniprot ID: Q9UHK0
  ENST ID: ENST00000379161
  CDS Start-End: 48-1535
aatgcttgctccacagtcgcgtgctagactccggacccgccagtggtatggctgagccgactagtgatttcgagactcctatcgggtggcatgcgtctcccgagctgactcccacgttagggcccctgagcgacactgccccgccgcgggacagctggatgttctgggcaatgctgccgccaccgccaccaccacttacgtcctcgcttcccgcagccgggtcaaagccttcctctgagtcgcagccccccatggaggcccagtctctccccggggctccgccccccttcgacgcccagattcttcccggggcgcaaccccccttcgacgcccagtctccccttgattctcagcctcaacccagcggccagccttggaatttccatgcttccacatcgtggtattggagacagtcttctgataggtttcctcggcatcagaagtccttcaaccctgcagttaaaaattcttattatccacgaaagtatgatgcaaaattcacagacttcagcttacctcccagtagaaaacagaaaaaaaagaaaagaaaggaaccagtttttcactttttttgtgatacctgtgatcgtggttttaaaaatcaagaaaagtatgacaaacacatgtctgaacatacaaaatgccctgaattagattgctcttttactgcacacgagaagattgtccagttccattggagaaatatgcatgctcctggcatgaagaagatcaagttagacactccagaggaaattgcacggtggagggaagaaagaaggaaaaactatccaactctggccaatattgaaaggaagaagaagttaaaacttgaaaaggagaagagaggagcagtattgacaacaacacaatatggcaagatgaaggggatgtccagacattcacaaatggcaaagatcagaagtcctggcaagaatcacaaatggaaaaacgacaattctagacagagagcagtcactggatcaggcagtcacttgtgtgatttgaagctagaaggtccaccggaggcaaatgcagatcctcttggtgttttgataaacagtgattctgagtctgataaggaggagaaaccacaacattctgtgatacccaaggaagtgacaccagccctatgctcactaatgagtagctatggcagtctttcagggtcagagagtgagccagaagaaactcccatcaagactgaagcagacgttttggcagaaaaccaggttcttgatagcagtgctcctaagagtccaagtcaagatgttaaagcaactgttagaaatttttcagaagccaagagtgagaaccgaaagaaaagctttgaaaaaacaaaccctaagaggaaaaaagattatcacaactatcaaacgttattcgaaccaagaacacaccatccatatctcttggaaatgcttctagctccggacattcgacatgaaagaaatgtgattttgcagtgtgttcggtacatcatcaaaaaagacttttttggactggatactaattctgcgaaaagtaaagatgtataggcatctggtgtttcagcatacataactgaagcatgtgaaacagtatcatcctcgttagtagaggaaaaccaaaacccttttttccgtcaaaattggatttgtaattaaattgtaagcctcgtaggatgtatgttggaattttaagtctttcctttggttctatgcaaataaaaaaataactgattttttaagactgtgtctgtattgttgggattgaatctagtatttgctgggagaattttttctttgtatttattttaatgtattgttctcatgtaagaatgactgatgttgtgttagttaagaattgaagataggtttagcagtaaagaagaaagcttttaaaaggattgattcagctaagcaaagttgggcagagaaatacagccattttgtttttaatgcagaaaaggaagatgttctgtagcaagggggaatattttaaaaataaaccagatcaaattaatacaatcagaaggtttcgaaatgtaaatattccttatttaagacatgtttaaattcacctactagcacgacttacatagctcaaatattgaatgtttaaaatattaatacagatggggcctctttatgtttagataaaattgaagtacttaattgaagctttttaaaaattgtaaagtaaatgaaagctattgagatctttttgtctcctataataccagggaatttgagcttgtgttctagtcattgtactagctgtagctattggtctgtccttttgacatacagctaaaagggactaaatttgtaaaaaattagtttgttatagttgaagattaacttttcctaacattgtgattattgaagttcatgaatcttgctgtcaaggaagaaaggtaagaaagctgatagctcctccatgttggtaaaatcctctccagaatcttggaacacctggcatgtgaccctagtgacgtcacagacctgagatgaagattcatgtttagccagtgttttccagccttgtacccaccatacagatctgtttattctgtttcaccctactcctccagtgagccccatattttgggaaattatctgccttatacattaactaattcaattcatgtaacactgttgagtgcttactctttgtacctctattgtgcctatattaaaggtatacaaataaataaggccatgtctgacttcaaggaactcagtttaattttgatatattcaaagatgtgattcccaaccaactcaggatgaagtaactagtgttacaactgagttgatattctaaaatataacacagtttgtacttttattactagttagcatacacattttataggcttatgggttaataaatgaattcatggactcctggactactttcattgatgaccatatctccagggatgttgttgatccccacactgccttaaggtatattatagaaacagttttattttccatttttcttgtttcctgataataaatgtatttaggactgaaaatactcctgagtactcccttggctgtatgtctgacagtctttagctatggtgactattgtttatttttaatgggtatttcagattccaagtgtatttaaaatttctaaggagatataatatagcctgtatggtttctactttatggaattatatggtcaatatttgtaaatattctatgagttttgggtgggtagaggggtgctttgcctgttttgggtacaggtttttttggatttagcttgttaattgttcaaactttctgccttctacattcctatcttattgttcgtttaatcagtttctgaaatgtaagcattacatgactattggtgagttgtgccttttataactgaaatactttactttttctcatatcctctataattgacttctattttccttaatcaaaccagctctgggaaatttaatacatttatattaattgagattattaaaacatttggactatt

SEQ ID NO: 160583 - DNA, 10850 bp, Homo sapiens
  Payload ID: 11385
  Gene Symbol: NUFIP2
  Gene Name: nuclear fragile X mental retardation protein interacting protein 2
  Uniprot ID: Q7Z417
  ENST ID: ENST00000225388
  CDS Start-End: 60-2147
ctcagatcctgacggtgcagcagcccgcagcctcagccagggagtcccagccgctttcaatggaggagaagcccggccagccacagcctcagcaccatcacagccaccaccatccgcaccatcaccctcagcagcagcagcagcagccgcaccaccaccaccattattatttctacaaccacagccacaaccaccaccaccaccatcatcaccagcagcctcaccaatacctgcagcatggagccgagggcagccccaaggcccagccaaagccgctgaaacatgagcagaaacacaccctccagcagcaccaggaaacgccgaagaagaaaacaggctatggtgaactaaacggtaatgctggagaaagagaaatatctttaaagaacctgagttctgatgaagccaccaaccctatttccagggtcctcaatggcaaccagcaagttgtagacactagcctgaagcagactgtaaaggccaacacctttgggaaagcaggaattaaaaccaagaatttcattcagaaaaacagtatggacaaaaagaatgggaagtcttatgaaaataaatctggagagaatcagtctgtagataagtctgatactataccaattccaaatggtgtggtaacaaataattctggttatattactaatggttatatgggtaaaggagcagataatgatggtagtggatctgagagcggatatacaactcctaaaaaaaggaaagctaggcgcaatagtgccaagggttgtgaaaaccttaatatagtgcaggacaaaataatgcaacaagagaccagtgtcccaaccttaaaacagggacttgaaactttcaagcctgactatagtgaacaaaagggaaatcgagtagatggttcgaagcccatttggaagtatgaaactgggcctggaggaacaagtcgaggaaaacctgctgtgggtgatatgcttcggaaaagctcagatagtaaacctggtgtgagcagcaaaaagtttgatgatcggcccaaaggaaagcatgcttcagctgttgcctccaaagaggactcgtggaccctatttaaaccacccccagtttttccagtggacaatagcagtgctaaaatagttcctaaaataagttatgcaagcaaagttaaggaaaacctcaacaaaactatacagaactcttctgtgtcaccaacttcatcttcatcatcttcatcatctaccggggaaactcagacccaatcatcaagtcgcttatcccaggtccctatgtcagcgctgaaatctgttacttctgccaacttttctaatgggcctgttttagcagggactgatggaaatgtttatcctccagggggtcagccactgctaactactgctgctaatactctaacacccatctcttctgggacagattcagttctccaggacatgagtctaacttcagcagctgttgaacaaattaagactagcctttttatctatccttcaaatatgcaaactatgctgttgagcacagcacaagtggatctgccctctcagacagatcagcaaaacctgggggatatcttccagaatcagtggggtttatcatttataaatgagcccagtgctggccctgagactgttactgggaagtcatcagagcataaagtgatggaggtgacatttcaaggagaatatcctgctactttggtttcacagggtgctgaaataattccctcaggaactgagcatcctgtgtttcccaaggcttacgagctggagaaacggactagtcctcaagttctgggtagcattctaaaatctgggactactagtgagagtggagccttatccttggaacccagtcatataggtgacctgcagaaagcagacaccagtagtcaaggtgctttagtgtttctctcaaaggactacgagatagaaagtcaaaatcctctggcctctcctacgaacactttgttaggctctgccaaagaacagagataccagagaggcctagaaaggaatgatagctggggttcttttgacctgagggctgctattgtatatcacactaaagaaatggaatctatttggaatttgcagaagcaagatcccaaaaggataatcacttacaatgaagccatggatagtccagatcaatgaaggaccagactgcctattcgtaacctttctgcagcattagagccatcgttcatgggggacacaaggcttttatgctcctagatcttcaacgcagcagaggaaccataagtagaatcacaggataatatatacaaatatatatatatacatatatatatatatagttatttaaaaaaggcaactgaaagtaattagacttcttaaggaatcaaatttatttcaagagactacacatggttatttaatctccggtactgaataggttttttttcttctgttagtttttgtttttaagtgtgaatgcaagtgattaatgaatacagacttaacaagtgtggttctaaagttcctgctgtcatcaacttgggcaacaaatgacccactggaaaggcaaatccacttaaaagatctctgtatcttgttctgtgactgaagtgatacactaatcacggggaacccagaatgattcaacattttccccccactcctcccttgatctttttggttttactttaattaagccctgcgagaatgctggataaatgccttgaagttagcagggtgtatttttttagcgaatatgatttgcatgtcttgccaggagttaagcggcctctggggtgttggggaaatactttatttctttccatttattttttgtggggcggggataggggagggcattgaagttctacaattctggaatagttagttgatggtacatagttaacttggcttcggttacatattggactttaacaactgaagaatctatgcgtgtcatttaaagaaaagttgcagaacaagcaattggcttagatatacaatctggaaaaatattcctgtgcccatattttaatgtaattgtataactgggagcaaaaatatattctgcttttcaactgtaggtgctccagacttgctctccgtcactaacactaaatgtgctgttttccttgtttttcatcaaacatttaagacaaacttagacctttctgtaaattatcttttaatttctcagcaaaatctaaaaggggaagaaaaaagtccatgaaaactaaaacttttcatgtttttagccagtgagaagataataaaccctgactgtagaaggtgtgttttcatgcaaactatacttctgagcttgttagcttctaattatatcttaataaatatattttattactagagcaagatgggtttttaaggaaaataatgtgaaattctggaaattttctttggggcagagaagagcattagccctgtcttatcattacattgccatcctgttgcactgcagcttgtgtatagcatgctaaaataaatttttgtgtgtgtgtgcagaaattaagggtccaattgagattgggtgatgttagtaacataataacaagttgtctggcctgacacagcatcacatcacacacacagaaattagtatatccatgtatgtcaaatacaggttaaaatatcagggcatttatataaagagttgtagtcttctgataaaagtagactggatcccctggggtatttggggagaaagtaactactttggctctacccctagaaatgtccagttttgagtgactgtagtatggatgggttttcttgttttgttgattatttgaggcttttaaaacaagtagttcatgaaagaagctgttggactcaacatagagtagagtaactatctttttagtctggatttctgccctgcttagattttaaaagtataagcatggattgccaattccacttgatgtaaacaaaacttttttttatacataatatatatatatatatataaaataacttattgtatcagtccaggttcagaaacttgtggtaggccagttccagatagtttcatttcacctgtaaactgtatcactttgactgatattgtaattttcaaatgtataatatgtttacagatgtgccctgcatttagtctgccttgttcctattttgatttttgttgagtctcctgcctgcttgccaaaagctaggatgcttcaggcccatgtacaattgaaagcagaggcatccttgagctttaaagcattgaacaaactggaaaatgcaacataccacataactgaagtgaaaaaagtctgtgtttttgtgtttttttaaataaaaattttcaaaaagttaaaaaaaaagacatataaggttgattaaagggaaaaaaggctccagtttgttttacaggttttaaagttctgctgtgtgttcaattgccttgtgtaaccacttgtcgccttagggccagattcccctctctagtccccttttttaaatgtccattttgcttgcctggaattttaaagttcttccgtctcacaactcacaagaaactttctgggtttgtgacatacagaggttgaattgagtatatatttgaaaaggaaaaaacaaaaaacaaacccagaccccacctgaattgggctttttaacttagaagcaacacttgattaaacatctttagaaagctattgcttttctaatttccttccatatccctcaggcctcagtgttcagagaagccaaaaagaatgtatcacttctctgtctgtccaaaggtttttgagagtctcacttctaaatgaaacaatgcaacatttcactttgatttctccactgaaatttccttgattatatggttagaggtatgtagttaggaatgtctgttaactttctgagaaccctagtgccccatcatattaactgtcagtattttgggggcattaggttaatagacttaattgcctaggtacaagcaggactttgggacaaatctctttgtgctgtttggtaacacttaactctatttgttgcaatctttctccttaggtcctcacacaattccttacagagcacttattaaaaaaaaatcttaagagttgatctgttttctgattattttgtgtaagcttctaaacaaacttcagctgtgattaatttagcacatttaaataacgtgttattgtttggtataaagaattttccttcaactcagagtattagtactgtagcataaaccaaatacagtctagaggggatttttaacatccctccattataaagactgaaaaaggggtgtgtgtgtgtgtgtgtgtttatgtatgtatgtatgtgtgtgtgaggaaaagatggagatattaaaaattagtaaatgaatgtgtataagacattagtattcagagaatgaacttgtatttattttgtgccatttgttttcattacacagaaaaaagtcaggtggtttaaatccttaaaagggtagtattgaaaaatggcactaagaatgaaattatgacctatttttttaatagctatgaagatactaattatgggtgaagatttctttttaaatctgttttgattattgtaggcttctgtgtcacataccactcttgtaggtgtcctcaataatccccttttcccacaaaatacacagggtgtattatctttctctttattcacccccactttgctgaactgaagttaattacatagcctttcttctaacctccttagtaatgaaccttcacataaagtgtatttacagcgtctgtggtagccagcccttcctcctctactttctaggaggggatagccaataactaggaatttaatgacagatttttttttctttgaaataaatggccagagtttctccattttagaattttgttgtcctccttaatcatctgcttacctagtcattactcaatctgcagaaacttcataaaggaaaagtgctgcattgtttttacaaataacagtttgtagggaaaatatgacaaacctcaactatgggagttgtccacaatacaaaattttgaaaaaacattacatagtgataatatcatacttggttgttaggcttgttgcttccccacatcagaggcatctaatgatttatcttttgtaattgctgtgaacttttttaaataagccatttagtgtgaaattgtcatgtatcaaatggctattggaaatggactttactcaattttaattccactgtaaataaggacggagtcattcctacaaggctctcttcagagaaatagattaaaagtccaatttccaggtattattagtatagttatgccgctgggccacatcctcaacaacagctgatccctcttgtataaatatgttaactgtgcagaacagttatgttatgggacaaatataatggtcattatggtcagattggttgatgccacaccagtcaaggtagagtctgatagggcagtatcttaataaccctacccatgacttaactgttggatttgaaaggaaaacgtaggatttgctcttgtccccttacccgccacaaaattttgataatttgtttaaaagggagaggcagaggaaaagactagaagcataaatagctgctttaggtttgccagaggcacatagcttaacattagttcttaatatcgatgttatttttactaatgtaattaatcaacagagcaccaagattctttcatggtgaaaagggtgggcttctgttttggtatcttaaaatgtttcttttaaaatatacatcacctgtgtgagaaccaggaccacctgggagagtgatgaatcattggctccactcaaaagcattgctttactgagttttaaatttcacactgttttgccgctcaagaaaggtcttaaagtagttaaaggatgccagcaatagtgcgaatagaattttcggttgtctgcataataaaaacacccattgcagcatgattggtatgttgctcttgcattattgggaatggtaaatcagttatgggctagaaactatggaatggccgtcctcatatgtgatgggattgctgattcagacttccctattttccatacaattttgttatgtgcagagttctaaagccattttataatactgcagtatcccccccccccccacctttttttttttgagacggactgtctgttgcccaggctggagtacagtggcgcaatcttggctcactgcaacctccacctccctggttcaagcaattcccctgcctcagcctcccatgtagctgggattacgggcgcacaccaccacacctggctaatttgtattcttagtagagacggggtttcaccatgttgaccagactggtctcgaactcctgacctcaggcaatctgcccgcctcagcctcccaaagtgctggaattacaggtgtgagccaccgtgcccggccaagtatctcttttctacagccttattaaactaactacaaacatttattttccaatttagttttactttcagtgcatatcaaagttgttgtactcttcagaccaacaaattaacttgagggcaaattacatagctttccatgtacccttttttcctcaggtgctaatcaaaggctctgaaaatggatactgctttagtgatgtctgctttattcttaaaatgcttatttcttttgctagatgtaaagatttggtgttaacaaaagtggttttaatatgtaaatatgaatgaatgcctttagtttaccctgtttgtctattattaatctgttttcatttatccttcatagaggaggatcctttcatgatcttgaatacatttcattagatattgttgcattttaagaatgaaaatacaactgttttctgtcttagattaatcctgctgctatgagaaactgaaaatcaagaatgtgatgcactttttacattactatataccatacatataccataggttgctttgatacctttcctgtagcacagccactaacaagagtgaatgaattataaaattctttttgggagggaatcaatacaagtaactaattcttagctgatattgtcctatgaaggacaataacttaggaatataagaattctgttaatagtacactttttggccttaaatgtcttctactactgaaaatagtttaaatcttagctttgtttctattattccctctctctgcctcagaaagaggaattgggaagaatggcttaaaggacgtggtgtcattgatttgttgctgatcttttagaaaacatttgtctatgtaagctggggacttattttttgtttgtatatagaggggaaatagtgctgccctgaaccaatcagatttagtttaaatcaaatcaatcaaaactccagctgtttctcttgtctttttacttagcaaaggaaaactttagtgaatgctacttgacaagaagaaaagtcatttctcaagcacatacccaaacttgaaggtgattgaacccaaaataatgggtgggaaacaccaaatgaggtggaggaatgagaaagatgtgtgggccaaagctatctggttatattttgatgttgccaatatcgcaaagccaaaattttaatttgcttatttaatatatttgttggccagagatctatttttatatcaatgtgccttgcatgtatattaaaaaaaaaaaattggaaacgccatgtagtaatgcctgagatagtcgatggttcttaccacctcactaatttttatgcagtatgaaatgctcattctattgcccaactggtgctctctgtttaaagttacagatcttgcgaaactggaactattttataagctggggaagtgatttactttttttgttgtatcttttttgttcttagtctgttagtggctgtcctgtagtgggaaatagtaaaaggattcttcactcccttctcccctcagcaccttcttcaagtaaacatttcttgtgtgctttgaaaaaagtttcagcttgctgtctcttttagtgttttaaagaagtgttatacaaagcattgtttgcaaaatatagggagataatggagtccactttaatttggaattctgtgtgagctatgatccaagttatcagctctttccaactttaaaaattttgttaaaagcaccttgcttagaaaattttaaatatttatgtctgcaacaattgtctcaaaataataaactgtgcaattcttgtcattaaaaaaaaaaaagatctgaattttccctaatgtgacttgttagtttctctctgtatttcctgccagtgtaaatgtgaaagctttgcttgcattacgttttagaaatgcattttgcacactcgaattttgccgaagctccgtgaaaaggttagatctaagtagatgaataaagctatgcacatgttttgaaagtttaatttgtgtgtcattaccaaaagtgaccgatttgtccttactactttgctgttgttagctttaccatctttggaaacttggctcaaagttacatagttctgggctagctcatcagtggaactaggagagaggaaaactggcacctattttaataaagttcaatttaaacgagagcttgacttgtatctattaaagagcttttcttgaaacagggcagttttatcagctttacaaatcattggatgctcttccttagtaatattttggtttatttgatcaaatagaaatggaaagtaattcaaactgaaagacccttttttgtcatatggaacttggtgacgattttttgtcttaaagctggtttaaaggtaggataggcttttacctttattgctttagcataaatttggtttactgaattgactggcttgagattagaattattcagttgtttgtaagatcaaagcactggttgttttaaagataacgtgtatcttttaaaaaattgcccaagctgattagaacaagtttaggagttgggtacatttggttcaagtgctgcaatctgtatgtactaaatagctttactttgtgtatgtgtacttataatgtgtagatgtactactacccaggttttgtcaaatcatcttttttaaagtttttttttttttaattggttcaggacctttgtaggagaggctaatatgtttaagtagaagatattactgatagcattttccccatgctcctacataaaaaataaatatttccattttatagctttttcaatatacagaagagggttacttcttcatcaagtatattgttgcctttgaggacacagcaaaacccttctatatgtatcttcattgatagtggcagttaaaaactaagttatccagttaagacttaaaaggtgacccatattaattgcatggccttaaaaggcagaaatgcaggagtgtagcaagcatcattttagatggctatggttcctcttccgcatctgtcagtagttcacttatgttcagtcttagaacctactggaggagtgaagtaatttctctgtctcgtgcagaggcactaaggagctgagttacctcttaatctgggggaatggataataagtggagtacagttatgttaaaggatgttccccccgctcaaaaaaaagtttcaatgtttgttttgcccagtcaaaaatataggtcttttctacatataagaacagtcaccagaaattttcccttttgctaaatgcttaggtatttgctatagctgtttctgatgtcatggattctgaggaagtgtcatttacgtgatgatcttcctttattgatgtcttcatcatgttcagtgttttaaaaatataaattacaaacactctacaaccatacccagatttacttattttatcagaaaaaaaacttgagaaatttgtagatcaaattgagagacaataagtgtacattgttgaataaaaaattttaaagtttctga

SEQ ID NO: 160584 - DNA, 559 bp, Homo sapiens
  Payload ID: 11385
  Gene Symbol: NUFIP2
  Gene Name: nuclear fragile X mental retardation protein interacting protein 2
  Uniprot ID: Q7Z417
  ENST ID: ENST00000579665
  CDS Start-End: 57-419
agatcctgacggtgcagcagcccgcagcctcagccagggagtcccagccgctttcaatggaggagaagcccggccagccacagcctcagcaccatcacagccaccaccatccgcaccatcaccctcagcagcagcagcagcagccgcaccaccaccaccattattatttctacaaccacagccacaaccaccaccaccaccatcatcaccagcagcctcaccaatacctgcagcatggagccgagggcagccccaaggcccagccaaagccgctgaaacatgagcagaaacacaccctccagcagcaccaggaaacgccgaagaagaaaacagaaatggaatctatttggaatttgcagaagcaagatcccaaaaggataatcacttacaatgaagccatggatagtccagatcaatgaaggaccagactgcctattcgtaacctttctgcagcattagagccatcgttcatgggggacacaaggcttttatgctcctagatcttcaacgcagcagaggaaccataagtagaatcacaggataatatatacaaatatat

SEQ ID NO: 160585 - DNA, 352 bp, Homo sapiens
  Payload ID: 11386
  Gene Symbol: NUGGC
  Gene Name: nuclear GTPase, germinal center associated
  ENST ID: ENST00000418860
  CDS Start-End: 123-352
gctgccaccatctcctctgtggactcctgtaaccaaaccagaactttttttttttttttctgttcagtgacatctggctggttctcctgaactgagaagagcaggagttcacgtaacaaggaatggcagaaacgaaggatgtttttggccaggaaccgcatccagttgaagatgatttatataaagaacgaacgagaaaaagaaggaaatcagatcgagaccagcggttccgagcatttccctccatggagcagagtgctcttaaggaatacacctcctttggagacctagtactttatccctgccaggtacctgcaggtgacatctctctgttaattccagatgaaaaatt

SEQ ID NO: 160586 - DNA, 3887 bp, Homo sapiens
  Payload ID: 11386
  Gene Symbol: NUGGC
  Gene Name: nuclear GTPase, germinal center associated
  Uniprot ID: Q68CJ6
  ENST ID: ENST00000413272
  CDS Start-End: 144-2534
aaatacctgaaccaaggagaagctgccaccatctcctctgtggactcctgtaaccaaaccagaactttttttttttttttctgttcagtgacatctggctggttctcctgaactgagaagagcaggagttcacgtaacaaggaatggcagaaacgaaggatgtttttggccaggaaccgcatccagttgaagatgatttatataaagaacgaacgagaaaaagaaggaaatcagatcgagaccagcggttccgagcatttccctccatggagcagagtgctcttaaggaatatgaaaaattggaatcacggaccagaagggttttgagcaacacttatcagaaacttattcagtctgtcttcctggatgacagcatccctaatggagtcaagtatctcataaataggcttcttgccttgattgaaaagccgacagtggacccaatctacattgcattatttggaagcactggggctgggaagagctccctgatcaatgccatcatccagcaagcaatgtttctaccagtgtctggagaaagcatatgtacttcctgcattgtacaagtgagctctggctgctgtgtgcagtatgaggccaaaatccaccttctgtctgaccaggagtggagggaggagctgaagaacctgaccaaactcctgcataggacggaggagctgagcagagaagaggcagatgcgtggaacagggatgaggcagtggaggaagccacctggaagctacaaatgatttatggaaatggggcagagagtaagaactatgaggagttactgagggcgaagcccaaaaggaagatccccacctccagagtcatcaccctcaaggcggaagaggcagaagagctgtccatcaagctggacccctacatccgcacacagaggagagattgggatggagaggccgctgagatgcgcatctggcccttgatcaaacatgtggaagtgacacttcccaaatccgacctgatcccagaaggggtcgtgctggtggacatcccaggcacaggcgacttcaacagcaagagggacgagatgtggaaaaagaccattgacaagtgctcagtgatctgggtgatcagcgacatagagcgagtttctggggggcaagcccacgaagaccttctgaatgagagcatcaaagcctgccagcggggcttctgtagggacgtggccctggtggtcaccaagatggacaaactccacttgccagaatacctaagggaaagaaaggcaggaaatcaagctattcagagtcagcgagaggctgttttagaaagaaatgaaatgataaaactacaaaggactagaattctcaaggaaaaactgaagagaaaactgccagctgacttcaaggttctggaagcctcagatctggtgtatacagtcagcgcccaggagtactggcagcaggctctcctcaccgaggaggaaacggaaatccctaagttaagagaatacatcaggaagagcctcttggacaagaagaagaggacagtgaccaagtatgtgactgaagcctttggcctgttgctcctcacagatagtttcaactccacgcaaaacctgccgaatgaacacttgcacatgagtgtcctgcggagatttgcggaagagaaggttgagctgctggagaaggccatcgcacagtgcttcgcctgcatggagcagcctctgcaagaaggggtcaggaccgccaggacttcttaccgctgcatcctcagagcatgcttggtgaggagtaaaggaaaccaaggttttcatcagaccctgaaagctgtttgcctgaaaaatggcatctatgcctccaggactctggcgagaattgatctaaatgaagccctcactcagcccgtctatgaccagatcgaccctgtttttggaagcatttttaggacggggaagcccactggttcagctctgatgcctcacatagatgcttttaagcagtccctgcaggagaaaatgacagaaattgggataagaagtggctggaaatatgatagctgcaaaaaaaatttcctgatccaggagataagtgccatcctcgggggcctggaggaccacatcctcagaaggaagaggaggatctacgagtccctcactgcctctgtccagagtgacctgaagctctgttacgaagaggcagctcagatcacgggcaaaaaagcgtgtgagcggatgaaagatgccatcagaagaggagtggaccggcaggtggctgagggcatgtttgaaagggcccaggaaaggatgcagcaccagtttcagcagctgaagactggaatcgtggagaaggtgaagggcagcatcaccactatgctggcccttgcttcgtcccagggggatggcctctacaaggagcttgcagatgtcgggagtgaatacaaggagatggagaagctgcacagaagcctgagggaggtcgcggagaatgcacggctgaggaagggcatgcaagaattcctcctaagggcatcccccagcaaggctggcccccccgggacatcactgtaactcctggggcttagtcccaatggatgaaaaatcagcccagagccagagaattagaattactttttttgttcttaagagacaagatctatctacctctgttgcccaggctggagtgcagtggcaccatcacagctcactgcagcctcgaactcctaggctcaagcgatcctccagcctcagcctccagagcagctggggctacaggtacaggccaccacacctgggtaatttttttttttttttttttgagacagagtctcgctgtgtcacccaggctggaatgcagtggtgcaatctcggctcactgcaacctccacctcctgggttcaagaaattctctgcctcagcctcccaagtagctgggattataggcgactgccaccacacccggttaatttttatatttttagtagagacggggtttcatcatcttggccaggctggtcctgaactcctgacctcgtgatccacccatctctgcctcccaaagtgctgggattacgggcatgagccaccgtgcccggcccatacctgggtaattttttaattttttgtggagatggcatcttgctctgttgcccagggtggtctcaaactcctggcctcaagtgattctctcccacctcagtctcttgtgctaggattgcaggcatgagccattgtgcctggctcagaattctttctgttttgtgaaatctaatagaggacatttctcaactatttggactttgcatgcaatataaaactagtatgtttactgcattttattttatagccccaaagagtcatcttcaatacctaatggagttctaaagctttagggcaagaaacttttgcttccgcaaaaacatctaaacatcgctgggcatggtggctcactcccgtaatcccagcactttgggaggctgaggcgggcggatcatgaggtcaggagattgagaccatcctggctaacacagtgaaaccccatctctactaaaaatacaaaaaattagccaggcgtggtagcatgtgcctatagtcccagctacttgggaggctgaggcaggagaatcgcttgaacccaggaggcataggttgcagtgagccaaggtcgcgccactgcactccagcctggacgacggagtgagactatgtctcaaaaaaaaaaaaaaaaaaagaaaaagaaaaaaatatatatatatacacacacacacccatacataaaaaaacttaaacattatagaaaaaacattgcacgatataaaacaagccataaaaagaaattcatccttcaataaagaaaaatatctaaacgttgaaaaacttaagtattatggaaaacattgcaaaataaagcttttaggaatccaa

SEQ ID NO: 160587 - DNA, 3775 bp, Homo sapiens
  Payload ID: 11387
  Gene Symbol: NUMA1
  Gene Name: nuclear mitotic apparatus protein 1
  Uniprot ID: Q14980
  ENST ID: ENST00000351960
  CDS Start-End: 173-3112
gtgctggagaggccgctgcgagcggaaggcctcctccataaccgagtccgaaagggcagaatctatgggggtggaaactaattctaagccagactgctggagatcaccctgttctagtgtgtggaggcttccaccaggaggcgcattggagtgactgtctggcatcaccaagatgacactccacgccacccggggggctgcactcctctcttgggtgaacagtctacacgtggctgaccctgtggaggctgtgctgcagctccaggactgcagcatcttcatcaagatcattgacagaatccatggcactgaagagggacagcaaatcttgaagcagccggtgtcagagagactggactttgtgtgcagttttctgcagaaaaatcgaaaacatccctcttccccagaatgcctggtatctgcacagaaggtgctagagggatcagagctggaactggcgaagatgaccatgctgctcttataccactctaccatgagctccaaaagtcccagggactgggaacagtttgaatataaaattcaggctgagttggctgtcattcttaaatttgtgctggaccatgaggacgggctaaaccttaatgaggacctagagaacttcctacagaaagctcctgtgccttctacctgttctagcacattccctgaagagctctccccacctagccaccaggccaagagggagattcgcttcctagagctacagaaggttgcctcctcttccagtgggaacaactttctctcaggttctccagcttctcccatgggtgatatcctgcagaccccacagttccagatgagacggctgaagaagcagcttgctgatgagagaagtaatagggatgagctggagctggagctagctgagaaccgcaagctcctcaccgagaaggatgcacagatagccatgatgcagcagcgcattgaccgcctagccctgctgaatgagaagcaggcggccagcccactggagcccaaggagcttgaggagctgcgtgacaagaatgagagccttaccatgcggctgcatgaaaccctgaagcagtgccaggacctgaagacagagaagagccagatggatcgcaaaatcaaccagctttcggaggagaatggagacctttcctttaagctgcgggagtttgccagtcatctgcagcagctacaggatgccctcaatgagctgacggaggagcacagcaaggccactcaggagtggctagagaagcaggcccagctggagaaggagctcagcgcagccctgcaggacaagaaatgccttgaagagaagaacgaaatccttcagggaaaactttcacagctggaagaacacttgtcccagctgcaggataacccaccccaggagaagggcgaggtgctgggtgatgtcttgcaggtggaagaactgagtaagaaactggctgactctgaccaagccagcaaggtgcagcagcagaagctgaaggctgtccaggctcagggaggcgagagccagcaggaggcccagcgcctccaggcccagctgaatgaactgcaagcccagttgagccagaaggagcaggcagctgagcactataagctgcagatggagaaagccaaaacacattatgatgccaagaagcagcagaaccaagagctgcaggagcagctgcggagcctggagcagctgcagaaggaaaacaaagagctgcgagctgaagctgaacggctgggccatgagctacagcaggctgggctgaagaccaaggaggctgaacagacctgccgccaccttactgcccaggtgcgcagcctggaggcacaggttgcccatgcagaccagcagcttcgagacctgggcaaattccaggtggcaactgatgctttaaagagccgtgagccccaggctaagccccagctggacttgagtattgacagcctggatctgagctgcgaggaggggaccccactcagtatcaccagcaagctgcctcgtacccagccagacggcaccagcgtccctggagaaccagcctcacctatctcccagcgcctgccccccaaggtagaatccctggagagtctctacttcactcccatccctgctcggagtcaggcccccctggagagcagcctggactccctgggagacgtcttcctggactcgggtcgtaagacccgctccgctcgtcggcgcaccacgcagatcatcaacatcaccatgaccaagaagctagatgtggaagagccagacagcgccaactcatcgttctacagcacgcggtctgctcctgcttcccaggctagcctgcgagccacctcctctactcagtctctagctcgcctgggttctcccgattatggcaactcagccctgctcagcttgcctggctaccgccccaccactcgcagttctgctcgtcgttcccaggccggggtgtccagtggggcccctccaggaaggaacagcttctacatgggcacttgccaggatgagcctgagcagctggatgactggaaccgcattgcagagctgcagcagcgcaatcgagtgtgccccccacatctgaagacctgctatcccctggagtccaggccttccctgagcctgggcaccatcacagatgaggagatgaaaactggagacccccaagagaccctgcgccgagccagcatgcagccaatccagatagccgagggcactggcatcaccacccggcagcagcgcaaacgggtctccctagagccccaccagggccctggaactcctgagtctaagaaggccaccagctgtttcccacgccccatgactccccgagaccgacatgaagggcgcaaacagagcactactgaggcccagaagaaagcagctccagcttctactaaacaggctgaccggcgccagtcgatggccttcagcatcctcaacacacccaagaagctagggaacagccttctgcggcggggagcctcaaagaaggccctgtccaaggcttcccccaacactcgcagtggaacccgccgttctccgcgcattgccaccaccacagccagcgccgccactgctgccgccattggtgccacccctcgagccaagggcaaggcaaagcactaaagggccagtaccagtgagtggccccacctgtgtccccgatgctgacctcacctggtcctccgcctactgtccctctcagtgccttctctcagctcccaggccaacagtagccaaacccctagagacagtgatgcctgcccgcaccctggcctggtccctggtccttcactggcgccttctcggagctggcccagggggcctggagcatggacagtgtgggcgctctccctaccttgcctccttttttcttaaagcaaagtcacttctccatcacaaccagatttgaggctggttttgatggctgggtccttgggcctggccagtcttcctcttagcctctggatctagaagggaccataagaggagtaggccctggttcctgctgtcctggtggctgggcccagcaggggccctcactcttgaagtccaggactgggtctgacctggtgggagcacctgccagaggatgctctttcccaggacggatgggccctatgtctcaggagtggggttgggggacagccttcagcagcagctcacaccctaccttccccagacttgcactggggtgggatttggagtgatgggaaggtttttaagggccggggatggatcttttctaaatgttattacttgtaaataaagtctatttttctcccgtga

SEQ ID NO: 160588 - DNA, 7227 bp, Homo sapiens
  Payload ID: 11387
  Gene Symbol: NUMA1
  Gene Name: nuclear mitotic apparatus protein 1
  Uniprot ID: Q14980
  ENST ID: ENST00000358965
  CDS Start-End: 259-6564
gcccacgaagaggtacgattccggagaatcgcgaggcagagcgggagcgcgcagccaggtggaaactaattctaagccagactgctggagatcaccctgttctagtgtgtggaggcttccaccaggagtctggagtgcaatggcacgatctcggctcactgcaacctccacctcccaggttcaagcgattctcctgcctcagcctcccaagtagctgggattacaggcgcattggagtgactgtctggcatcaccaagatgacactccacgccacccggggggctgcactcctctcttgggtgaacagtctacacgtggctgaccctgtggaggctgtgctgcagctccaggactgcagcatcttcatcaagatcattgacagaatccatggcactgaagagggacagcaaatcttgaagcagccggtgtcagagagactggactttgtgtgcagttttctgcagaaaaatcgaaaacatccctcttccccagaatgcctggtatctgcacagaaggtgctagagggatcagagctggaactggcgaagatgaccatgctgctcttataccactctaccatgagctccaaaagtcccagggactgggaacagtttgaatataaaattcaggctgagttggctgtcattcttaaatttgtgctggaccatgaggacgggctaaaccttaatgaggacctagagaacttcctacagaaagctcctgtgccttctacctgttctagcacattccctgaagagctctccccacctagccaccaggccaagagggagattcgcttcctagagctacagaaggttgcctcctcttccagtgggaacaactttctctcaggttctccagcttctcccatgggtgatatcctgcagaccccacagttccagatgagacggctgaagaagcagcttgctgatgagagaagtaatagggatgagctggagctggagctagctgagaaccgcaagctcctcaccgagaaggatgcacagatagccatgatgcagcagcgcattgaccgcctagccctgctgaatgagaagcaggcggccagcccactggagcccaaggagcttgaggagctgcgtgacaagaatgagagccttaccatgcggctgcatgaaaccctgaagcagtgccaggacctgaagacagagaagagccagatggatcgcaaaatcaaccagctttcggaggagaatggagacctttcctttaagctgcgggagtttgccagtcatctgcagcagctacaggatgccctcaatgagctgacggaggagcacagcaaggccactcaggagtggctagagaagcaggcccagctggagaaggagctcagcgcagccctgcaggacaagaaatgccttgaagagaagaacgaaatccttcagggaaaactttcacagctggaagaacacttgtcccagctgcaggataacccaccccaggagaagggcgaggtgctgggtgatgtcttgcagctggaaaccttgaagcaagaggcagccactcttgctgcaaacaacacacagctccaagccagggtagagatgctggagactgagcgaggccagcaggaagccaagctgcttgctgagcggggccacttcgaagaagaaaagcagcagctgtctagcctgatcactgacctgcagagctccatctccaacctcagccaggccaaggaagagctggagcaggcctcccaggctcatggggcccggttgactgcccaggtggcctctctgacctctgagctcaccacactcaatgccaccatccagcaacaggatcaagaactggctggcctgaagcagcaggccaaagagaagcaggcccagctagcacagaccctccaacagcaagaacaggcctcccagggcctccgccaccaggtggagcagctaagcagtagcctgaagcagaaggagcagcagttgaaggaggtagcggagaagcaggaggcaactaggcaggaccatgcccagcaactggccactgctgcagaggagcgagaggcctccttaagggagcgggatgcggctctcaagcagctggaggcactggagaaggagaaggctgccaagctggagattctgcagcagcaacttcaggtggctaatgaagcccgggacagtgcccagacctcagtgacacaggcccagcgggagaaggcagagctgagccggaaggtggaggaactccaggcctgtgttgagacagcccgccaggaacagcatgaggcccaggcccaggttgcagagctagagttgcagctgcggtctgagcagcaaaaagcaactgagaaagaaagggtggcccaggagaaggaccagctccaggagcagctccaggccctcaaagagtccttgaaggtcaccaagggcagccttgaagaggagaagcgcagggctgcagatgccctggaagagcagcagcgttgtatctctgagctgaaggcagagacccgaagcctggtggagcagcataagcgggaacgaaaggagctggaagaagagagggctgggcgcaaggggctggaggctcgattacagcagcttggggaggcccatcaggctgagactgaagtcctgcggcgggagctggcagaggccatggctgcccagcacacagctgagagtgagtgtgagcagctcgtcaaagaagtagctgcctggcgtgagcggtatgaggatagccagcaagaggaggcacagtatggcgccatgttccaggaacagctgatgactttgaaggaggaatgtgagaaggcccgccaggagctgcaggaggcaaaggagaaggtggcaggcatagaatcccacagcgagctccagataagccggcagcagaacgaactagctgagctccatgccaacctggccagagcactccagcaggtccaagagaaggaagtcagggcccagaagcttgcagatgacctctccactctgcaggaaaagatggctgccaccagcaaagaggtggcccgcttggagaccttggtgcgcaaggcaggtgagcagcaggaaacagcctcccgggagttagtcaaggagcctgcgagggcaggagacagacagcccgagtggctggaagagcaacagggacgccagttctgcagcacacaggcagcgctgcaggctatggagcgggaggcagagcagatgggcaatgagctggaacggctgcgggccgcgctgatggagagccaggggcagcagcaggaggagcgtgggcagcaggaaagggaggtggcgcggctgacccaggagcggggccgtgcccaggctgaccttgccctggagaaggcggccagagcagagcttgagatgcggctgcagaacgccctcaacgagcagcgtgtggagttcgctaccctgcaagaggcactggctcatgccctgacggaaaaggaaggcaaggaccaggagttggccaagcttcgtggtctggaggcagcccagataaaagagctggaggaacttcggcaaaccgtgaagcaactgaaggaacagctggctaagaaagaaaaggagcacgcatctggctcaggagcccaatctgaggctgctggcaggacagagccaacaggccccaagctggaggcactgcgggcagaggtgagcaagctggaacagcaatgccagaagcagcaggagcaggctgacagcctggaacgcagcctcgaggctgagcgggcctcccgggctgagcgggacagtgctctggagactctgcagggccagttagaggagaaggcccaggagctagggcacagtcagagtgccttagcctcggcccaacgggagttggctgccttccgcaccaaggtacaagaccacagcaaggctgaagatgagtggaaggcccaggtggcccggggccggcaagaggctgagaggaaaaatagcctcatcagcagcttggaggaggaggtgtccatcctgaatcgccaggtcctggagaaggagggggagagcaaggagttgaagcggctggtgatggccgagtcagagaagagccagaagctggaggagaggctgcgcctgctgcaggcagagacagccagcaacagtgccagagctgcagaacgcagctctgctctgcgggaggaggtgcagagcctccgggaggaggctgagaaacagcgggtggcttcagagaacctgcggcaggagctgacctcacaggctgagcgtgcggaggagctgggccaagaattgaaggcgtggcaggagaagttcttccagaaagagcaggccctctccaccctgcagctcgagcacaccagcacacaggccctggtgagtgagctgctgccagctaagcacctctgccagcagctgcaggccgagcaggccgctgccgagaaacgccaccgtgaggagctggagcagagcaagcaggccgctgggggactgcgggcagagctgctgcgggcccagcgggagcttggggagctgattcctctgcggcagaaggtggcagagcaggagcgaacagctcagcagctgcgggcagagaaggccagctatgcagagcagctgagcatgctgaagaaggcgcatggcctgctggcagaggagaaccgggggctgggtgagcgggccaaccttggccggcagtttctggaagtggagttggaccaggcccgggagaagtatgtccaagagttggcagccgtacgtgctgatgctgagacccgtctggctgaggtgcagcgagaagcacagagcactgcccgggagctggaggtgatgactgccaagtatgagggtgccaaggtcaaggtcctggaggagaggcagcggttccaggaagagaggcagaaactcactgcccaggtggaagaactgagtaagaaactggctgactctgaccaagccagcaaggtgcagcagcagaagctgaaggctgtccaggctcagggaggcgagagccagcaggaggcccagcgcctccaggcccagctgaatgaactgcaagcccagttgagccagaaggagcaggcagctgagcactataagctgcagatggagaaagccaaaacacattatgatgccaagaagcagcagaaccaagagctgcaggagcagctgcggagcctggagcagctgcagaaggaaaacaaagagctgcgagctgaagctgaacggctgggccatgagctacagcaggctgggctgaagaccaaggaggctgaacagacctgccgccaccttactgcccaggtgcgcagcctggaggcacaggttgcccatgcagaccagcagcttcgagacctgggcaaattccaggtggcaactgatgctttaaagagccgtgagccccaggctaagccccagctggacttgagtattgacagcctggatctgagctgcgaggaggggaccccactcagtatcaccagcaagctgcctcgtacccagccagacggcaccagcgtccctggagaaccagcctcacctatctcccagcgcctgccccccaaggtagaatccctggagagtctctacttcactcccatccctgctcggagtcaggcccccctggagagcagcctggactccctgggagacgtcttcctggactcgggtcgtaagacccgctccgctcgtcggcgcaccacgcagatcatcaacatcaccatgaccaagaagctagatgtggaagagccagacagcgccaactcatcgttctacagcacgcggtctgctcctgcttcccaggctagcctgcgagccacctcctctactcagtctctagctcgcctgggttctcccgattatggcaactcagccctgctcagcttgcctggctaccgccccaccactcgcagttctgctcgtcgttcccaggccggggtgtccagtggggcccctccaggaaggaacagcttctacatgggcacttgccaggatgagcctgagcagctggatgactggaaccgcattgcagagctgcagcagcgcaatcgagtgtgccccccacatctgaagacctgctatcccctggagtccaggccttccctgagcctgggcaccatcacagatgaggagatgaaaactggagacccccaagagaccctgcgccgagccagcatgcagccaatccagatagccgagggcactggcatcaccacccggcagcagcgcaaacgggtctccctagagccccaccagggccctggaactcctgagtctaagaaggccaccagctgtttcccacgccccatgactccccgagaccgacatgaagggcgcaaacagagcactactgaggcccagaagaaagcagctccagcttctactaaacaggctgaccggcgccagtcgatggccttcagcatcctcaacacacccaagaagctagggaacagccttctgcggcggggagcctcaaagaaggccctgtccaaggcttcccccaacactcgcagtggaacccgccgttctccgcgcattgccaccaccacagccagcgccgccactgctgccgccattggtgccacccctcgagccaagggcaaggcaaagcactaaagggccagtaccagtgagtggccccacctgtgtccccgatgctgacctcacctggtcctccgcctactgtccctctcagtgccttctctcagctcccaggccaacagtagccaaacccctagagacagtgatgcctgcccgcaccctggcctggtccctggtccttcactggcgccttctcggagctggcccagggggcctggagcatggacagtgtgggcgctctccctaccttgcctccttttttcttaaagcaaagtcacttctccatcacaaccagatttgaggctggttttgatggctgggtccttgggcctggccagtcttcctcttagcctctggatctagaagggaccataagaggagtaggccctggttcctgctgtcctggtggctgggcccagcaggggccctcactcttgaagtccaggactgggtctgacctggtgggagcacctgccagaggatgctctttcccaggacggatgggccctatgtctcaggagtggggttgggggacagccttcagcagcagctcacaccctaccttccccagacttgcactggggtgggatttggagtgatgggaaggtttttaagggccggggatggatcttttctaaatgttattacttgtaaataaagtctatttttctcccgtga

SEQ ID NO: 160589 - DNA, 583 bp, Homo sapiens
  Payload ID: 11387
  Gene Symbol: NUMA1
  Gene Name: nuclear mitotic apparatus protein 1
  ENST ID: ENST00000368959
  CDS Start-End: 310-583
aattgtgcgctcacagcgctggcgcgagcccacgaagaggtacgattccggagaatcgcgaggcagagcgggagcgcgcagccaggtggaaactaattctaagccagactgctggagatcaccctgttctagtgtgtggaggcttccaccaggagacagggtctctctctgtcacccagactggagtgcaatggcgggatctcagctcactgcaacctccacctctcgggttcaagcgattctcctgcctcagcctccctagtagctatgattacaggcgcattggagtgactgtctggcatcaccaagatgacactccacgccacccggggggctgcactcctctcttgggtgaacagtctacacgtggctgaccctgtggaggctgtgctgcagctccaggactgcagcatcttcatcaagatcattgacagaatccatggcactgaagagggacagcaaatcttgaagcagccggtgtcagagagactggactttgtgtgcagttttctgcagaaaaatcgaaaacatccctcttccccagaatgcctggtatctgcacagaaggtgctagagggatcag

SEQ ID NO: 160590 - DNA, 7343 bp, Homo sapiens
  Payload ID: 11387
  Gene Symbol: NUMA1
  Gene Name: nuclear mitotic apparatus protein 1
  Uniprot ID: Q14980
  ENST ID: ENST00000393695
  CDS Start-End: 333-6680
aagtacaggccggggtccggaagcggtgataccccttctctttcccagtggccctcaaacttccttttcccgggtccttaagcgggccccgccgacagaggccaatcagagggcagcgcgagggggcggggccatagtttaaactaattgtgcgctcacagcgctggcgcgagcccacgaagaggtacgattccggagaatcgcgaggcagagcgggagcgcgcagccaggtggaaactaattctaagccagactgctggagatcaccctgttctagtgtgtggaggcttccaccaggaggcgcattggagtgactgtctggcatcaccaagatgacactccacgccacccggggggctgcactcctctcttgggtgaacagtctacacgtggctgaccctgtggaggctgtgctgcagctccaggactgcagcatcttcatcaagatcattgacagaatccatggcactgaagagggacagcaaatcttgaagcagccggtgtcagagagactggactttgtgtgcagttttctgcagaaaaatcgaaaacatccctcttccccagaatgcctggtatctgcacagaaggtgctagagggatcagagctggaactggcgaagatgaccatgctgctcttataccactctaccatgagctccaaaagtcccagggactgggaacagtttgaatataaaattcaggctgagttggctgtcattcttaaatttgtgctggaccatgaggacgggctaaaccttaatgaggacctagagaacttcctacagaaagctcctgtgccttctacctgttctagcacattccctgaagagctctccccacctagccaccaggccaagagggagattcgcttcctagagctacagaaggttgcctcctcttccagtgggaacaactttctctcaggttctccagcttctcccatgggtgatatcctgcagaccccacagttccagatgagacggctgaagaagcagcttgctgatgagagaagtaatagggatgagctggagctggagctagctgagaaccgcaagctcctcaccgagaaggatgcacagatagccatgatgcagcagcgcattgaccgcctagccctgctgaatgagaagcaggcggccagcccactggagcccaaggagcttgaggagctgcgtgacaagaatgagagccttaccatgcggctgcatgaaaccctgaagcagtgccaggacctgaagacagagaagagccagatggatcgcaaaatcaaccagctttcggaggagaatggagacctttcctttaagctgcgggagtttgccagtcatctgcagcagctacaggatgccctcaatgagctgacggaggagcacagcaaggccactcaggagtggctagagaagcaggcccagctggagaaggagctcagcgcagccctgcaggacaagaaatgccttgaagagaagaacgaaatccttcagggaaaactttcacagctggaagaacacttgtcccagctgcaggataacccaccccaggagaagggcgaggtgctgggtgatgtcttgcagctggaaaccttgaagcaagaggcagccactcttgctgcaaacaacacacagctccaagccagggtagagatgctggagactgagcgaggccagcaggaagccaagctgcttgctgagcggggccacttcgaagaagaaaagcagcagctgtctagcctgatcactgacctgcagagctccatctccaacctcagccaggccaaggaagagctggagcaggcctcccaggctcatggggcccggttgactgcccaggtggcctctctgacctctgagctcaccacactcaatgccaccatccagcaacaggatcaagaactggctggcctgaagcagcaggccaaagagaagcaggcccagctagcacagaccctccaacagcaagaacaggcctcccagggcctccgccaccaggtggagcagctaagcagtagcctgaagcagaaggagcagcagttgaaggaggtagcggagaagcaggaggcaactaggcaggaccatgcccagcaactggccactgctgcagaggagcgagaggcctccttaagggagcgggatgcggctctcaagcagctggaggcactggagaaggagaaggctgccaagctggagattctgcagcagcaacttcaggtggctaatgaagcccgggacagtgcccagacctcagtgacacaggcccagcgggagaaggcagagctgagccggaaggtggaggaactccaggcctgtgttgagacagcccgccaggaacagcatgaggcccaggcccaggttgcagagctagagttgcagctgcggtctgagcagcaaaaagcaactgagaaagaaagggtggcccaggagaaggaccagctccaggagcagctccaggccctcaaagagtccttgaaggtcaccaagggcagccttgaagaggagaagcgcagggctgcagatgccctggaagagcagcagcgttgtatctctgagctgaaggcagagacccgaagcctggtggagcagcataagcgggaacgaaaggagctggaagaagagagggctgggcgcaaggggctggaggctcgattacagcagcttggggaggcccatcaggctgagactgaagtcctgcggcgggagctggcagaggccatggctgcccagcacacagctgagagtgagtgtgagcagctcgtcaaagaagtagctgcctggcgtgagcggtatgaggatagccagcaagaggaggcacagtatggcgccatgttccaggaacagctgatgactttgaaggaggaatgtgagaaggcccgccaggagctgcaggaggcaaaggagaaggtggcaggcatagaatcccacagcgagctccagataagccggcagcagaacgaactagctgagctccatgccaacctggccagagcactccagcaggtccaagagaaggaagtcagggcccagaagcttgcagatgacctctccactctgcaggaaaagatggctgccaccagcaaagaggtggcccgcttggagaccttggtgcgcaaggcaggtgagcagcaggaaacagcctcccgggagttagtcaaggagcctgcgagggcaggagacagacagcccgagtggctggaagagcaacagggacgccagttctgcagcacacaggcagcgctgcaggctatggagcgggaggcagagcagatgggcaatgagctggaacggctgcgggccgcgctgatggagagccaggggcagcagcaggaggagcgtgggcagcaggaaagggaggtggcgcggctgacccaggagcggggccgtgcccaggctgaccttgccctggagaaggcggccagagcagagcttgagatgcggctgcagaacgccctcaacgagcagcgtgtggagttcgctaccctgcaagaggcactggctcatgccctgacggaaaaggaaggcaaggaccaggagttggccaagcttcgtggtctggaggcagcccagataaaagagctggaggaacttcggcaaaccgtgaagcaactgaaggaacagctggctaagaaagaaaaggagcacgcatctggctcaggagcccaatctgaggctgctggcaggacagagccaacaggccccaagctggaggcactgcgggcagaggtgagcaagctggaacagcaatgccagaagcagcaggagcaggctgacagcctggaacgcagcctcgaggctgagcgggcctcccgggctgagcgggacagtgctctggagactctgcagggccagttagaggagaaggcccaggagctagggcacagtcagagtgccttagcctcggcccaacgggagttggctgccttccgcaccaaggtacaagaccacagcaaggctgaagatgagtggaaggcccaggtggcccggggccggcaagaggctgagaggaaaaatagcctcatcagcagcttggaggaggaggtgtccatcctgaatcgccaggtcctggagaaggagggggagagcaaggagttgaagcggctggtgatggccgagtcagagaagagccagaagctggaggagaggctgcgcctgctgcaggcagagacagccagcaacagtgccagagctgcagaacgcagctctgctctgcgggaggaggtgcagagcctccgggaggaggctgagaaacagcgggtggcttcagagaacctgcggcaggagctgacctcacaggctgagcgtgcggaggagctgggccaagaattgaaggcgtggcaggagaagttcttccagaaagagcaggccctctccaccctgcagctcgagcacaccagcacacaggccctggtgagtgagctgctgccagctaagcacctctgccagcagctgcaggccgagcaggccgctgccgagaaacgccaccgtgaggagctggagcagagcaagcaggccgctgggggactgcgggcagagctgctgcgggcccagcgggagcttggggagctgattcctctgcggcagaaggtggcagagcaggagcgaacagctcagcagctgcgggcagagaaggccagctatgcagagcagctgagcatgctgaagaaggcgcatggcctgctggcagaggagaaccgggggctgggtgagcgggccaaccttggccggcagtttctggaagtggagttggaccaggcccgggagaagtatgtccaagagttggcagccgtacgtgctgatgctgagacccgtctggctgaggtgcagcgagaagcacagagcactgcccgggagctggaggtgatgactgccaagtatgagggtgccaaggtcaaggtcctggaggagaggcagcggttccaggaagagaggcagaaactcactgcccaggtggagcagctagaggtatttcagagagagcaaactaagcaggtggaagaactgagtaagaaactggctgactctgaccaagccagcaaggtgcagcagcagaagctgaaggctgtccaggctcagggaggcgagagccagcaggaggcccagcgcctccaggcccagctgaatgaactgcaagcccagttgagccagaaggagcaggcagctgagcactataagctgcagatggagaaagccaaaacacattatgatgccaagaagcagcagaaccaagagctgcaggagcagctgcggagcctggagcagctgcagaaggaaaacaaagagctgcgagctgaagctgaacggctgggccatgagctacagcaggctgggctgaagaccaaggaggctgaacagacctgccgccaccttactgcccaggtgcgcagcctggaggcacaggttgcccatgcagaccagcagcttcgagacctgggcaaattccaggtggcaactgatgctttaaagagccgtgagccccaggctaagccccagctggacttgagtattgacagcctggatctgagctgcgaggaggggaccccactcagtatcaccagcaagctgcctcgtacccagccagacggcaccagcgtccctggagaaccagcctcacctatctcccagcgcctgccccccaaggtagaatccctggagagtctctacttcactcccatccctgctcggagtcaggcccccctggagagcagcctggactccctgggagacgtcttcctggactcgggtcgtaagacccgctccgctcgtcggcgcaccacgcagatcatcaacatcaccatgaccaagaagctagatgtggaagagccagacagcgccaactcatcgttctacagcacgcggtctgctcctgcttcccaggctagcctgcgagccacctcctctactcagtctctagctcgcctgggttctcccgattatggcaactcagccctgctcagcttgcctggctaccgccccaccactcgcagttctgctcgtcgttcccaggccggggtgtccagtggggcccctccaggaaggaacagcttctacatgggcacttgccaggatgagcctgagcagctggatgactggaaccgcattgcagagctgcagcagcgcaatcgagtgtgccccccacatctgaagacctgctatcccctggagtccaggccttccctgagcctgggcaccatcacagatgaggagatgaaaactggagacccccaagagaccctgcgccgagccagcatgcagccaatccagatagccgagggcactggcatcaccacccggcagcagcgcaaacgggtctccctagagccccaccagggccctggaactcctgagtctaagaaggccaccagctgtttcccacgccccatgactccccgagaccgacatgaagggcgcaaacagagcactactgaggcccagaagaaagcagctccagcttctactaaacaggctgaccggcgccagtcgatggccttcagcatcctcaacacacccaagaagctagggaacagccttctgcggcggggagcctcaaagaaggccctgtccaaggcttcccccaacactcgcagtggaacccgccgttctccgcgcattgccaccaccacagccagcgccgccactgctgccgccattggtgccacccctcgagccaagggcaaggcaaagcactaaagggccagtaccagtgagtggccccacctgtgtccccgatgctgacctcacctggtcctccgcctactgtccctctcagtgccttctctcagctcccaggccaacagtagccaaacccctagagacagtgatgcctgcccgcaccctggcctggtccctggtccttcactggcgccttctcggagctggcccagggggcctggagcatggacagtgtgggcgctctccctaccttgcctccttttttcttaaagcaaagtcacttctccatcacaaccagatttgaggctggttttgatggctgggtccttgggcctggccagtcttcctcttagcctctggatctagaagggaccataagaggagtaggccctggttcctgctgtcctggtggctgggcccagcaggggccctcactcttgaagtccaggactgggtctgacctggtgggagcacctgccagaggatgctctttcccaggacggatgggccctatgtctcaggagtggggttgggggacagccttcagcagcagctcacaccctaccttccccagacttgcactggggtgggatttggagtgatgggaaggtttttaagggccggggatggatcttttctaaatgttattacttgtaaataaagtctatttttctcccgtga

SEQ ID NO: 160591 - DNA, 539 bp, Homo sapiens
  Payload ID: 11387
  Gene Symbol: NUMA1
  Gene Name: nuclear mitotic apparatus protein 1
  ENST ID: ENST00000366394
  CDS Start-End: 314-539
agagcgggagcgcgcagccaggctggagtccagtggtgcaatctcggctccctgcaacctctgcctcctgggttcaagcgattctcctgcctcagcctcctgagtagctgggattacaggcatgcaccaccatgcccagctaattttgtatttttaatagaaatggggtttcaccatgttggtcaggctgatcttgaactgccaacctcaggtggaaactaattctaagccagactgctggagatcaccctgttctagtgtgtggaggcttccaccaggaggcgcattggagtgactgtctggcatcaccaagatgacactccacgccacccggggggctgcactcctctcttgggtgaacagtctacacgtggctgaccctgtggaggctgtgctgcagctccaggactgcagcatcttcatcaagatcattgacagaatccatggcactgaagagggacagcaaatcttgaagcagccggtgtcagagagactggactttgtgtgcagttttctgcagaaaaatcgaaaacatccct

SEQ ID NO: 160592 - DNA, 583 bp, Homo sapiens
  Payload ID: 11387
  Gene Symbol: NUMA1
  Gene Name: nuclear mitotic apparatus protein 1
  ENST ID: ENST00000541719
  CDS Start-End: 336-583
gtgcggcctgggcacccctgcgggtgctcaggcctaaaaggggtgctggagaggccgctgcgagcggaaggcctcctccataaccgagtccgaaagggcagaatctatgggggtggaaactaattctaagccagactgctggagatcaccctgttctagtgtgtggaggcttccaccaggagacaggttctcactatgttgcccacgctggtctcaaattccttggctcaagtgatcctcccatcttggcctccaaaagtgccgggattacaagcatgagcaactgtgcctggccctgaaaaggcgcattggagtgactgtctggcatcaccaagatgacactccacgccacccggggggctgcactcctctcttgggtgaacagtctacacgtggctgaccctgtggaggctgtgctgcagctccaggactgcagcatcttcatcaagatcattgacagaatccatggcactgaagagggacagcaaatcttgaagcagccggtgtcagagagactggactttgtgtgcagttttctgcagaaaaatcgaaaacatccctcttccccagaatgcctggtatc

SEQ ID NO: 160593 - DNA, 582 bp, Homo sapiens
  Payload ID: 11387
  Gene Symbol: NUMA1
  Gene Name: nuclear mitotic apparatus protein 1
  ENST ID: ENST00000537930
  CDS Start-End: 104-582
ggatttagtgggtggccgtgtcccagagcagggcaggcggtgcccatggaaggtggcagggcgctttgtgtgcgcattggagtgactgtctggcatcaccaagatgacactccacgccacccggggggctgcactcctctcttgggtgaacagtctacacgtggctgaccctgtggaggctgtgctgcagctccaggactgcagcatcttcatcaagatcattgacagaatccatggcactgaagagggacagcaaatcttgaagcagccggtgtcagagagactggactttgtgtgcagttttctgcagaaaaatcgaaaacatccctcttccccagaatgcctggtatctgcacagaaggtgctagagggatcagagctggaactggcgaagatgaccatgctgctcttataccactctaccatgagctccaaaagtcccagggactgggaacagtttgaatataaaattcaggctgagttggctgtcattcttaaatttgtgctggaccatgaggacgggctaaaccttaatgaggacctagagaacttcctacagaaagctcctgtgccttctacctg

SEQ ID NO: 160594 - DNA, 874 bp, Homo sapiens
  Payload ID: 11387
  Gene Symbol: NUMA1
  Gene Name: nuclear mitotic apparatus protein 1
  ENST ID: ENST00000543009
  CDS Start-End: 353-874
ttttgttttcagccatgtaggagaagcagagtctacaagtccccgtgcctgcgtctgttaagggctgcagccagtgcctggcgtactcggtctcgtgccttggcccctcagcccctccccataaatgctcagcggaacaggggattaggttctggcagcacagctgggattttggcggccattccacagccgacaatagcacgcagcacaggacagcgcaggcctgtactccagggccagaatctgcctgggcttcttgtttgggtggcggagggggaggagcgggcacagcacggcatcctggccttgccacgcagaaggcgcattggagtgactgtctggcatcaccaagatgacactccacgccacccggggggctgcactcctctcttgggtgaacagtctacacgtggctgaccctgtggaggctgtgctgcagctccaggactgcagcatcttcatcaagatcattgacagaatccatggcactgaagagggacagcaaatcttgaagcagccggtgtcagagagactggactttgtgtgcagttttctgcagaaaaatcgaaaacatccctcttccccagaatgcctggtatctgcacagaaggtgctagagggatcagagctggaactggcgaagatgaccatgctgctcttataccactctaccatgagctccaaaagtcccagggactgggaacagtttgaatataaaattcaggctgagttggctgtcattcttaaatttgtgctggaccatgaggacgggctaaaccttaatgaggacctagagaacttcctacagaaagctcctgtgccttctacctgttctagcacattccctgaagagctctccccacctagccaccag

SEQ ID NO: 160595 - DNA, 600 bp, Homo sapiens
  Payload ID: 11387
  Gene Symbol: NUMA1
  Gene Name: nuclear mitotic apparatus protein 1
  ENST ID: ENST00000544129
  CDS Start-End: 124-600
ggatgtgagtgtctctcagatggggagtatctttctaagaaaggggtacagagcatggaattcttaggctacaggcaggcagcgtctcagggcgcattggagtgactgtctggcatcaccaagatgacactccacgccacccggggggctgcactcctctcttgggtgaacagtctacacgtggctgaccctgtggaggctgtgctgcagctccaggactgcagcatcttcatcaagatcattgacagaatccatggcactgaagagggacagcaaatcttgaagcagccggtgtcagagagactggactttgtgtgcagttttctgcagaaaaatcgaaaacatccctcttccccagaatgcctggtatctgcacagaaggtgctagagggatcagagctggaactggcgaagatgaccatgctgctcttataccactctaccatgagctccaaaagtcccagggactgggaacagtttgaatataaaattcaggctgagttggctgtcattcttaaatttgtgctggaccatgaggacgggctaaaccttaatgaggacctagagaacttcctacagaaagctcctgtgccttctacc

SEQ ID NO: 160596 - DNA, 606 bp, Homo sapiens
  Payload ID: 11387
  Gene Symbol: NUMA1
  Gene Name: nuclear mitotic apparatus protein 1
  ENST ID: ENST00000535087
  CDS Start-End: 279-606
tcttcctgctctgccactgactcaccccgttgacctggcctgcatggcttcccttctgcttgctgtctgatccacagaacgctggggttgcccaggataatgtgaggctgagctcactaagagtgggtgggttaggggaatgaataatcattcctgtccctttgccccttccctaggtggaaactaattctaagccagactgctggagatcaccctgttctagtgtgtggaggcttccaccaggaggcgcattggagtgactgtctggcatcaccaagatgacactccacgccacccggggggctgcactcctctcttgggtgaacagtctacacgtggctgaccctgtggaggctgtgctgcagctccaggactgcagcatcttcatcaagatcattgacagaatccatggcactgaagagggacagcaaatcttgaagcagccggtgtcagagagactggactttgtgtgcagttttctgcagaaaaatcgaaaacatccctcttccccagaatgcctggtatctgcacagaaggtgctagagggatcagagctggaactggcgaagatgaccatgctgctcttataccactctaccatgagct

SEQ ID NO: 160597 - DNA, 911 bp, Homo sapiens
  Payload ID: 11387
  Gene Symbol: NUMA1
  Gene Name: nuclear mitotic apparatus protein 1
  ENST ID: ENST00000543937
  CDS Start-End: 309-911
aattgtgcgctcacagcgctggcgcgagcccacgaagaggtacgattccggagaatcgcgaggcagagcgggagcgcgcagccaggtggaaactaattctaagccagactgctggagatcaccctgttctagtgtgtggaggcttccaccaggagacaggttctcactatgttgcccacgctggtctcaaattccttggctcaagtgatcctcccatcttggcctccaaaagtgccgggattacaagcatgagcaactgtgcctggccctgaaaaggcgcattggagtgactgtctggcatcaccaagatgacactccacgccacccggggggctgcactcctctcttgggtgaacagtctacacgtggctgaccctgtggaggctgtgctgcagctccaggactgcagcatcttcatcaagatcattgacagaatccatggcactgaagagggacagcaaatcttgaagcagccggtgtcagagagactggactttgtgtgcagttttctgcagaaaaatcgaaaacatccctcttccccagaatgcctggtatctgcacagaaggtgctagagggatcagagctggaactggcgaagatgaccatgctgctcttataccactctaccatgagctccaaaagtcccagggactgggaacagtttgaatataaaattcaggctgagttggctgtcattcttaaatttgtgctggaccatgaggacgggctaaaccttaatgaggacctagagaacttcctacagaaagctcctgtgccttctacctgttctagcacattccctgaagagctctccccacctagccaccaggccaagagggagattcgcttcctagagctacagaaggttgcctcctcttccagtgggaacaactttctctcaggttctcca

SEQ ID NO: 160598 - DNA, 3557 bp, Homo sapiens
  Payload ID: 11387
  Gene Symbol: NUMA1
  Gene Name: nuclear mitotic apparatus protein 1
  ENST ID: ENST00000541584
  CDS Start-End: 1-2894
cccgggctgagcgggacagtgctctggagactctgcagggccagttagaggagaaggcccaggagctagggcacagtcagagtgccttagcctcggcccaacgggagttggctgccttccgcaccaaggtacaagaccacagcaaggctgaagatgagtggaaggcccaggtggcccggggccggcaagaggctgagaggaaaaatagcctcatcagcagcttggaggaggaggtgtccatcctgaatcgccaggtcctggagaaggagggggagagcaaggagttgaagcggctggtgatggccgagtcagagaagagccagaagctggaggagaggctgcgcctgctgcaggcagagacagccagcaacagtgccagagctgcagaacgcagctctgctctgcgggaggaggtgcagagcctccgggaggaggctgagaaacagcgggtggcttcagagaacctgcggcaggagctgacctcacaggctgagcgtgcggaggagctgggccaagaattgaaggcgtggcaggagaagttcttccagaaagagcaggccctctccaccctgcagctcgagcacaccagcacacaggccctggtgagtgagctgctgccagctaagcacctctgccagcagctgcaggccgagcaggccgctgccgagaaacgccaccgtgaggagctggagcagagcaagcaggccgctgggggactgcgggcagagctgctgcgggcccagcgggagcttggggagctgattcctctgcggcagaaggtggcagagcaggagcgaacagctcagcagctgcgggcagagaaggccagctatgcagagcagctgagcatgctgaagaaggcgcatggcctgctggcagaggagaaccgggggctgggtgagcgggccaaccttggccggcagtttctggaagtggagttggaccaggcccgggagaagtatgtccaagagttggcagccgtacgtgctgatgctgagacccgtctggctgaggtgcagcgagaagcacagagcactgcccgggagctggaggtgatgactgccaagtatgagggtgccaaggtcaaggtcctggaggagaggcagcggttccaggaagagaggcagaaactcactgcccaggtggaagaactgagtaagaaactggctgactctgaccaagccagcaaggtgcagcagcagaagctgaaggctgtccaggctcagggaggcgagagccagcaggaggcccagcgcctccaggcccagctgaatgaactgcaagcccagttgagccagaaggagcaggcagctgagcactataagctgcagatggagaaagccaaaacacattatgatgccaagaagcagcagaaccaagagctgcaggagcagctgcggagcctggagcagctgcagaaggaaaacaaagagctgcgagctgaagctgaacggctgggccatgagctacagcaggctgggctgaagaccaaggaggctgaacagacctgccgccaccttactgcccaggtgcgcagcctggaggcacaggttgcccatgcagaccagcagcttcgagacctgggcaaattccaggtggcaactgatgctttaaagagccgtgagccccaggctaagccccagctggacttgagtattgacagcctggatctgagctgcgaggaggggaccccactcagtatcaccagacataaagcactcatgacaattatacctgatttgtcccccaacaaccctctgagcaagctgcctcgtacccagccagacggcaccagcgtccctggagaaccagcctcacctatctcccagcgcctgccccccaaggtagaatccctggagagtctctacttcactcccatccctgctcggagtcaggcccccctggagagcagcctggactccctgggagacgtcttcctggactcgggtcgtaagacccgctccgctcgtcggcgcaccacgcagatcatcaacatcaccatgaccaagaagctagatgtggaagagccagacagcgccaactcatcgttctacagcacgcggtctgctcctgcttcccaggctagcctgcgagccacctcctctactcagtctctagctcgcctgggttctcccgattatggcaactcagccctgctcagcttgcctggctaccgccccaccactcgcagttctgctcgtcgttcccaggccggggtgtccagtggggcccctccaggaaggaacagcttctacatgggcacttgccaggatgagcctgagcagctggatgactggaaccgcattgcagagctgcagcagcgcaatcgagtgtgccccccacatctgaagacctgctatcccctggagtccaggccttccctgagcctgggcaccatcacagatgaggagatgaaaactggagacccccaagagaccctgcgccgagccagcatgcagccaatccagatagccgagggcactggcatcaccacccggcagcagcgcaaacgggtctccctagagccccaccagggccctggaactcctgagtctaagaaggccaccagctgtttcccacgccccatgactccccgagaccgacatgaagggcgcaaacagagcactactgaggcccagaagaaagcagctccagcttctactaaacaggctgaccggcgccagtcgatggccttcagcatcctcaacacacccaagaagctagggaacagccttctgcggcggggagcctcaaagaaggccctgtccaaggcttcccccaacactcgcagtggaacccgccgttctccgcgcattgccaccaccacagccagcgccgccactgctgccgccattggtgccacccctcgagccaagggcaaggcaaagcactaaagggccagtaccagtgagtggccccacctgtgtccccgatgctgacctcacctggtcctccgcctactgtccctctcagtgccttctctcagctcccaggccaacagtagccaaacccctagagacagtgatgcctgcccgcaccctggcctggtccctggtccttcactggcgccttctcggagctggcccagggggcctggagcatggacagtgtgggcgctctccctaccttgcctccttttttcttaaagcaaagtcacttctccatcacaaccagatttgaggctggttttgatggctgggtccttgggcctggccagtcttcctcttagcctctggatctagaagggaccataagaggagtaggccctggttcctgctgtcctggtggctgggcccagcaggggccctcactcttgaagtccaggactgggtctgacctggtgggagcacctgccagaggatgctctttcccaggacggatgggccctatgtctcaggagtggggttgggggacagccttcagcagcagctcacaccctaccttccccagacttgcactggggtgggatttggagtgatgggaaggtttttaagggccggggatggatcttttctaaatgttattacttgtaaataaagtctatttttctcccgtga

SEQ ID NO: 160599 - DNA, 589 bp, Homo sapiens
  Payload ID: 11387
  Gene Symbol: NUMA1
  Gene Name: nuclear mitotic apparatus protein 1
  ENST ID: ENST00000541641
  CDS Start-End: 372-589
atagtttaaactaattgtgcgctcacagcgctggcgcgagcccacgaagaggtacgattccggagaatcgcgaggcagagcgggagcgcgcagccaggtggaaactaattctaagccagactgctggagatcaccctgttctagtgtgtggaggcttccaccaggagctgtggcagaagcagtgtgaacaatgaatgcagaaatgctttgtatacatgaagacctatactgatgagaaagatagaggatgtagctgagatgtgctggagagagcactggatttagaagacatctctttgagttctggctctgcagccttaccagtcgaccttgaggcaggcgcattggagtgactgtctggcatcaccaagatgacactccacgccacccggggggctgcactcctctcttgggtgaacagtctacacgtggctgaccctgtggaggctgtgctgcagctccaggactgcagcatcttcatcaagatcattgacagaatccatggcactgaagagggacagcaaatcttgaagcagccggtgtcagagagactggactttgtgtgcagttttctgcagaaaaatcgaaa

SEQ ID NO: 160600 - DNA, 582 bp, Homo sapiens
  Payload ID: 11387
  Gene Symbol: NUMA1
  Gene Name: nuclear mitotic apparatus protein 1
  ENST ID: ENST00000535111
  CDS Start-End: 400-582
agccaggtaaccggcgcgggcccgcgtttggcgtgcggcctgggcacccctgcgggtgctcaggcctaaaaggggtgctggagaggccgctgcgagcggaaggcctcctccataaccgagtccgaaagggcagaatctatgggggtggaaactaattctaagccagactgctggagatcaccctgttctagtgtgtggaggcttccaccaggaggaaactgcagctgaggagccattgcagtcccatctccagaagacccccagaaagagttggaagagttcttcaggctgtggcagccactgcccaccaacacacccaaatcaatcaagatgaatcccaggtggtgaggctgaagcagatggtttggcgcattggagtgactgtctggcatcaccaagatgacactccacgccacccggggggctgcactcctctcttgggtgaacagtctacacgtggctgaccctgtggaggctgtgctgcagctccaggactgcagcatcttcatcaagatcattgacagaatccatggcactgaagagggacagcaaatcttgaagcagccggtgtcagagagactg

SEQ ID NO: 160601 - DNA, 280 bp, Homo sapiens
  Payload ID: 11387
  Gene Symbol: NUMA1
  Gene Name: nuclear mitotic apparatus protein 1
  ENST ID: ENST00000546131
  CDS Start-End: 112-280
gcgctcacagcgctggcgcgagcccacgaagaggtacgattccggagaatcgcgaggcagagcgggagcgcgcagccaggcgcattggagtgactgtctggcatcaccaagatgacactccacgccacccggggggctgcactcctctcttgggtgaacagtctacacgtggctgaccctgtggaggctgtgctgcagctccaggactgcagcatcttcatcaagatcattgacagaatccatggcactgaagagggacagcaaatcttgaagcagccgg

SEQ ID NO: 160602 - DNA, 792 bp, Homo sapiens
  Payload ID: 11387
  Gene Symbol: NUMA1
  Gene Name: nuclear mitotic apparatus protein 1
  ENST ID: ENST00000544238
  CDS Start-End: 131-792
gagagatggacagattattactgctgccttaaactctgggtggaaaacagagcgaagggggagtgtccggttgatcccagtttgtcaggcaggccactgcgcattggagtgactgtctggcatcaccaagatgacactccacgccacccggggggctgcactcctctcttgggtgaacagtctacacgtggctgaccctgtggaggctgtgctgcagctccaggactgcagcatcttcatcaagatcattgacagaatccatggcactgaagagggacagcaaatcttgaagcagccggtgtcagagagactggactttgtgtgcagttttctgcagaaaaatcgaaaacatccctcttccccagaatgcctggtatctgcacagaaggtgctagagggatcagagctggaactggcgaagatgaccatgctgctcttataccactctaccatgagctccaaaagtcccagggactgggaacagtttgaatataaaattcaggctgagttggctgtcattcttaaatttgtgctggaccatgaggacgggctaaaccttaatgaggacctagagaacttcctacagaaagctcctgtgccttctacctgttctagcacattccctgaagagctctccccacctagccaccaggccaagagggagattcgcttcctagagctacagaaggttgcctcctcttccagtgggaacaactttctctcaggttctccagcttctcccatgggtgatatcctgcagaccccacagttccagatgagacggctgaagaa

SEQ ID NO: 160603 - DNA, 2331 bp, Homo sapiens
  Payload ID: 11387
  Gene Symbol: NUMA1
  Gene Name: nuclear mitotic apparatus protein 1
  ENST ID: ENST00000537217
  CDS Start-End: 258-2331
cgggagcgcgcagccaggtaaccggcgcgggcccgcgtttggcgtgcggcctgggcacccctgcgggtgctcaggcctaaaaggggtgctggagaggccgctgcgagcggaaggcctcctccataaccgagtccgaaagggcagaatctatgggggtggaaactaattctaagccagactgctggagatcaccctgttctagtgtgtggaggcttccaccaggaggcgcattggagtgactgtctggcatcaccaagatgacactccacgccacccggggggctgcactcctctcttgggtgaacagtctacacgtggctgaccctgtggaggctgtgctgcagctccaggactgcagcatcttcatcaagatcattgacagaatccatggcactgaagagggacagcaaatcttgaagcagccggtgtcagagagactggactttgtgtgcagttttctgcagaaaaatcgaaaacatccctcttccccagaatgcctggtatctgcacagaaggtgctagagggatcagagctggaactggcgaagatgaccatgctgctcttataccactctaccatgagctccaaaagtcccagggactgggaacagtttgaatataaaattcaggctgagttggctgtcattcttaaatttgtgctggaccatgaggacgggctaaaccttaatgaggacctagagaacttcctacagaaagctcctgtgccttctacctgttctagcacattccctgaagagctctccccacctagccaccaggccaagagggagattcgcttcctagagctacagaaggttgcctcctcttccagtgggaacaactttctctcaggttctccagcttctcccatgggtgatatcctgcagaccccacagttccagatgagacggctgaagaagcagcttgctgatgagagaagtaatagggatgagctggagctggagctagctgagaaccgcaagctcctcaccgagaaggatgcacagatagccatgatgcagcagcgcattgaccgcctagccctgctgaatgagaagcaggcggccagcccactggagcccaaggagcttgaggagctgcgtgacaagaatgagagccttaccatgcggctgcatgaaaccctgaagcagtgccaggacctgaagacagagaagagccagatggatcgcaaaatcaaccagctttcggaggagaatggagacctttcctttaagctgcgggagtttgccagtcatctgcagcagctacaggatgccctcaatgagctgacggaggagcacagcaaggccactcaggagtggctagagaagcaggcccagctggagaaggagctcagcgcagccctgcaggacaagaaatgccttgaagagaagaacgaaatccttcagggaaaactttcacagctggaagaacacttgtcccagctgcaggataacccaccccaggagaagggcgaggtgctgggtgatgtcttgcagctggaaaccttgaagcaagaggcagccactcttgctgcaaacaacacacagctccaagccagggtagagatgctggagactgagcgaggccagcaggaagccaagctgcttgctgagcggggccacttcgaagaagaaaagcagcagctgtctagcctgatcactgacctgcagagctccatctccaacctcagccaggccaaggaagagctggagcaggcctcccaggctcatggggcccggttgactgcccaggtggcctctctgacctctgagctcaccacactcaatgccaccatccagcaacaggatcaagaactggctggcctgaagcagcaggccaaagagaagcaggcccagctagcacagaccctccaacagcaagaacaggcctcccagggcctccgccaccaggtggagcagctaagcagtagcctgaagcagaaggagcagcagttgaaggaggtagcggagaagcaggaggcaactaggcaggaccatgcccagcaactggccactgctgcagaggagcgagaggcctccttaagggagcgggatgcggctctcaagcagctggaggcactggagaaggagaaggctgccaagctggagattctgcagcagcaacttcaggtggctaatgaagcccgggacagtgcccagacctcagtgacacaggcccagcgggagaaggcagagctgagccggaaggtggaggaactccaggcctgtgttgagacagcccgccaggaacagcatgaggcccaggcccaggttgcagagctagagttgcagctgcggtctgagcagcaaaaagcaactgagaaagaaa

SEQ ID NO: 160604 - DNA, 576 bp, Homo sapiens
  Payload ID: 11387
  Gene Symbol: NUMA1
  Gene Name: nuclear mitotic apparatus protein 1
  ENST ID: ENST00000535947
  CDS Start-End: 139-576
agatgtcagcatgtttttgttcagagaaggaaagcgtgtttgcctgcacgttgagctgtagagacagctcaggagagggcttcaccatttctgcgtgaggccgtgggcgcattggagtgactgtctggcatcaccaagatgacactccacgccacccggggggctgcactcctctcttgggtgaacagtctacacgtggctgaccctgtggaggctgtgctgcagctccaggactgcagcatcttcatcaagatcattgacagaatccatggcactgaagagggacagcaaatcttgaagcagccggtgtcagagagactggactttgtgtgcagttttctgcagaaaaatcgaaaacatccctcttccccagaatgcctggtatctgcacagaaggtgctagagggatcagagctggaactggcgaagatgaccatgctgctcttataccactctaccatgagctccaaaagtcccagggactgggaacagtttgaatataaaattcaggctgagttggctgtcattcttaaatttgtgctggaccatgaggacgggctaaaccttaatgaggac

SEQ ID NO: 160605 - DNA, 582 bp, Homo sapiens
  Payload ID: 11387
  Gene Symbol: NUMA1
  Gene Name: nuclear mitotic apparatus protein 1
  ENST ID: ENST00000535838
  CDS Start-End: 406-582
agtgactcttcctgctctgccactgactcaccccgttgacctggcctgcatggcttcccttctgcttgctgtctgatccacagaacgctggggttgcccaggataatgtgaggctgagctcactaagagtgggtgggttaggggaatgaataatcattcctgtccctttgccccttccctaggtggaaactaattctaagccagactgctggagatcaccctgttctagtgtgtggaggcttccaccaggagacaggttctcactatgttgcccacgctggtctcaaattccttggctcaagtgatcctcccatcttggcctccaaaagtgccgggattacaagcatgagcaactgtgcctggccctgaaaaggcgcattggagtgactgtctggcatcaccaagatgacactccacgccacccggggggctgcactcctctcttgggtgaacagtctacacgtggctgaccctgtggaggctgtgctgcagctccaggactgcagcatcttcatcaagatcattgacagaatccatggcactgaagagggacagcaaatcttgaagcagccggtgtcagag

SEQ ID NO: 160606 - DNA, 2766 bp, Homo sapiens
  Payload ID: 11387
  Gene Symbol: NUMA1
  Gene Name: nuclear mitotic apparatus protein 1
  ENST ID: ENST00000542977
  CDS Start-End: 212-2766
gcacttctggctgtcagccaggaagatcgctcctgccaggcagactgagaagaaaaccaacaacttttcttttgtgtgtggggttactttccactggcccccccttcctcctctcctttcaagatttaaatgctaatggcggattaaaacctgtagatacgtttggctttaggagtctggcgcattggagtgactgtctggcatcaccaagatgacactccacgccacccggggggctgcactcctctcttgggtgaacagtctacacgtggctgaccctgtggaggctgtgctgcagctccaggactgcagcatcttcatcaagatcattgacagaatccatggcactgaagagggacagcaaatcttgaagcagccggtgtcagagagactggactttgtgtgcagttttctgcagaaaaatcgaaaacatccctcttccccagaatgcctggtatctgcacagaaggtgctagagggatcagagctggaactggcgaagatgaccatgctgctcttataccactctaccatgagctccaaaagtcccagggactgggaacagtttgaatataaaattcaggctgagttggctgtcattcttaaatttgtgctggaccatgaggacgggctaaaccttaatgaggacctagagaacttcctacagaaagctcctgtgccttctacctgttctagcacattccctgaagagctctccccacctagccaccaggccaagagggagattcgcttcctagagctacagaaggttgcctcctcttccagtgggaacaactttctctcaggttctccagcttctcccatgggtgatatcctgcagaccccacagttccagatgagacggctgaagaagcagcttgctgatgagagaagtaatagggatgagctggagctggagctagctgagaaccgcaagctcctcaccgagaaggatgcacagatagccatgatgcagcagcgcattgaccgcctagccctgctgaatgagaagcaggcggccagcccactggagcccaaggagcttgaggagctgcgtgacaagaatgagagccttaccatgcggctgcatgaaaccctgaagcagtgccaggacctgaagacagagaagagccagatggatcgcaaaatcaaccagctttcggaggagaatggagacctttcctttaagctgcgggagtttgccagtcatctgcagcagctacaggatgccctcaatgagctgacggaggagcacagcaaggccactcaggagtggctagagaagcaggcccagctggagaaggagctcagcgcagccctgcaggacaagaaatgccttgaagagaagaacgaaatccttcagggaaaactttcacagctggaagaacacttgtcccagctgcaggataacccaccccaggagaagggcgaggtgctgggtgatgtcttgcagctggaaaccttgaagcaagaggcagccactcttgctgcaaacaacacacagctccaagccagggtagagatgctggagactgagcgaggccagcaggaagccaagctgcttgctgagcggggccacttcgaagaagaaaagcagcagctgtctagcctgatcactgacctgcagagctccatctccaacctcagccaggccaaggaagagctggagcaggcctcccaggctcatggggcccggttgactgcccaggtggcctctctgacctctgagctcaccacactcaatgccaccatccagcaacaggatcaagaactggctggcctgaagcagcaggccaaagagaagcaggcccagctagcacagaccctccaacagcaagaacaggcctcccagggcctccgccaccaggtggagcagctaagcagtagcctgaagcagaaggagcagcagttgaaggaggtagcggagaagcaggaggcaactaggcaggaccatgcccagcaactggccactgctgcagaggagcgagaggcctccttaagggagcgggatgcggctctcaagcagctggaggcactggagaaggagaaggctgccaagctggagattctgcagcagcaacttcaggtggctaatgaagcccgggacagtgcccagacctcagtgacacaggcccagcgggagaaggcagagctgagccggaaggtggaggaactccaggcctgtgttgagacagcccgccaggaacagcatgaggcccaggcccaggttgcagagctagagttgcagctgcggtctgagcagcaaaaagcaactgagaaagaaagggtggcccaggagaaggaccagctccaggagcagctccaggccctcaaagagtccttgaaggtcaccaagggcagccttgaagaggagaagcgcagggctgcagatgccctggaagagcagcagcgttgtatctctgagctgaaggcagagacccgaagcctggtggagcagcataagcgggaacgaaaggagctggaagaagagagggctgggcgcaaggggctggaggctcgattacagcagcttggggaggcccatcaggctgagactgaagtcctgcggcgggagctggcagaggccatggctgcccagcacacagctgagagtgagtgtgagcagctcgtcaaagaagtagctgcctggcgtgagcggtatgaggatagccagcaagaggaggcacagtatggcgccatgttccaggaacagctgatgactttgaaggaggaatgtgagaaggcccgccaggagctgcaggaggc

SEQ ID NO: 160607 - DNA, 2796 bp, Homo sapiens
  Payload ID: 11387
  Gene Symbol: NUMA1
  Gene Name: nuclear mitotic apparatus protein 1
  ENST ID: ENST00000545721
  CDS Start-End: 1-1060
agagctgctgcgggcccagcgggagcttggggagctgattcctctgcggcagaaggtggcagagcaggagcgaacagctcagcagctgcgggcagagaaggccagctatgcagagcagctgagcatgctgaagaaggcgcatggcctgctggcagaggagaaccgggggctgggtgagcgggccaaccttggccggcagtttctggaagtggagttggaccaggcccgggagaagtatgtccaagagttggcagccgtacgtgctgatgctgagacccgtctggctgaggtgcagcgagaagcacagagcactgcccgggagctggaggtgatgactgccaagtatgagggtgccaaggtcaaggtcctggaggagaggcagcggttccaggaagagaggcagaaactcactgcccaggtggaagaactgagtaagaaactggctgactctgaccaagccagcaaggtgcagcagcagaagctgaaggctgtccaggctcagggaggcgagagccagcaggaggcccagcgcctccaggcccagctgaatgaactgcaagcccagttgagccagaaggagcaggcagctgagcactataagctgcagatggagaaagccaaaacacattatgatgccaagaagcagcagaaccaagagctgcaggagcagctgcggagcctggagcagctgcagaaggaaaacaaagagctgcgagctgaagctgaacggctgggccatgagctacagcaggctgggctgaagaccaaggaggctgaacagacctgccgccaccttactgcccaggtgcgcagcctggaggcacaggttgcccatgcagaccagcagcttcgagacctgggcaaattccaggtggcaactgatgctttaaagagccgtgagccccaggctaagccccagctggacttgagtattgacagcctggatctgagctgcgaggaggggaccccactcagtatcaccaggtcaggaggcagccttcctccctatgtctgtttatggagtgcctgctgtttatcaggctgtatcctagtgagataaataagatgtgatctaaatttattcttagagaagaataacgaaaaacgggtattataccagatatctatttagggcacagttggaataaaaagcaagtggtcaagaaaggcttcgtggaagctatcgctcctgctgagtcttgaaagcatccataggtgtgtgtgccaggttgacgagaagagcagtgtgaacagaggctgtgaaagagcctgactaagctgagatgtgaggccaggaaggcccattggagaccgactattaagacttgatcctaaaggcattgaggaaaccttggtggctgtaattgaaaggtttaggagaaaaaaaaaggaaccttggaagaatttgaaactgaagagtacatggttaatttgcatcttaaaaagattattctaatagctagtatagaagttaagactggaaaaatgtttttattaaacacttacatttacttattttgtgctagacataaagcactcatgacaattatacctgatttgtcccccaacaaccctctgaggtaggtttattctgtctcctttaacagatgaatctggggcatagaggggcagtcacttgcccaaggttccccagtggtagagctggggtttgaccctgggcagcctggcctgagttcttggcttgtcaccactcatcttcctctgtcagtgccatgatgagtctaggtgagaggagatgaagcagaccagggaaaggacatgagcatggagtggggtgtggttaggagctgttcaggaagcttggtgattgggctcgccaagcaggacgacattggattatgcccacgttcatggcttgggggcctgagtggggggcgttcctattcactgaaatgggagatgcaggaggaagaacagagaagtgggcttagattgggacgtgtttgctgtgaagcagccatgggcatctggtggggatgggacatctgggtctgggcattgccactatgaggagctattaggagaagccaggggagtggactgaaaggaaggcccaggtcaagtgctttccttggtacctctgaaaaatcagagagatgggctgcttgacctcatctgcttgtagtaaggatgggaaatggtcactttcaaaaagggctggacaaaatgccttctagcgtgaaggactgtacctcagcaggtttcctttccatagcaagctgcctcgtacccagccagacggcaccagcgtccctggagaaccagcctcacctatctcccagcgcctgccccccaaggtagaatccctggagagtctctacttcactcccatccctgctcggagtcaggcccccctggagagcagcctggactccctgggagacgtcttcctggactcgggtcgtaagacccgctccgctcgtcggcgcaccacgcagatcatcaacatcaccatgaccaagaagctagatgtggaagagccagacagcgccaactcatcgttctacagcacgcggtctgctcctgcttcccaggctagcctgcgagccacctcctctactcagtctctagctcgcctgggttctcccgattatggcaactcagccctgctcagcttgcctggctaccgccccaccactcgcagttctgctcgtcgttcccaggccggggtgtccagtggggcccctccaggaaggaacagcttctacatgggcacttgccaggatgagcctgagcagctggatgactggaaccgcattgcagagctgcagcagc

SEQ ID NO: 160608 - DNA, 7012 bp, Homo sapiens
  Payload ID: 11387
  Gene Symbol: NUMA1
  Gene Name: nuclear mitotic apparatus protein 1
  Uniprot ID: Q14980
  ENST ID: ENST00000620566
  CDS Start-End: 45-6350
cttgggttccaggcgcattggagtgactgtctggcatcaccaagatgacactccacgccacccggggggctgcactcctctcttgggtgaacagtctacacgtggctgaccctgtggaggctgtgctgcagctccaggactgcagcatcttcatcaagatcattgacagaatccatggcactgaagagggacagcaaatcttgaagcagccggtgtcagagagactggactttgtgtgcagttttctgcagaaaaatcgaaaacatccctcttccccagaatgcctggtatctgcacagaaggtgctagagggatcagagctggaactggcgaagatgaccatgctgctcttataccactctaccatgagctccaaaagtcccagggactgggaacagtttgaatataaaattcaggctgagttggctgtcattcttaaatttgtgctggaccatgaggacgggctaaaccttaatgaggacctagagaacttcctacagaaagctcctgtgccttctacctgttctagcacattccctgaagagctctccccacctagccaccaggccaagagggagattcgcttcctagagctacagaaggttgcctcctcttccagtgggaacaactttctctcaggttctccagcttctcccatgggtgatatcctgcagaccccacagttccagatgagacggctgaagaagcagcttgctgatgagagaagtaatagggatgagctggagctggagctagctgagaaccgcaagctcctcaccgagaaggatgcacagatagccatgatgcagcagcgcattgaccgcctagccctgctgaatgagaagcaggcggccagcccactggagcccaaggagcttgaggagctgcgtgacaagaatgagagccttaccatgcggctgcatgaaaccctgaagcagtgccaggacctgaagacagagaagagccagatggatcgcaaaatcaaccagctttcggaggagaatggagacctttcctttaagctgcgggagtttgccagtcatctgcagcagctacaggatgccctcaatgagctgacggaggagcacagcaaggccactcaggagtggctagagaagcaggcccagctggagaaggagctcagcgcagccctgcaggacaagaaatgccttgaagagaagaacgaaatccttcagggaaaactttcacagctggaagaacacttgtcccagctgcaggataacccaccccaggagaagggcgaggtgctgggtgatgtcttgcagctggaaaccttgaagcaagaggcagccactcttgctgcaaacaacacacagctccaagccagggtagagatgctggagactgagcgaggccagcaggaagccaagctgcttgctgagcggggccacttcgaagaagaaaagcagcagctgtctagcctgatcactgacctgcagagctccatctccaacctcagccaggccaaggaagagctggagcaggcctcccaggctcatggggcccggttgactgcccaggtggcctctctgacctctgagctcaccacactcaatgccaccatccagcaacaggatcaagaactggctggcctgaagcagcaggccaaagagaagcaggcccagctagcacagaccctccaacagcaagaacaggcctcccagggcctccgccaccaggtggagcagctaagcagtagcctgaagcagaaggagcagcagttgaaggaggtagcggagaagcaggaggcaactaggcaggaccatgcccagcaactggccactgctgcagaggagcgagaggcctccttaagggagcgggatgcggctctcaagcagctggaggcactggagaaggagaaggctgccaagctggagattctgcagcagcaacttcaggtggctaatgaagcccgggacagtgcccagacctcagtgacacaggcccagcgggagaaggcagagctgagccggaaggtggaggaactccaggcctgtgttgagacagcccgccaggaacagcatgaggcccaggcccaggttgcagagctagagttgcagctgcggtctgagcagcaaaaagcaactgagaaagaaagggtggcccaggagaaggaccagctccaggagcagctccaggccctcaaagagtccttgaaggtcaccaagggcagccttgaagaggagaagcgcagggctgcagatgccctggaagagcagcagcgttgtatctctgagctgaaggcagagacccgaagcctggtggagcagcataagcgggaacgaaaggagctggaagaagagagggctgggcgcaaggggctggaggctcgattacagcagcttggggaggcccatcaggctgagactgaagtcctgcggcgggagctggcagaggccatggctgcccagcacacagctgagagtgagtgtgagcagctcgtcaaagaagtagctgcctggcgtgagcggtatgaggatagccagcaagaggaggcacagtatggcgccatgttccaggaacagctgatgactttgaaggaggaatgtgagaaggcccgccaggagctgcaggaggcaaaggagaaggtggcaggcatagaatcccacagcgagctccagataagccggcagcagaacgaactagctgagctccatgccaacctggccagagcactccagcaggtccaagagaaggaagtcagggcccagaagcttgcagatgacctctccactctgcaggaaaagatggctgccaccagcaaagaggtggcccgcttggagaccttggtgcgcaaggcaggtgagcagcaggaaacagcctcccgggagttagtcaaggagcctgcgagggcaggagacagacagcccgagtggctggaagagcaacagggacgccagttctgcagcacacaggcagcgctgcaggctatggagcgggaggcagagcagatgggcaatgagctggaacggctgcgggccgcgctgatggagagccaggggcagcagcaggaggagcgtgggcagcaggaaagggaggtggcgcggctgacccaggagcggggccgtgcccaggctgaccttgccctggagaaggcggccagagcagagcttgagatgcggctgcagaacgccctcaacgagcagcgtgtggagttcgctaccctgcaagaggcactggctcatgccctgacggaaaaggaaggcaaggaccaggagttggccaagcttcgtggtctggaggcagcccagataaaagagctggaggaacttcggcaaaccgtgaagcaactgaaggaacagctggctaagaaagaaaaggagcacgcatctggctcaggagcccaatctgaggctgctggcaggacagagccaacaggccccaagctggaggcactgcgggcagaggtgagcaagctggaacagcaatgccagaagcagcaggagcaggctgacagcctggaacgcagcctcgaggctgagcgggcctcccgggctgagcgggacagtgctctggagactctgcagggccagttagaggagaaggcccaggagctagggcacagtcagagtgccttagcctcggcccaacgggagttggctgccttccgcaccaaggtacaagaccacagcaaggctgaagatgagtggaaggcccaggtggcccggggccggcaagaggctgagaggaaaaatagcctcatcagcagcttggaggaggaggtgtccatcctgaatcgccaggtcctggagaaggagggggagagcaaggagttgaagcggctggtgatggccgagtcagagaagagccagaagctggaggagaggctgcgcctgctgcaggcagagacagccagcaacagtgccagagctgcagaacgcagctctgctctgcgggaggaggtgcagagcctccgggaggaggctgagaaacagcgggtggcttcagagaacctgcggcaggagctgacctcacaggctgagcgtgcggaggagctgggccaagaattgaaggcgtggcaggagaagttcttccagaaagagcaggccctctccaccctgcagctcgagcacaccagcacacaggccctggtgagtgagctgctgccagctaagcacctctgccagcagctgcaggccgagcaggccgctgccgagaaacgccaccgtgaggagctggagcagagcaagcaggccgctgggggactgcgggcagagctgctgcgggcccagcgggagcttggggagctgattcctctgcggcagaaggtggcagagcaggagcgaacagctcagcagctgcgggcagagaaggccagctatgcagagcagctgagcatgctgaagaaggcgcatggcctgctggcagaggagaaccgggggctgggtgagcgggccaaccttggccggcagtttctggaagtggagttggaccaggcccgggagaagtatgtccaagagttggcagccgtacgtgctgatgctgagacccgtctggctgaggtgcagcgagaagcacagagcactgcccgggagctggaggtgatgactgccaagtatgagggtgccaaggtcaaggtcctggaggagaggcagcggttccaggaagagaggcagaaactcactgcccaggtggaagaactgagtaagaaactggctgactctgaccaagccagcaaggtgcagcagcagaagctgaaggctgtccaggctcagggaggcgagagccagcaggaggcccagcgcctccaggcccagctgaatgaactgcaagcccagttgagccagaaggagcaggcagctgagcactataagctgcagatggagaaagccaaaacacattatgatgccaagaagcagcagaaccaagagctgcaggagcagctgcggagcctggagcagctgcagaaggaaaacaaagagctgcgagctgaagctgaacggctgggccatgagctacagcaggctgggctgaagaccaaggaggctgaacagacctgccgccaccttactgcccaggtgcgcagcctggaggcacaggttgcccatgcagaccagcagcttcgagacctgggcaaattccaggtggcaactgatgctttaaagagccgtgagccccaggctaagccccagctggacttgagtattgacagcctggatctgagctgcgaggaggggaccccactcagtatcaccagcaagctgcctcgtacccagccagacggcaccagcgtccctggagaaccagcctcacctatctcccagcgcctgccccccaaggtagaatccctggagagtctctacttcactcccatccctgctcggagtcaggcccccctggagagcagcctggactccctgggagacgtcttcctggactcgggtcgtaagacccgctccgctcgtcggcgcaccacgcagatcatcaacatcaccatgaccaagaagctagatgtggaagagccagacagcgccaactcatcgttctacagcacgcggtctgctcctgcttcccaggctagcctgcgagccacctcctctactcagtctctagctcgcctgggttctcccgattatggcaactcagccctgctcagcttgcctggctaccgccccaccactcgcagttctgctcgtcgttcccaggccggggtgtccagtggggcccctccaggaaggaacagcttctacatgggcacttgccaggatgagcctgagcagctggatgactggaaccgcattgcagagctgcagcagcgcaatcgagtgtgccccccacatctgaagacctgctatcccctggagtccaggccttccctgagcctgggcaccatcacagatgaggagatgaaaactggagacccccaagagaccctgcgccgagccagcatgcagccaatccagatagccgagggcactggcatcaccacccggcagcagcgcaaacgggtctccctagagccccaccagggccctggaactcctgagtctaagaaggccaccagctgtttcccacgccccatgactccccgagaccgacatgaagggcgcaaacagagcactactgaggcccagaagaaagcagctccagcttctactaaacaggctgaccggcgccagtcgatggccttcagcatcctcaacacacccaagaagctagggaacagccttctgcggcggggagcctcaaagaaggccctgtccaaggcttcccccaacactcgcagtggaacccgccgttctccgcgcattgccaccaccacagccagcgccgccactgctgccgccattggtgccacccctcgagccaagggcaaggcaaagcactaaagggccagtaccagtgagtggccccacctgtgtccccgatgctgacctcacctggtcctccgcctactgtccctctcagtgccttctctcagctcccaggccaacagtagccaaacccctagagacagtgatgcctgcccgcaccctggcctggtccctggtccttcactggcgccttctcggagctggcccagggggcctggagcatggacagtgtgggcgctctccctaccttgcctccttttttcttaaagcaaagtcacttctccatcacaaccagatttgaggctggttttgatggctgggtccttgggcctggccagtcttcctcttagcctctggatctagaagggaccataagaggagtaggccctggttcctgctgtcctggtggctgggcccagcaggggccctcactcttgaagtccaggactgggtctgacctggtgggagcacctgccagaggatgctctttcccaggacggatgggccctatgtctcaggagtggggttgggggacagccttcagcagcagctcacaccctaccttccccagacttgcactggggtgggatttggagtgatgggaaggtttttaagggccggggatggatcttttctaaatgttattacttgtaaataaagtctatttttctcccgtg

SEQ ID NO: 160609 - DNA, 3940 bp, Homo sapiens
  Payload ID: 11387
  Gene Symbol: NUMA1
  Gene Name: nuclear mitotic apparatus protein 1
  Uniprot ID: Q14980
  ENST ID: ENST00000613205
  CDS Start-End: 339-3278
gccttcaagtacaggccggggtccggaagcggtgataccccttctctttcccagtggccctcaaacttccttttcccgggtccttaagcgggccccgccgacagaggccaatcagagggcagcgcgagggggcggggccatagtttaaactaattgtgcgctcacagcgctggcgcgagcccacgaagaggtacgattccggagaatcgcgaggcagagcgggagcgcgcagccaggtggaaactaattctaagccagactgctggagatcaccctgttctagtgtgtggaggcttccaccaggaggcgcattggagtgactgtctggcatcaccaagatgacactccacgccacccggggggctgcactcctctcttgggtgaacagtctacacgtggctgaccctgtggaggctgtgctgcagctccaggactgcagcatcttcatcaagatcattgacagaatccatggcactgaagagggacagcaaatcttgaagcagccggtgtcagagagactggactttgtgtgcagttttctgcagaaaaatcgaaaacatccctcttccccagaatgcctggtatctgcacagaaggtgctagagggatcagagctggaactggcgaagatgaccatgctgctcttataccactctaccatgagctccaaaagtcccagggactgggaacagtttgaatataaaattcaggctgagttggctgtcattcttaaatttgtgctggaccatgaggacgggctaaaccttaatgaggacctagagaacttcctacagaaagctcctgtgccttctacctgttctagcacattccctgaagagctctccccacctagccaccaggccaagagggagattcgcttcctagagctacagaaggttgcctcctcttccagtgggaacaactttctctcaggttctccagcttctcccatgggtgatatcctgcagaccccacagttccagatgagacggctgaagaagcagcttgctgatgagagaagtaatagggatgagctggagctggagctagctgagaaccgcaagctcctcaccgagaaggatgcacagatagccatgatgcagcagcgcattgaccgcctagccctgctgaatgagaagcaggcggccagcccactggagcccaaggagcttgaggagctgcgtgacaagaatgagagccttaccatgcggctgcatgaaaccctgaagcagtgccaggacctgaagacagagaagagccagatggatcgcaaaatcaaccagctttcggaggagaatggagacctttcctttaagctgcgggagtttgccagtcatctgcagcagctacaggatgccctcaatgagctgacggaggagcacagcaaggccactcaggagtggctagagaagcaggcccagctggagaaggagctcagcgcagccctgcaggacaagaaatgccttgaagagaagaacgaaatccttcagggaaaactttcacagctggaagaacacttgtcccagctgcaggataacccaccccaggagaagggcgaggtgctgggtgatgtcttgcaggtggaagaactgagtaagaaactggctgactctgaccaagccagcaaggtgcagcagcagaagctgaaggctgtccaggctcagggaggcgagagccagcaggaggcccagcgcctccaggcccagctgaatgaactgcaagcccagttgagccagaaggagcaggcagctgagcactataagctgcagatggagaaagccaaaacacattatgatgccaagaagcagcagaaccaagagctgcaggagcagctgcggagcctggagcagctgcagaaggaaaacaaagagctgcgagctgaagctgaacggctgggccatgagctacagcaggctgggctgaagaccaaggaggctgaacagacctgccgccaccttactgcccaggtgcgcagcctggaggcacaggttgcccatgcagaccagcagcttcgagacctgggcaaattccaggtggcaactgatgctttaaagagccgtgagccccaggctaagccccagctggacttgagtattgacagcctggatctgagctgcgaggaggggaccccactcagtatcaccagcaagctgcctcgtacccagccagacggcaccagcgtccctggagaaccagcctcacctatctcccagcgcctgccccccaaggtagaatccctggagagtctctacttcactcccatccctgctcggagtcaggcccccctggagagcagcctggactccctgggagacgtcttcctggactcgggtcgtaagacccgctccgctcgtcggcgcaccacgcagatcatcaacatcaccatgaccaagaagctagatgtggaagagccagacagcgccaactcatcgttctacagcacgcggtctgctcctgcttcccaggctagcctgcgagccacctcctctactcagtctctagctcgcctgggttctcccgattatggcaactcagccctgctcagcttgcctggctaccgccccaccactcgcagttctgctcgtcgttcccaggccggggtgtccagtggggcccctccaggaaggaacagcttctacatgggcacttgccaggatgagcctgagcagctggatgactggaaccgcattgcagagctgcagcagcgcaatcgagtgtgccccccacatctgaagacctgctatcccctggagtccaggccttccctgagcctgggcaccatcacagatgaggagatgaaaactggagacccccaagagaccctgcgccgagccagcatgcagccaatccagatagccgagggcactggcatcaccacccggcagcagcgcaaacgggtctccctagagccccaccagggccctggaactcctgagtctaagaaggccaccagctgtttcccacgccccatgactccccgagaccgacatgaagggcgcaaacagagcactactgaggcccagaagaaagcagctccagcttctactaaacaggctgaccggcgccagtcgatggccttcagcatcctcaacacacccaagaagctagggaacagccttctgcggcggggagcctcaaagaaggccctgtccaaggcttcccccaacactcgcagtggaacccgccgttctccgcgcattgccaccaccacagccagcgccgccactgctgccgccattggtgccacccctcgagccaagggcaaggcaaagcactaaagggccagtaccagtgagtggccccacctgtgtccccgatgctgacctcacctggtcctccgcctactgtccctctcagtgccttctctcagctcccaggccaacagtagccaaacccctagagacagtgatgcctgcccgcaccctggcctggtccctggtccttcactggcgccttctcggagctggcccagggggcctggagcatggacagtgtgggcgctctccctaccttgcctccttttttcttaaagcaaagtcacttctccatcacaaccagatttgaggctggttttgatggctgggtccttgggcctggccagtcttcctcttagcctctggatctagaagggaccataagaggagtaggccctggttcctgctgtcctggtggctgggcccagcaggggccctcactcttgaagtccaggactgggtctgacctggtgggagcacctgccagaggatgctctttcccaggacggatgggccctatgtctcaggagtggggttgggggacagccttcagcagcagctcacaccctaccttccccagacttgcactggggtgggatttggagtgatgggaaggtttttaagggccggggatggatcttttctaaatgttattacttgtaaataaagtctatttttctcccgtg

SEQ ID NO: 160610 - DNA, 6998 bp, Homo sapiens
  Payload ID: 11387
  Gene Symbol: NUMA1
  Gene Name: nuclear mitotic apparatus protein 1
  ENST ID: ENST00000616538
  CDS Start-End: 45-6344
cttgggttccaggcgcattggagtgactgtctggcatcaccaagatgacactccacgccacccggggggctgcactcctctcttgggtgaacagtctacacgtggctgaccctgtggaggctgtgctgcagctccaggactgcagcatcttcatcaagatcattgacagaatccatggcactgaagagggacagcaaatcttgaagcagccggtgtcagagagactggactttgtgtgcagttttctgcagaaaaatcgaaaacatccctcttccccagaatgcctggtatctgcacagaaggtgctagagggatcagagctggaactggcgaagatgaccatgctgctcttataccactctaccatgagctccaaaagtcccagggactgggaacagtttgaatataaaattcaggctgagttggctgtcattcttaaatttgtgctggaccatgaggacgggctaaaccttaatgaggacctagagaacttcctacagaaagctcctgtgccttctacctgttctagcacattccctgaagagctctccccacctagccaccaggccaagagggagattcgcttcctagagctacagaaggttgcctcctcttccagtgggaacaactttctctcaggttctccagcttctcccatgggtgatatcctgcagaccccacagttccagatgagacggctgaagaagcagcttgctgatgagagaagtaatagggatgagctggagctggagctagctgagaaccgcaagctcctcaccgagaaggatgcacagatagccatgatgcagcagcgcattgaccgcctagccctgctgaatgagaagcaggcggccagcccactggagcccaaggagcttgaggagctgcgtgacaagaatgagagccttaccatgcggctgcatgaaaccctgaagcagtgccaggacctgaagacagagaagagccagatggatcgcaaaatcaaccagctttcggaggagaatggagacctttcctttaagctgcgggagtttgccagtcatctgcagcagctacaggatgccctcaatgagctgacggaggagcacagcaaggccactcaggagtggctagagaagcaggcccagctggagaaggagctcagcgcagccctgcaggacaagaaatgccttgaagagaagaacgaaatccttcagggaaaactttcacagctggaagaacacttgtcccagctgcaggataacccaccccaggagaagggcgaggtgctgggtgatgtcttgcagctggaaaccttgaagcaagaggcagccactcttgctgcaaacaacacacagctccaagccagggtagagatgctggagactgagcgaggccagcaggaagccaagctgcttgctgagcggggccacttcgaagaagaaaagcagcagctgtctagcctgatcactgacctgcagagctccatctccaacctcagccaggccaaggaagagctggagcaggcctcccaggctcatggggcccggttgactgcccaggtggcctctctgacctctgagctcaccacactcaatgccaccatccagcaacaggatcaagaactggctggcctgaagcagcaggccaaagagaagcaggcccagctagcacagaccctccaacagcaagaacaggcctcccagggcctccgccaccaggtggagcagctaagcagtagcctgaagcagaaggagcagcagttgaaggaggtagcggagaagcaggaggcaactaggcaggaccatgcccagcaactggccactgctgcagaggagcgagaggcctccttaagggagcgggatgcggctctcaagcagctggaggcactggagaaggagaaggctgccaagctggagattctgcagcagcaacttcaggtggctaatgaagcccgggacagtgcccagacctcagtgacacaggcccagcgggagaaggcagagctgagccggaaggtggaggaactccaggcctgtgttgagacagcccgccaggaacagcatgaggcccaggcccaggttgcagagctagagttgcagctgcggtctgagcagcaaaaagcaactgagaaagaaagggtggcccaggagaaggaccagctccaggagcagctccaggccctcaaagagtccttgaaggtcaccaagggcagccttgaagaggagaagcgcagggctgcagatgccctggaagagcagcagcgttgtatctctgagctgaaggcagagacccgaagcctggtggagcagcataagcgggaacgaaaggagctggaagaagagagggctgggcgcaaggggctggaggctcgattacagcagcttggggaggcccatcaggctgagactgaagtcctgcggcgggagctggcagaggccatggctgcccagcacacagctgagagtgagtgtgagcagctcgtcaaagaagtagctgcctggcgtgagcggtatgaggatagccagcaagaggaggcacagtatggcgccatgttccaggaacagctgatgactttgaaggaggaatgtgagaaggcccgccaggagctgcaggaggcaaaggagaaggtggcaggcatagaatcccacagcgagctccagataagccggcagcagaacgaactagctgagctccatgccaacctggccagagcactccagcaggtccaagagaaggaagtcagggcccagaagcttgcagatgacctctccactctgcaggaaaagatggctgccaccagcaaagaggtggcccgcttggagaccttggtgcgcaaggcaggtgagcagcaggaaacagcctcccgggagttagtcaaggagcctgcgagggcaggagacagacagcccgagtggctggaagagcaacagggacgccagttctgcagcacacaggcagcgctgcaggctatggagcgggaggcagagcagatgggcaatgagctggaacggctgcgggccgcgctgatggagagccaggggcagcagcaggaggagcgtgggcagcaggaaagggaggtggcgcggctgacccaggagcggggccgtgcccaggctgaccttgccctggagaaggcggccagagcagagcttgagatgcggctgcagaacgccctcaacgagcagcgtgtggagttcgctaccctgcaagaggcactggctcatgccctgacggaaaaggaaggcaaggaccaggagttggccaagcttcgtggtctggaggcagcccagataaaagagctggaggaacttcggcaaaccgtgaagcaactgaaggaacagctggctaagaaagaaaaggagcacgcatctggctcaggagcccaatctgaggctgctggcaggacagagccaacaggccccaagctggaggcactgcgggcagaggtgagcaagctggaacagcaatgccagaagcagcaggagcaggctgacagcctggaacgcagcctcgaggctgagcgggcctcccgggctgagcgggacagtgctctggagactctgcagggccagttagaggagaaggcccaggagctagggcacagtcagagtgccttagcctcggcccaacgggagttggctgccttccgcaccaaggtacaagaccacagcaaggctgaagatgagtggaaggcccaggtggcccggggccggcaagaggctgagaggaaaaatagcctcatcagcagcttggaggaggaggtgtccatcctgaatcgccaggtcctggagaaggagggggagagcaaggagttgaagcggctggtgatggccgagtcagagaagagccagaagctggaggagggctgcgcctgctgcaggcagagacagccagcaacagtgccagagctgcagaacgcagctctgctctgcgggaggaggtgcagagcctccgggagggagaaacagcgggtggcttcagagaacctgcggcaggagctgacctcacaggctgagcgtgcggaggagctgggccaagaattgaaggcgtggcaggagaagttcttccagaaagagcaggccctctccaccctgcagctcgagcacaccagcacacaggccctggtgagtgagctgctgccagctaagcacctctgccagcagctgcaggccgagcaggccgctgccgagaaacgccaccgtgaggagctggagcagagcaagcaggccgctgggggactgcgggcagagctgctgcgggcccagcgggagcttggggagctgattcctctgcggcagaaggtggcagagcaggagcgaacagctcagcagctgcgggcagagaaggccagctatgcagagcagctgagcatgctgaagaaggcgcatggcctgctggcagaggagaaccgggggctgggtgagcgggccaaccttggccggcagtttctggaagtggagttggaccaggcccgggagaagtatgtccaagagttggcagccgtacgtgctgatgctgagacccgtctggctgaggtgcagcgagaagcacagagcactgcccgggagctggaggtgatgactgccaagtatgagggtgccaaggtcaaggtcctggaggagaggcagcggttccaggaagagaggcagaaactcactgcccaggtggaagaactgagtaagaaactggctgactctgaccaagccagcaaggtgcagcagcagaagctgaaggctgtccaggctcagggaggcgagagccagcaggaggcccagcgcctccaggcccagctgaatgaactgcaagcccagttgagccagaaggagcaggcagctgagcactataagctgcagatggagaaagccaaaacacattatgatgccaagaagcagcagaaccaagagctgcaggagcagctgcggagcctggagcagctgcagaaggaaaacaaagagctgcgagctgaagctgaacggctgggccatgagctacagcaggctgggctgaagaccaaggaggctgaacagacctgccgccaccttactgcccaggtgcgcagcctggaggcacaggttgcccatgcagaccagcagcttcgagacctgggcaaattccaggtggcaactgatgctttaaagagccgtgagccccaggctaagccccagctggacttgagtattgacagcctggatctgagctgcgaggaggggaccccactcagtatcaccagcaagctgcctcgtacccagccagacggcaccagcgtccctggagaaccagcctcacctatctcccagcgcctgccccccaaggtagaatccctggagagtctctacttcactcccatccctgctcggagtcaggcccccctggagagcagcctggactccctgggagacgtcttcctggactcgggtcgtaagacccgctccgctcgtcggcgcaccacgcagatcatcaacatcaccatgaccaagaagctagatgtggaagagccagacagcgccaactcatcgttctacagcacgcggtctgctcctgcttcccaggctagcctgcgagccacctcctctactcagtctctagctcgcctgggttctcccgattatggcaactcagccctgctcagcttgcctggctaccgccccaccactcgcagttctgctcgtcgttcccaggccggggtgtccagtggggcccctccaggaaggaacagcttctacatgggcacttgccaggatgagcctgagcagctggatgactggaaccgcattgcagagctgcagcagcgcaatcgagtgtgccccccacatctgaagacctgctatcccctggagtccaggccttccctgagcctgggcaccatcacagatgaggagatgaaaactggagacccccaagagaccctgcgccgagccagcatgcagccaatccagatagccgagggcactggcatcaccacccggcagcagcgcaaacgggtctccctagagccccaccagggccctggaactcctgagtctaagaaggccaccagctgtttcccacgccccatgactccccgagaccgacatgaagggcgcaaacagagcactactgaggcccagaagaaagcagctccagcttctactaaacaggctgaccggcgccagtcgatggccttcagcatcctcaacacacccaagaagctagggaacagccttctgcggcggggagcctcaaagaaggccctgtccaaggcttcccccaacactcgcagtggaacccgccgttctccgcgcattgccaccaccacagccagcgccgccactgctgccgccattggtgccacccctcgagccaagggcaaggcaaagcactaaagggccagtaccagtgagtggccccacctgtgtccccgatgctgacctcacctggtcctccgcctactgtccctctcagtgccttctctcagctcccaggccaacagtagccaaacccctagagacagtgatgcctgcccgcaccctggcctggtccctggtccttcactggcgccttctcggagctggcccagggggcctggagcatggacagtgtgggcgctctccctaccttgcctccttttttcttaaagcaaagtcacttctccatcacaaccagatttgaggctggttttgatggctgggtccttgggcctggccagtcttcctcttagcctctggatctagaagggaccataagaggagtaggccctggttcctgctgtcctggtggctgggcccagcaggggccctcactcttgaagtccaggactgggtctgacctggtgggagcacctgccagaggatgctctttcccaggacggatgggccctatgtctcaggagtggggttgggggacagccttcagcagcagctcacaccctaccttccccagacttgcactggggtgggatttggagtgatgggaaggtttttaagggccggggatggatcttttctaaatgttattacttgtaaataaagtctattttt

SEQ ID NO: 160611 - DNA, 7526 bp, Homo sapiens
  Payload ID: 11388
  Gene Symbol: NPAP1
  Gene Name: nuclear pore associated protein 1
  Uniprot ID: Q9NZP6
  ENST ID: ENST00000329468
  CDS Start-End: 1-3471
atgggcaatttacttagtaaatttagacccgggtgccgccgccggcccctgccagggccagggcgtggcgcccccgctcccctgtcccgggacgcctccccgcccggtcgggctcactctgtacccaccccgcgccctttccgcggcctgttccgccggaacgcccgtcgcaggccttcagcagccagcatcttcgtcgcccctaagaggccgtgtcctctccctcgggctgcggccgcccctctgggggtcctgccggctgtgggttgggggctggccatcaggaagacacccatgctgcctgctcggaaccccccgaggtttggacaccccagttccgtaaggatccctcctcccagccgcatgttcactctcctgctgccttcaccacgtgagccggcggtcaaggccaggaagcccatcccagccactctcctggaggagaccgaggtgtgggcccaagaagggcccagaagagtgaagaaggatgaggatccggtgcagatcgaaggggaggatgacgagaaaaggaccccccttagcagcggagaagcatcgtccacatccaggtcccagggcacccagggagacgtggcctccttcagatgcagccctgggcctctggagggaaatgtctaccacaagttctcagaaaacagcatgagtgagaaggcccaggcgtctccagcgagctcctgcttggaaggccctgccatgcccagcacacacagccaggccggatgtgcccggcatcttggaaagcctgatccggatgcaacagcgccccctgagccagccgttggctgctccctgctgcagcagaagttggctgcggaagtgctgaatgaagagccaccgcccagctccctaggcttgccgattccgctgatgtccggaaagaggatgcctgatgagaagcctttctgtattcctccaaggagcgctgctcctcccagagctgcccgcaacaggccctgcaaaaggaaaatgtcgattccattgctgctgccgctgcccccttcactgccattgctgtgggatcgaggtgagcttcccccacctgctaagctcccctgcctgtctgttgagggagacctacacaccttggagaagagccctgagtataaaaggaatagcagaatcttggaggataaaacagagaccatgacaaacagcagcatcacccagcctgccccttctttctcccaacctgtgcagaccacagactccctgcccctgaccacttacacttcccaggtctcagctcctttgcccatccctgacttggctgacctggctactggacccctcatcctgcctatccctccactttccaccacaccaaaaatggatgagaaaatagcattcacaatccctaactctcctctggctcttcctgctgaccttgttcccattttgggtgatcagtctaatgagaaaggaggctcttataattcagtcgtaggagcagcgcctctcacttctgaccccccaacacctcctagctccacaccctccttcaagcctcccgtcacaagggagtccccaatatctatgtgtgtggattcccctcctcctctttccttcctgactcttcttccagtcccttccaccgggacctcagttatcaccagcaagcctatgaattccacgtcagtcatttccactgtcacaacaaacgcatctgcccacctaacctcacagactgcggtagaccctgaagtagttaatatggatactactgccccatctcaggttgttattttcacatcttccctaagctccagagtgagctctctcccaaattcccaaatacattgcagtgcagagcagaggcacccgggaaagacatcagtctacacatccccacttccatttatattccacaataccaccccaagttttaaccaactctttggaaaagaagccacccctcagcccaaatttgaggctcctgatgggcagccgcagaaagcttctctccccagtgcctgtgttttcctgagccttcccatcattcctcctccagacacctccactttagtgaacagtgcctctacagcatcatcatccaaacctcccattgaaaccaatgctatgcataccactcctccttccaaggctgtcatcttgcagtctgcctctgtctccaagaagtacctcccattttacctggggcttcctggttctgggaacacacaacccagcggcaacactgcctcagtccaaggctccaccagtttgcctgcacagtcagtcagggcaccagctacagcttccaaccatcctttaaatccaggagccacccctcaacccaaatttggggcccctgatgggccgcagcagaaaacctctctccccagtgcccatgatttcctgagccttcctatcatggttcctccagacacctccactttagtgagcagtgcctctgcagcatcgttatccaagcctgccattgacaccagtgacatgaataccacccctccttccaaaactgtcatcttgcagtctacctttgtctccaggaaggaggagtacatccgattttatatggggcttcctggttctgggaacacactacacagtgacagcattgcctcagcccaagtctccaccagttttcctgcacaggcagataggagaccaaccacaacttccagccatcctttaaatacaggatccatctctcattccacacttggggccactgatgggcagcagaagtctgacagttcttttattctggggaatccagcaaccccagcaccagttataggcttaacatctccttcagtccagccactgagtggcagcataattccaccaggttttgcagagttaacatcaccatatactgcattgggcacacctgttaatgctgagccagtcgagggtcacaatgcaagtgctttccccaatggcacagcaaagacttctggatttagaattgccactgggatgcctggcactggagacagtaccttactggttggaaatactattccaggcccacaagtgattatgggacctggaacccctatggatggtgggagcattgggttcagcatgtctgccccaggccccagttccacatcaggagaactcaacattggacaaggacagagtgggacacccagcaccacttctgttttcccatttggtcaggcagcctgggacccaactggccacagcatggctgctgcaccacaaggggctagcaacattcctgtatttggatatacttctgctgccgcctacattcctggtttagacccacctacccagaattcatgcagtggtatgggaggggatggcaccagatccatagttggaggcccttgtgttcctgcttttcaacagtgcatcctgcagcacacatggacagagagaaaattctacacttcaagcacccactactatggacaagaaacatatgttaggagacatgtctgtttccaacttccgtaagagcacctgtggttcacctgatcacaccacatcagttgtggttgtaaataccagcattatccttttgtatggtcatgcttctagtttcatcttcatgccaagcacctgccatgtacctctccagaactcaggttgtgcaccaggaggggacaacaacatccctgtgctccctttctctgtcagtacacatgggtcccacctggacaaaacacaggtggtgcatctgcagtgaatggcaacatatctttaattagaggcccttgtgtatccacctaccaacaaagtacctagggcccacctggacaaaacacagatggtacctcttccaggagtgtcaacattcatttgatagaaggccctcatgtgcccatgtatcagcaaagcacctggggcccacctggacaaagcacaaaccatgcaatgagggacagcaacacaacggctgtgactggttgtacttttggtcccccatttacacaaagcacctgaggcccacctggctaaatgcaggtggtgcaataggagatagccccagatatttgtagggagaaacctctagtctccctttcagtaaaaatactatggacctgcccaaccaaggtgctccttttgactttagaggaaccagcattgtttttgttttggtttgtttgtttgtttgtttgtttgtttgtttgtttttgagacggagccttagcccaggctggagtgtagtagcacaatctcggctcactgcaacctccacctcctgggttcaagcaattctcctgtcttagcctcctgagtagctgggactacaggcatatgccaccacacctggctattttttataattttagcagagacagagttccaccttattggccaggctggtctcaaactcctgacctcaggtgatccacccacctcggcctcccaaagtgctaggatgacaggtgtgagccaccatgcccagcctagaggagccagcattgttagttaaatacttgtgtttggatggtcctggtcagagcacctgtgcctgtgatggaaagcagccactagtgacacttgtacctgccaaggccttcataggagccaccaactcattttttactcctatcaatggtcttaagaaataagcactctccctgcacatacagttctcataaattgacattgttccaggaggaatgggctcagttccctcaaggttaaacttaacctgctctcttcctacagaagctggaggcccaaaaccacagacagagagagagagagtgtgtgtgtttgtgtgtgtgtgtgtgtgtttattggtgagtgtggagcagatgagcccagtcagaaccgcactgtattttagtggtcttctgcactgtggagggtagaggaaacctggcttgactgttaacttggctgaccctacctctgggccagttctctctagtcatggacagaaaggcaaaattcccgactttgtggaccctatattctagttgaaggggagaaaagaagcaaaaacatggaaattatctggtaaattagccagtaacgaatgctatgaaaaataaagaagtacatggaggattgagattgtagatagaagcaggtgtttcagtttacactgtgaacaagcctcactgggaaggtaaatttaaacgaagcctagagagaagcagttgagccagatatatgagcaaagacctttccagataataggagtggtcattgcagaggctcaaaggaaggatccctggtgtcctcatggagcagttagtaaggaaatgtggctggaatggagtcagcaagtgggagggagggatagagaagaggacagaggagagatgtgagtggaattccttcctccactttttactaattgtgtaataacagttgactcaaacttcaaaagtctcaatgaaatcagtacttttactatggcctgtttatctcataagatttttgaaaggataaaatgaaataatatggagaaatgacttataagcttttgttgtaatttgttatatacatagggatggatagacggatggatagattagatgatagatagatagatagatagatgataacgttatggactgaatgtttgtgtacccccaaaaattgatattttgaagcctaacttccagtgtgatggtattaggaggtgaggctttggggaggtgattaggtttagatgaagtcatgaaaatgaaacccccatgatgggatttgcgcctttatgagaagaaataccagtgctttctctaattgccatgtgaaggtataccaacaaggtaacagtctgtaagccaggaaaagagtcctcacaagaaacagaatttgtctttatcttggacttcctaacctttagaattgtagaaaataattgaatgttgtttaagctaccagtctgtggcattttttgtagcaatcagaactgactaataaagatagatagatgatagatagatacatagatagatgatagagatagatgatagatagatagatagatagatagataatatacatatatatgtatggtcaatgactgagttccttaggcaatggtgccctgattgcctttattaggcaattcaaatagaagaatagaagaacccccttttttttttgagatggagtcttgctctgtcacccaggctggagtgcagtggcgtgatcttggctcactgcacgctccacctctcggaagaacccctttttattagcataaaagcacttacttttatgaagcaaacacatgtaaaaatatgataacagagactaaaacatttatgagattaggcctgaaagaaaacaatcacagagaaattactgaattcctcttggcaccctggggcctgattcattcgctctaaattgtttagtacagttccagaggatcaaagctcctgtttcctggccagataatcacctaacttttgtaatcagaactgcctttcagaagtagagtggaaatccagttttcttctaatagccctatacccttgcagtattaccagggacaaattttttaaaattcatacttcttgacattttttaaaaggcttcaagctaaatattatgatcctggtaagacaaactttgaataaatgtgtgagagatacaaagataatttttgttttcatgttttgatgcacttacacaactgaaactatttctaaatattcttttattttttattaagataaaaagcaaacataatatcaatttaaataatactgaaagtcaaccttcctaccacagttccctcctccagagatagtgtttagctactttgatgtcactcccatagttctgagtttgcttttttacttcaactattatgttatcttacagatgtcattgtttttcctaaaacttgaagtgccttcctttttttctccttgaactcttttcccataaaaaaaaaatgtttttggtttctagaattttcaaatagtattgtttacttgactgaatcccttccttttccagaaaccttgagcctcctccactggtttgggagtggtaagaccaaagtaaatgtaaaaagtaaagtagaggttcctcttcaaagactttcctccctatctaattagaaataagtagtaacttcttttagaagcaaaatgtattcacagacctgtactaacattcttaaatatctgctagtcataataaagaaatcaatgtactttatgttcttagctcccacaatttagcctaagtatttgccctggcatgcttatactggtccaagcattaggtcatagcctgttcctcttccttatttagaagtgtttttacctttctcagcattccacaagttacttcctcattcctttgttctcctctacctttgcctcttttaaaagttctaaattgctagccaatcgggacaaatacagaatgtgaggtcctgttccagccaatggaaaccggacacagcagtagggtggacgcgtcaggttataaatgaccctgtctcctttgttcggtgtactcttgtggcaaaactgctggcaagtgtaccctttctgcaggaagtaaaaatggccttactaaataaa

SEQ ID NO: 160612 - DNA, 1084 bp, Homo sapiens
  Payload ID: 11389
  Gene Symbol: NPIPA1
  Gene Name: nuclear pore complex interacting protein family, member A1
  Uniprot ID: Q9UND3
  ENST ID: ENST00000328085
  CDS Start-End: 1-1053
atgttttgttgcttaggatatgaatggctgagcggaggctgtaaaacctggcactctgcttgggttatcaatactctggctgaccatcgtcatcgtgggactgactttggtggaagtccttggttacttatcattactgtgtttctgagaagttataaatttgccatctccctctgcacaagttacctttgtgtgtctttcctgaagactatcttcccgtctcaaaatggacatgatggatccacggatgtacagcagagagccaggaggtccaaccgccgtagacaggaaggaattaaaattgtcctggaagacatctttactttatggagacaggtggaaaccaaagttcgagctaaaatccgtaagatgaaggtgacaacaaaagtcaaccgtcatgacaaaatcaatggaaagaggaagaccgccaaagaacatctgaggaaactaagcatgaaagaacgtgagcacggagaaaaggagaggcaggtgtcagaggcagaggaaaatgggaaattggatatgaaagaaatacacacctacatggaaatgtttcaacgtgcgcaagcgttgcggcggcgggcagaggactactacagatgcaaaatcaccccttctgcaagaaagcctctttgcaaccgggtcagaatggcggcagtggagcatcgtcattcttcaggattgccctactggccctacctcacagctgaaactttaaaaaacaggatgggccaccagccacctcctccaactcaacaacattctataattgataactccctgagcctcaagacaccttccgagtgtctgctcactccccttccaccctcagctctaccctcagcggatgataatctcaagacacctgcggagtgtctgctctatccccttccaccctcagcggatgataatctcaagacacctcccgagtgtctgctcactccccttccaccctcagctccaccctcagtggatgataatctcaagacacctcccgagtgtgtctgctcactccccttccaccctcagcggatgataatctcaagaaactaaggaagaataaataaataatataaaaataaaa

SEQ ID NO: 160613 - DNA, 657 bp, Homo sapiens
  Payload ID: 11389
  Gene Symbol: NPIPA1
  Gene Name: nuclear pore complex interacting protein family, member A1
  ENST ID: ENST00000424549
  CDS Start-End: 1-657
atgcgggtgcggtggctgctcttttggctcctcttttggctcctgctgggatttatcagccatcagtccacctgtgtgagtagatgggtgctgtggctgctcttttggctcctgctgggatttatcagccatcagtccacctgtgttatcaatactctggctgaccatcgtcatcgtgggactgactttggtggaagtccttggttacttatcattactgtgtttctgagaagttataaatttgccatctccctctgcacaagttacctttgtgtgtctttcctgaagactatcttcccgtctcaaaatggacatgatggatccacggatgtacagcagagagccaggaggtccaaccgccgtagacaggaaggaattaaaattgtcctggaagacatctttactttatggagacaggtggaaaccaaagttcgagctaaaatccgtaagatgaaggtgacaacaaaagtcaaccgtcatgacaaaatcaatggaaagaggaagaccgccaaagaacatctgaggaaactaagcatgaaagaacgtgagcacggagaaaaggagaggcaggtgtcagaggcagaggaaaatgggaaattggatatgaaagaaatacacacctacatggaaatgtttcaacgtgcgcaagcgttgcgg

SEQ ID NO: 160614 - DNA, 568 bp, Homo sapiens
  Payload ID: 11389
  Gene Symbol: NPIPA1
  Gene Name: nuclear pore complex interacting protein family, member A1
  ENST ID: ENST00000537062
  CDS Start-End: 1-557
aaaccaaagttcgagctaaaatccgtaagatgaaggtgacaacaaaagtcaaccgtcatgacaaaatcaatggaaagaggaagaccgccaaagaacatctgaggaaactaagcatgaaagaacgtgagcacggagaaaaggagaggcaggtgtcagaggcagaggaaaatgggaaattggatatgaaagaaatacacacctacatggaaatgtttcaacgtgcgcaagcgttgcggcggcgggcagaggactactacagatgcaaaatcaccccttctgcaagaaagcctctttgcaaccgggtaagtttgcttgttttccttgcttttggacatagtctgccaggtcaggacatggatacatttttctccctacggctctgtgctcaagccctgcagagggagatggcagagaggaaggctgcctacaagcatcacagtcccatccctgttggtaaccgtgttgcgcaaaaacaccttcatccccacccagtggggcccccatctaatattctaagtgtcagaggttccgtatttgtaatagcaaatgggccctgactgtaaattag

SEQ ID NO: 160615 - DNA, 696 bp, Homo sapiens
  Payload ID: 11389
  Gene Symbol: NPIPA1
  Gene Name: nuclear pore complex interacting protein family, member A1
  ENST ID: ENST00000618714
  CDS Start-End: 1-696
atgttttgttgcttaggatatgaatggctgagcggaggctgtaaaacctggcactctgcttgggttatcaatactctggctgaccatcgtcatcgtgggactgactttggtggaagtccttggttacttatcattactgtgtttctgagaagttataaatttgccatctccctctgcacaagttacctttgtgtgtctttcctgaagactatcttcccgtctcaaaatggacatgatggatccacggatgtacagcagagagccaggaggtccaaccgccgtagacaggaaggaattaaaattgtcctggaagacatctttactttatggagacaggtggaaaccaaagttcgagctaaaatccgtaagatgaaggtgacaacaaaagtcaaccgtcatgacaaaatcaatggaaagaggaagaccgccaaagaacatctgaggaaactaagcatgaaagaacgtgagcacggagaaaaggagaggcaggtgtcagaggcagaggaaaatgggaaattggatatgaaagaaatacacacctacatggaaatgtttcaacgtgcgcaagcgttgcggcggcgggcagaggactactacagatgcaaaatcaccccttctgcaagaaagcctctttgcaaccggtgcacttacaatttggtattacctgggagtgaaaagaaatattacagccatgcc

SEQ ID NO: 160616 - DNA, 1127 bp, Homo sapiens
  Payload ID: 11389
  Gene Symbol: NPIPA1
  Gene Name: nuclear pore complex interacting protein family, member A1
  ENST ID: ENST00000634030
  CDS Start-End: 1-1110
atgttttgttgcttaggatatgaatggctgagcggaggctgtaaaacctggcactctgcttgggttatcaatactctggctgaccatcgtcatcgtgggactgactttggtggaagtccttggttacttatcattactgtgtttctgagaagttataaatttgccatctccctctgcacaagttacctttgtgtgtctttcctgaagactatcttcccgtctcaaaatggacatgatggatccacggatgtacagcagagagccaggaggtccaaccgccgtagacaggaaggaattaaaattgtcctggaagacatctttactttatggagacaggtggaaaccaaagttcgagctaaaatccgtaagatgaaggtgacaacaaaagtcaaccgtcatgacaaaatcaatggaaagaggaagaccgccaaagaacatctgaggaaactaagcatgaaagaacgtgagcacggagaaaaggagaggcaggtgtcagaggcagaggaaaatgggaaattggatatgaaagaaatacacacctacatggaaatgtttcaacgtgcgcaagcgttgcggcggcgggcagaggactactacagatgcaaaatcaccccttctgcaagaaagcctctttgcaaccgggtcagaatggcggcagtggagcatcgtcattcttcaggattgccctactggccctacctcacagctgaaactttaaaaaacaggatgggccaccagccacctcctccaactcaacaacattctataattgataactccctgagcctcaagacaccttccgagcgtctgctctatccccttccaccctcagcggatgataatctcaagacacctcccgagtgtctgctcactccccttccaccctcagctctaccctcagcggatgataatctcaagacacctgcggagtgtctgctctatccccttccaccctcagcggatgataatctcaagacacctcccgagtgtctgttcactccccttccaccctcagctccaccctcagtggatgataatctcaagacacctcccgagtgtgtctgctcactccccttccaccctcagcggatgataatctcaagaaactaaggaagaataaataaata

SEQ ID NO: 160617 - DNA, 654 bp, Homo sapiens
  Payload ID: 11389
  Gene Symbol: NPIPA1
  Gene Name: nuclear pore complex interacting protein family, member A1
  ENST ID: ENST00000633354
  CDS Start-End: 1-654
cgggtgcggtggctgctcttttggctcctcttttggctcctgctgggatttatcagccatcagtccacctgtgtgagtagatgggtgctgtggctgctcttttggctcctgctgggatttatcagccatcagtccacctgtgttatcaatactctggctgaccatcgtcatcgtgggactgactttggtggaagtccttggttacttatcattactgtgtttctgagaagttataaatttgccatctccctctgcacaagttacctttgtgtgtctttcctgaagactatcttcccgtctcaaaatggacatgatggatccacggatgtacagcagagagccaggaggtccaaccgccgtagacaggaaggaattaaaattgtcctggaagacatctttactttatggagacaggtggaaaccaaagttcgagctaaaatccgtaagatgaaggtgacaacaaaagtcaaccgtcatgacaaaatcaatggaaagaggaagaccgccaaagaacatctgaggaaactaagcatgaaagaacgtgagcacggagaaaaggagaggcaggtgtcagaggcagaggaaaatgggaaattggatatgaaagaaatacacacctacatggaaatgtttcaacgtgcgcaagcgttgcgg

SEQ ID NO: 160618 - DNA, 568 bp, Homo sapiens; identical to SEQ ID NO: 160614
  Payload ID: 11389
  Gene Symbol: NPIPA1
  Gene Name: nuclear pore complex interacting protein family, member A1
  ENST ID: ENST00000632782
  CDS Start-End: 1-557

SEQ ID NO: 160619 - DNA, 1110 bp, Homo sapiens
  Payload ID: 11390
  Gene Symbol: NPIPA2
  Gene Name: nuclear pore complex interacting protein family, member A2
  Uniprot ID: E9PIF3
  ENST ID: ENST00000529166
  CDS Start-End: 1-1110
atggtgaagctctctattgtcctgaccccacggttcctgtcccatgaccagggccagctcaccaaggagctgcagcagcacgtaaagtcagtgacatgcccatgcgagtacctgaggaaggttatcaatactctggctgaccatcgtcatcgtgggactgactttggtggaagtccttggttacttatcattactgtgtttctgagaagttataaatttgccatctccctctgcacaagttacctttgtgtgtctttcctgaagactatcttcccgtctcaaaatggacatgatggatccacggatgtacagcagagagccaggaggtccaaccgccgtagacaggaaggaattaaaattgtcctggaagacatctttactttatggagacaggtggaaaccaaagttcgagctaaaatctgtaagatgaaggtgacaacaaaagtcaaccgtcatgacaaaatcaatggaaagaggaagaccgccaaagaacatctgaggaaactaagcatgaaagaacgtgagcacggagaaaaggagaggcaggtgtcagaggcagaggaaaacgggaaattggatatgaaagaaatacacacctacatggaaatgtttcaacgtgcgcaagcgttgcggcggcgggcagaggactactacagatgcaaaatcaccccttctgcaagaaagcctctttgcaaccgggtcagaatggcggcagcggagcatcgtcattcttcaggattgccctactggccctacctcacagctgaaactttaaaaaacaggatgggccaccagccacctcctccaactcaacaacattctataattgataactccctgagcctcaagacacctcccgagtgtctgctcactccccttccaccctcagctctaccctcagcggatgataatctcaagacacctgcggagtgtctgctctatccccttccaccctcagcggatgataatctcaagacacctcccgagtgtctgctcactccccttccaccctcagctccaccctcagcggatgataatctcaagacacctcccaagtgtgtctgctcactccccttccaccctcagcggatgataatctcaagaaactaa

SEQ ID NO: 160620 - DNA, 954 bp, Homo sapiens
  Payload ID: 11390
  Gene Symbol: NPIPA2
  Gene Name: nuclear pore complex interacting protein family, member A2
  ENST ID: ENST00000530328
  CDS Start-End: 1-954
atggtgaagctctctattgtcctgaccccacggttcctgtcccatgaccagggccagctcaccaaggagctgcagcagcacgtaaagtcagtgacatgcccatgcgagtacctgaggaaggttatcaatactctggctgaccatcgtcatcgtgggactgactttggtggaagtccttggttacttatcattactgtgtttctgagaagttataaatttgccatctccctctgcacaagttacctttgtgtgtctttcctgaagactatcttcccgtctcaaaatggacatgatggatccacggatgtacagcagagagccaggaggtccaaccgccgtagacaggaaggaattaaaattgtcctggaagacatctttactttatggagacaggtggaaaccaaagttcgagctaaaatctgtaagatgaaggtgacaacaaaagtcaaccgtcatgacaaaatcaatggaaagaggaagaccgccaaagaacatctgaggaaactaagcatgaaagaacgtgagcacggagaaaaggagaggcaggtgtcagaggcagaggaaaacgggaaattggatatgaaagaaatacacacctacatggaaatgtttcaacgtgcgcaagcgttgcggcggcgggcagaggactactacagatgcaaaatcaccccttctgcaagaaagcctctttgcaaccgggtaagtttgcttgttttccttgcttttggacatagtctgccaggtcaggacatggatacatttttctccctacggctctgtgctcaagccctgcagagggagatggcagagaggaaggctgcctacaagcatcacagtcccatccctgttggtaaccgtgttgcgcaaaaacaccttcatccccacccagtggggcccccatctaatattctaagtgtcagaggttccgtatttgtaatagcaaatgggccctga

SEQ ID NO: 160621 - DNA, 1053 bp, Homo sapiens
  Payload ID: 11390
  Gene Symbol: NPIPA2
  Gene Name: nuclear pore complex interacting protein family, member A2
  ENST ID: ENST00000553201
  CDS Start-End: 1-1053
atgttttgttgcttaggatatgaatggctgagcggaggctgtaaaacctggcactctgcttgggttatcaatactctggctgaccatcgtcatcgtgggactgactttggtggaagtccttggttacttatcattactgtgtttctgagaagttataaatttgccatctccctctgcacaagttacctttgtgtgtctttcctgaagactatcttcccgtctcaaaatggacatgatggatccacggatgtacagcagagagccaggaggtccaaccgccgtagacaggaaggaattaaaattgtcctggaagacatctttactttatggagacaggtggaaaccaaagttcgagctaaaatctgtaagatgaaggtgacaacaaaagtcaaccgtcatgacaaaatcaatggaaagaggaagaccgccaaagaacatctgaggaaactaagcatgaaagaacgtgagcacggagaaaaggagaggcaggtgtcagaggcagaggaaaacgggaaattggatatgaaagaaatacacacctacatggaaatgtttcaacgtgcgcaagcgttgcggcggcgggcagaggactactacagatgcaaaatcaccccttctgcaagaaagcctctttgcaaccgggtcagaatggcggcagcggagcatcgtcattcttcaggattgccctactggccctacctcacagctgaaactttaaaaaacaggatgggccaccagccacctcctccaactcaacaacattctataattgataactccctgagcctcaagacacctcccgagtgtctgctcactccccttccaccctcagctctaccctcagcggatgataatctcaagacacctgcggagtgtctgctctatccccttccaccctcagcggatgataatctcaagacacctcccgagtgtctgctcactccccttccaccctcagctccaccctcagcggatgataatctcaagacacctcccaagtgtgtctgctcactccccttccaccctcagcggatgataatctcaagaaactaa

SEQ ID NO: 160622 - DNA, 954 bp, Homo sapiens; identical to SEQ ID NO: 160620
  Payload ID: 11391
  Gene Symbol: NPIPA3
  Gene Name: nuclear pore complex interacting protein family, member A3
  ENST ID: ENST00000526520
  CDS Start-End: 1-954

SEQ ID NO: 160623 - DNA, 1155 bp, Homo sapiens
  Payload ID: 11391
  Gene Symbol: NPIPA3
  Gene Name: nuclear pore complex interacting protein family, member A3
  ENST ID: ENST00000531598
  CDS Start-End: 1-1110
atggtgaagctctctattgtcctgaccccacggttcctgtcccatgaccagggccagctcaccaaggagctgcagcagcacgtaaagtcagtgacatgcccatgcgagtacctgaggaaggttatcaatactctggctgaccatcgtcatcgtgggactgactttggtggaagtccttggttacttatcattactgtgtttctgagaagttataaatttgccatctccctctgcacaagttacctttgtgtgtctttcctgaagactatcttcccgtctcaaaatggacatgatggatccacggatgtacagcagagagccaggaggtccaaccgccgtagacaggaaggaattaaaattgtcctggaagacatctttactttatggagacaggtggaaaccaaagttcgagctaaaatctgtaagatgaaggtgacaacaaaagtcaaccgtcatgacaaaatcaatggaaagaggaagaccgccaaagaacatctgaggaaactaagcatgaaagaacgtgagcacggagaaaaggagaggcaggtgtcagaggcagaggaaaacgggaaattggatatgaaagaaatacacacctacatggaaatgtttcaacgtgcgcaagcgttgcggcggcgggcagaggactactacagatgcaaaatcaccccttctgcaagaaagcctctttgcaaccgggtcagaatggcggcagcggagcatcgtcattcttcaggattgccctactggccctacctcacagctgaaactttaaaaaacaggatgggccaccagccacctcctccaactcaacaacattctataattgataactccctgagcctcaagacacctcccgagtgtctgctcactccccttccaccctcagctctaccctcagcggatgataatctcaagacacctgcggagtgtctgctctatccccttccaccctcagcggatgataatctcaagacacctcccgagtgtctgctcactccccttccaccctcagctccaccctcagtggatgataatctcaagacacctcccaagtgtgtctgctcactccccttccaccctcagcggatgataatctcaagaaactaaggaagaataaataaataatataaaaataaaatgaatactgcagtc

SEQ ID NO: 160624 - DNA, 1053 bp, Homo sapiens
  Payload ID: 11391
  Gene Symbol: NPIPA3
  Gene Name: nuclear pore complex interacting protein family, member A3
  Uniprot ID: F8WFD2
  ENST ID: ENST00000552140
  CDS Start-End: 1-1053
atgttttgttgcttaggatatgaatggctgagcggaggctgtaaaacctggcactctgcttgggttatcaatactctggctgaccatcgtcatcgtgggactgactttggtggaagtccttggttacttatcattactgtgtttctgagaagttataaatttgccatctccctctgcacaagttacctttgtgtgtctttcctgaagactatcttcccgtctcaaaatggacatgatggatccacggatgtacagcagagagccaggaggtccaaccgccgtagacaggaaggaattaaaattgtcctggaagacatctttactttatggagacaggtggaaaccaaagttcgagctaaaatctgtaagatgaaggtgacaacaaaagtcaaccgtcatgacaaaatcaatggaaagaggaagaccgccaaagaacatctgaggaaactaagcatgaaagaacgtgagcacggagaaaaggagaggcaggtgtcagaggcagaggaaaacgggaaattggatatgaaagaaatacacacctacatggaaatgtttcaacgtgcgcaagcgttgcggcggcgggcagaggactactacagatgcaaaatcaccccttctgcaagaaagcctctttgcaaccgggtcagaatggcggcagcggagcatcgtcattcttcaggattgccctactggccctacctcacagctgaaactttaaaaaacaggatgggccaccagccacctcctccaactcaacaacattctataattgataactccctgagcctcaagacacctcccgagtgtctgctcactccccttccaccctcagctctaccctcagcggatgataatctcaagacacctgcggagtgtctgctctatccccttccaccctcagcggatgataatctcaagacacctcccgagtgtctgctcactccccttccaccctcagctccaccctcagtggatgataatctcaagacacctcccaagtgtgtctgctcactccccttccaccctcagcggatgataatctcaagaaactaa

SEQ ID NO: 160625 - DNA, 1088 bp, Homo sapiens
  Payload ID: 11391
  Gene Symbol: NPIPA3
  Gene Name: nuclear pore complex interacting protein family, member A3
  ENST ID: ENST00000619019
  CDS Start-End: 1-1053
atgttttgttgcttaggatatgaatggctgagcggaggctgtaaaacctggcactctgcttgggttatcaatactctggctgaccatcgtcatcgtgggactgactttggtggaagtccttggttacttatcattactgtgtttctgagaagttataaatttgccatctccctctgcacaagttacctttgtgtgtctttcctgaagactatcttcccgtctcaaaatggacatgatggatccacggatgtacagcagagagccaggaggtccaaccgccgtagacaggaaggaattaaaattgtcctggaagacatctttactttatggagacaggtggaaaccaaagttcgagctaaaatctgtaagatgaaggtgacaacaaaagtcaaccgtcatgacaaaatcaatggaaagaggaagaccgccaaagaacatctgaggaaactaagcatgaaagaacgtgagcacggagaaaaggagaggcaggtgtcagaggcagaggaaaacgggaaattggatatgaaagaaatacacacctacatggaaatgtttcaacgtgcgcaagcgttgcggcggcgggcagaggactactacagatgcaaaatcaccccttctgcaagaaagcctctttgcaaccgggtcagaatggcggcagcggagcatcgtcattcttcaggattgccctactggccctacctcacagctgaaactttaaaaaacaggatgggccaccagccacctcctccaactcaacaacattctataattgataactccctgagcctcaagacacctcccgagtgtctgctctatccccttccaccctcagcggatgataatctcaagacacctcccgagtgtctgctcactccccttccaccctcagctccaccctcagcggatgataatctcaagacacctcccgagtgtctgctcactccccttccaccctcagctccaccctcagcggatgataatctcaagacacctcccaagtgtgtctgctcactccccttccaccctcagcggatgataatctcaagaaactaaggaagaataaataaataatataaaaataaaatgaa

SEQ ID NO: 160626 - DNA, 1070 bp, Homo sapiens
  Payload ID: 11391
  Gene Symbol: NPIPA3
  Gene Name: nuclear pore complex interacting protein family, member A3
  ENST ID: ENST00000621766
  CDS Start-End: 1-1053
atgttttgttgcttaggatatgaatggctgagcggaggctgtaaaacctggcactctgcttgggttatcaatactctggctgaccatcgtcatcgtgggactgactttggtggaagtccttggttacttatcattactgtgtttctgagaagttataaatttgccatctccctctgcacaagttacctttgtgtgtctttcctgaagactatcttcccgtctcaaaatggacatgatggatccacggatgtacagcagagagccaggaggtccaaccgccgtagacaggaaggaattaaaattgtcctggaagacatctttactttatggagacaggtggaaaccaaagttcgagctaaaatctgtaagatgaaggtgacaacaaaagtcaaccgtcatgacaaaatcaatggaaagaggaagaccgccaaagaacatctgaggaaactaagcatgaaagaacgtgagcacggagaaaaggagaggcaggtgtcagaggcagaggaaaacgggaaattggatatgaaagaaatacacacctacatggaaatgtttcaacgtgcgcaagcgttgcggcggcgggcagaggactactacagatgcaaaatcaccccttctgcaagaaagcctctttgcaaccgggtcagaatggcggcagcggagcatcgtcattcttcaggattgccctactggccctacctcacagctgaaactttaaaaaacaggatgggccaccagccacctcctccaactcaacaacattctataattgataactccctgagcctcaagacacctcccgagtgtctgctcactccccttccaccctcagctctaccctcagcggatgataatctcaagacacctgcggagtgtctgctctatccccttccaccctcagcggatgataatctcaagacacctcccgagtgtctgctcactccccttccaccctcagctccaccctcagcggatgataatctcaagacacctcccaagtgtgtctgctcactccccttccaccctcagcggatgataatctcaagaaactaaggaagaataaataaata

SEQ ID NO: 160627 - DNA, 1053 bp, Homo sapiens; identical to SEQ ID NO: 160621
  Payload ID: 11391
  Gene Symbol: NPIPA3
  Gene Name: nuclear pore complex interacting protein family, member A3
  ENST ID: ENST00000610285
  CDS Start-End: 1-1053

SEQ ID NO: 160628 - DNA, 1155 bp, Homo sapiens
  Payload ID: 11391
  Gene Symbol: NPIPA3
  Gene Name: nuclear pore complex interacting protein family, member A3
  ENST ID: ENST00000631747
  CDS Start-End: 1-1110
atggtgaagctctctattgtcctgaccccacggttcctgtcccatgaccagggccagctcaccaaggagctgcagcagcacgtaaagtcagtgacatgcccatgcgagtacctgaggaaggttatcaatactctggctgaccatcgtcatcgtgggactgactttggtggaagtccttggttacttatcattactgtgtttctgagaagttataaatttgccatctccctctgcacaagttacctttgtgtgtctttcctgaagactatcttcccgtctcaaaatggacatgatggatccacggatgtacagcagagagccaggaggtccaaccgccgtagacaggaaggaattaaaattgtcctggaagacatctttactttatggagacaggtggaaaccaaagttcgagctaaaatctgtaagatgaaggtgacaacaaaagtcaaccgtcatgacaaaatcaatggaaagaggaagaccgccaaagaacatctgaggaaactaagcatgaaagaacgtgagcacggagaaaaggagaggcaggtgtcagaggcagaggaaaacgggaaattggatatgaaagaaatacacacctacatggaaatgtttcaacgtgcgcaagcgttgcggcggcgggcagaggactactacagatgcaaaatcaccccttctgcaagaaagcctctttgcaaccgggtcagaatggcggcagcggagcatcgtcattcttcaggattgccctactggccctacctcacagctgaaactttaaaaaacaggatgggccaccagccacctcctccaactcaacaacattctataattgataactccctgagcctcaagacacctcccgagtgtctgctcactccccttccaccctcagctctaccctcagcggatgataatctcaagacacctgcggagtgtctgctctatccccttccaccctcagcggatgataatctcaagacacctcccgagtgtctgctcactccccttccaccctcagctccaccctcagcggatgataatctcaagacacctcccaagtgtgtctgctcactccccttccaccctcagcggatgataatctcaagaaactaaggaagaataaataaataatataaaaataaaatgaatactgcagtc

SEQ ID NO: 160629 - DNA, 954 bp, Homo sapiens; identical to SEQ ID NO: 160620
  Payload ID: 11391
  Gene Symbol: NPIPA3
  Gene Name: nuclear pore complex interacting protein family, member A3
  ENST ID: ENST00000631716
  CDS Start-End: 1-954

SEQ ID NO: 160630 - DNA, 1088 bp, Homo sapiens
  Payload ID: 11392
  Gene Symbol: NPIPA5
  Gene Name: nuclear pore complex interacting protein family, member A5
  Uniprot ID: E9PKD4
  ENST ID: ENST00000360151
  CDS Start-End: 1-1053
atgttttgttgcttaggatatgaatggctgagcggaggctgtaaaacctggcactctgcttgggttatcaatactctggctgaccatcgtcatcgtgggactgactttggtggaagtccttggttacttatcattactgtgtttctgagaagttataaatttgccatctccctctgcacaagttacctttgtgtgtctttcctgaagactatcttcccgtctcaaaatggacatgatggatccacggatgtacagcagagagccaggaggtccaactgccgtagacaggaaggaattaaaattgtcctggaagacatctttactttatggagacaggtggaaaccaaagttcgagctaaaatccgtaagatgaaggtgacaacaaaagtcaaccgtcatgacaaaatcaatggaaagaggaagaccgccaaagaacatctgaggaaactaagcatgaaagaacgtgagcacggagaaaaggagaggcaggtgtcagaggcagaggaaaatgggaaattggatatgaaagaaatacacacctacatggaaatgtttcaacgtgcgcaagcgttgcggcggcgggcagaggactactacagatgcaaaatcaccccttctgcaagaaagcctctttgcaaccgggtcagaatggcggcagtggagcatcgtcattcttcaggattgccctactggccctacctcacagctgaaactttaaaaaacaggatgggccaccagccacctcctccaactcaacaacattctataattgataactccctgagcctcaagacaccttccgagcgtctgctctatccccttccaccctcagcggatgataatctcaagacacctcccgagtgtctgctcactccccttccaccctcagctctaccctcagcggatgataatctcaagacacctgccgagtgtctgctcactccccttccaccctcagctccaccctcagcggatgataatctcaagacacctcccgagtgtgtctgctcactccccttccaccctcagcggatgataatctcaagaaactaatgaagaataaataaataatataaaaataaaatgaa

SEQ ID NO: 160631 - DNA, 954 bp, Homo sapiens
  Payload ID: 11392
  Gene Symbol: NPIPA5
  Gene Name: nuclear pore complex interacting protein family, member A5
  ENST ID: ENST00000534094
  CDS Start-End: 1-954
atggtgaagctctctattgtcctgaccccacggttcctgtcccatgaccagggccagctcaccaaggagctgcagcagcacgtaaagtcagtgacatgcccatgcgagtacctgaggaaggttatcaatactctggctgaccatcgtcatcgtgggactgactttggtggaagtccttggttacttatcattactgtgtttctgagaagttataaatttgccatctccctctgcacaagttacctttgtgtgtctttcctgaagactatcttcccgtctcaaaatggacatgatggatccacggatgtacagcagagagccaggaggtccaactgccgtagacaggaaggaattaaaattgtcctggaagacatctttactttatggagacaggtggaaaccaaagttcgagctaaaatccgtaagatgaaggtgacaacaaaagtcaaccgtcatgacaaaatcaatggaaagaggaagaccgccaaagaacatctgaggaaactaagcatgaaagaacgtgagcacggagaaaaggagaggcaggtgtcagaggcagaggaaaatgggaaattggatatgaaagaaatacacacctacatggaaatgtttcaacgtgcgcaagcgttgcggcggcgggcagaggactactacagatgcaaaatcaccccttctgcaagaaagcctctttgcaaccgggtaagtttgcttgttttccttgcttttggacatagtctgccaggtcaggacatggatacatttttctccctacggctctgtgctcaagccctgcagagggagatggcagagaggaaggctgcctacaagcatcacagtcccatccctgttggtaaccgtgttgcgcaaaaacaccttcatccccacccagtggggcccccatctaatattctaagtgtcagaggttccatatttgtaatagcaaatgggccctga

SEQ ID NO: 160632 - DNA, 699 bp, Homo sapiens; identical to SEQ ID NO: 103627
  Payload ID: 11392
  Gene Symbol: NPIPA5
  Gene Name: nuclear pore complex interacting protein family, member A5
  Uniprot ID: E9PKD4
  ENST ID: ENST00000543801
  CDS Start-End: 1-699

SEQ ID NO: 160633 - DNA, 1157 bp, Homo sapiens
  Payload ID: 11392
  Gene Symbol: NPIPA5
  Gene Name: nuclear pore complex interacting protein family, member A5
  ENST ID: ENST00000633044
  CDS Start-End: 70-1122
gttgatggacggatggctacatggatgtgatggagatggtttactatcgggaccttccgcatcctgctgatgttttgttgcttaggatatgaatggctgagcggaggctgtaaaacctggcactctgcttgggttatcaatactctggctgaccatcgtcatcgtgggactgactttggtggaagtccttggttacttatcattactgtgtttctgagaagttataaatttgccatctccctctgcacaagttacctttgtgtgtctttcctgaagactatcttcccgtctcaaaatggacatgatggatccacggatgtacagcagagagccaggaggtccaactgccgtagacaggaaggaattaaaattgtcctggaagacatctttactttatggagacaggtggaaaccaaagttcgagctaaaatccgtaagatgaaggtgacaacaaaagtcaactgtcatgacaaaatcaatggaaagaggaagaccgccaaagaacatctgaggaaactaagcatgaaagaacgtgagcacggagaaaaggagaggcaggtgtcagaggcagaggaaaatgggaaattggatatgaaagaaatacacacctacatggaaatgtttcaacgtgcgcgagcgttgcggcggcgggcagaggactactacagatgcaaaatcaccccttctgcaagaaagcctctttgcaaccgggtcagaatggcggcagtggagcatcgtcattcttcaggattgccctactggccctacctcacagctgaaactttaaaaaacaggatgggccaccagccacctcctccaactcaacaacattctataattgataactccctgagcctcaagacaccttccgagcgtctgctctatccccttccaccctcagcggatgataatctcaagacacctcccgagtgtctgctcactccccttccaccctcagctctaccctcagcggatgataatctcaagacacctgccgagtgtctgctcactccccttccaccctcagctccaccctcagcggatgataatctcaagacacctcccgagtgtgtctgctcactccccttccaccctcagcggatgataatctcaagaaactaatgaagaataaataaataatataaaaataaaatgaa

SEQ ID NO: 160634 - DNA, 561 bp, Homo sapiens
  Payload ID: 11393
  Gene Symbol: NPIPA7
  Gene Name: nuclear pore complex interacting protein family, member A7
  ENST ID: ENST00000344087
  CDS Start-End: 1-170
gaaaatgggaaattggatatgaaagaaatacacacctacatggaaatgtttcaacgtgcgcaagcgttgcggcggcgggcagaggactactacagatgcaaaatcaccccttctgcaagaaagcctctttgcaaccggtgcacttacaatttggtattacctgggagtgaaaagaaatattacagccatgcctaactgacttcttgaggtcagaatggcggcagtggagcatcgtcattcttcaggattgccctactggccctacctcacagctgaaactttaaaaaacaggatgggccaccagccacctcctccaactcaacaacattctataattgataactccctgagcctcaagacaccttccgagtgtgtgctctatccccttccaccctcagcggatgataatctcaagacacctcccgagtgtctgctcactccccttccaccctcagctctaccctcagcggatgataatctcaagacacctgccgagtgcctgctctatccccttccaccctcagcggatgataatctcaagacacctcccgagtgtctgct

SEQ ID NO: 160635 - DNA, 1331 bp, Homo sapiens
  Payload ID: 11393
  Gene Symbol: NPIPA7
  Gene Name: nuclear pore complex interacting protein family, member A7
  Uniprot ID: E9PJI5
  ENST ID: ENST00000530217
  CDS Start-End: 191-1300
tgtgatttgattgctctcaaatatattgagatttgctggaacaaaataagtcaggttaatttttgtaaatgtaccatgcatgcttaaaatgaatgtatgtacatttgttcctgagatacaggttgatggacggatggctacatggatgtgatggagatggtttactatcgggaccttccgcatcctgctgatgttttgttgcttaggatatgaatggctgagcggaggctgtacaacctggcactctgcttgggttatcaatactctggctgaccatcgtcatcgtgggactgactttggtggaagtccttggttacttatcattactgtgtttctgagaagttataaatttgccatctccctctgcacaagttacctttgtgtgtctttcctgaagactatcttcccatctcaaaatggacatgatggatccacggatgtacagcagagagccaggaggtccaaccgccgtagacaggaaggaattaaaattgtcctggaagacatctttactttatggagacaggtggaaaccaaagttcgagctaaaatccgtaagatgaaggtgacaacaaaagtcaaccgtcatgacaaaatcaatggaaagaggaagaccgccaaagaacatctgaggaaactaagcatgaaagaacgtgagcacagagaagaggagaggcaggtgtcagaggcagaggaaaatgggaaattggatatgaaagaaatacacacctacatggaaatgtttcaacgtgcgcaagcgttgcggcggcgggcagaggactactacagatgcaaaatcaccccttctgcaagaaagcctctttgcaaccgggtcagaatggcggcagtggagcatcgtcattcttcaggattgccctactggccctacctcacagctgaaactttaaaaaacaggatgggccaccagccacctcctccaactcaacaacattctataattgataactccctgagcctcaagacaccttccgagtgtgtgctctatccccttccaccctcagcggatgataatctcaagacacctcccgagtgtctgctcactccccttccaccctcagctctaccctcagcggatgataatctcaagacacctgccgagtgcctgctctatccccttccaccctcagcggatgataatctcaagacacctcccgagtgtctgctcactccccttccaccctcagctccaccctcagcggatgataatctcaagacacctcctgagtgtgtctgctcactccccttccaccctcagcggatgataatctcaagaaactaaggaagaataaataaataatataaaaataaaa

SEQ ID NO: 160636 - DNA, 1131 bp, Homo sapiens
  Payload ID: 11393
  Gene Symbol: NPIPA7
  Gene Name: nuclear pore complex interacting protein family, member A7
  Uniprot ID: E9PJI5
  ENST ID: ENST00000618131
  CDS Start-End: 1-1110
atgttttgttgcttaggatatgaatggctgagcggaggctgtacaacctggcactctgcttgggttatcaatactctggctgaccatcgtcatcgtgggactgactttggtggaagtccttggttacttatcattactgtgtttctgagaagttataaatttgccatctccctctgcacaagttacctttgtgtgtctttcctgaagactatcttcccatctcaaaatggacatgatggatccacggatgtacagcagagagccaggaggtccaaccgccgtagacaggaaggaattaaaattgtcctggaagacatctttactttatggagacaggtggaaaccaaagttcgagctaaaatccgtaagatgaaggtgacaacaaaagtcaaccgtcatgacaaaatcaatggaaagaggaagaccgccaaagaacatctgaggaaactaagcatgaaagaacgtgagcacagagaagaggagaggcaggtgtcagaggcagaggaaaatgggaaattggatatgaaagaaatacacacctacatggaaatgtttcaacgtgcgcaagcgttgcggcggcgggcagaggactactacagatgcaaaatcaccccttctgcaagaaagcctctttgcaaccgggtcagaatggcggcagtggagcatcgtcattcttcaggattgccctactggccctacctcacagctgaaactttaaaaaacaggatgggccaccagccacctcctccaactcaacaacattctataattgataactccctgagcctcaagacaccttccgagtgtgtgctctatccccttccaccctcagcggatgataatctcaagacacctcccgagtgtctgctcactccccttccaccctcagctctaccctcagcggatgataatctcaagacacctgccgagtgcctgctctatccccttccaccctcagcggatgataatctcaagacacctcccgagtgtctgctcactccccttccaccctcagctccaccctcagcggatgataatctcaagacacctcctgagtgtgtctgctcactccccttccaccctcagcggatgataatctcaagaaactaaggaagaataaataaataatat

SEQ ID NO: 160637 - DNA, 1565 bp, Homo sapiens
  Payload ID: 11394
  Gene Symbol: NPIPA8
  Gene Name: nuclear pore complex interacting protein family, member A8
  Uniprot ID: P0DM63
  ENST ID: ENST00000525596
  CDS Start-End: 430-1539
cccgctgagcgtcgacacagtcgctgttggcctggtgtccagcgtggttgtctatcccgtctacctggccatcctctttctcttccggatgtcccggagcaaggtggctgggagcctgagccccacacctgccgggcagtaggtgctggacatcgacagctgcctggactcgtccgtgctggacagctccttcctcacgttctcaggcctccacgctgaggtgagggctctactgggggtcctgggctgggctgggggtcctgccgccttggcgcagcttggactccagacactgtgcacctctcagcaggcctttgctggacaggtgaagagtgacttgtttctggatgattctaagaggttgatggacggatggctacatggatgtgatggagatggtttactatcgggaccttccgcatcctgctgatgttttgttgcttaggatatgaatggctgagcggaggctgtacaacctggcactctgcttgggttatcaatactctggctgaccatcgtcatcgtgggactgactttggtggaagtccttggttacttatcattactgtgtttctgagaagttataaatttgccatctccctctgcacaagttacctttgtgtgtctttcctgaagactatcttcccatctcaaaatggacatgatggatccacggatgtacagcagagagccaggaggtccaaccgccgtagacaggaaggaattaaaattgtcctggaagacatctttactttatggagacaggtggaaaccaaagttcgagctaaaatccgtaagatgaaggtgacaacaaaagtcaaccgtcatgacaaaatcaatggaaagaggaagaccgccaaagaacatctgaggaaactaagcatgaaagaacgtgagcacagagaagaggagaggcaggtgtcagaggcagaggaaaatgggaaattggatatgaaagaaatacacacctacatggaaatgtttcaacgtgcgcaagcgttgcggcggcgggcagaggactactacagatgcaaaatcaccccttctgcaagaaagcctctttgcaaccgggtcagaatggcggcagtggagcatcgtcattcttcaggattgccctactggccctacctcacagctgaaactttaaaaaacaggatgggccaccagccacctcctccaactcaacaacattctataattgataactccctgagcctcaagacaccttccgagtgtgtgctctatccccttccaccctcagcggatgataatctcaagacacctcccgagtgtctgctcactccccttccaccctcagctctaccctcagcggatgataatctcaagacacctgccgagtgcctgctctatccccttccaccctcagcggatgataatctcaagacacctcccgagtgtctgctcactccccttccaccctcagctccaccctcagcggatgataatctcaagacacctcctgagtgtgtctgctcactccccttccaccctcagcggatgataatctcaagaaactaaggaagaataaataaataatataaaaa

SEQ ID NO: 160638 - DNA, 1131 bp, Homo sapiens; identical to SEQ ID NO: 160636
  Payload ID: 11394
  Gene Symbol: NPIPA8
  Gene Name: nuclear pore complex interacting protein family, member A8
  Uniprot ID: P0DM63
  ENST ID: ENST00000541810
  CDS Start-End: 1-1110

SEQ ID NO: 160639 - DNA, 391 bp, Homo sapiens
  Payload ID: 11394
  Gene Symbol: NPIPA8
  Gene Name: nuclear pore complex interacting protein family, member A8
  ENST ID: ENST00000545050
  CDS Start-End: 1-391
gaattaaaattgtcctggaagacatctttactttatggagacaggtggaaaccaaagttcgagctaaaatccgtaagatgaaggtgacaacaaaagtcaaccgtcatgacaaaatcaatggaaagaggaagaccgccaaagaacatctgaggaaactaagcatgaaagaacgtgagcacagagaagaggagaggcaggtgtcagaggcagaggaaaatgggaaattggatatgaaagaaatacacacctacatggaaatgtttcaacgtgcgcaagcgttgcggcggcgggcagaggactactacagatgcaaaatcaccccttctgcaagaaagcctctttgcaaccggtgcacttacaatttggtattacctgggagtgaaaagaaata

SEQ ID NO: 160640 - DNA, 3653 bp, Homo sapiens
  Payload ID: 11395
  Gene Symbol: NPIPB11
  Gene Name: nuclear pore complex interacting protein family, member B11
  Uniprot ID: E5RHQ5
  ENST ID: ENST00000524087
  CDS Start-End: 76-3561
tcctgtttcacacagaagaaaactgaggttaaaaggggttggcactcatcatgagcccctgttctcattctgcaaatggtgaagctctctattgtcctgaccccacagttcctgtcccatgaccagggccagctcaccaaggagctgcagcagcacgtaaagtcagtgacatgcccatgcgagtacctgaggaaggttatcaatactctggctgaccatcatcatcgtgggactgactttggtggaagtccttggttacatattattattgcgtttccgacaagttataaagttgtcattaccctctggatagtttacctttgggtgtctctcctgaagactatcttctggtctcgaaatggacatgatggatccacggatgtacagcagagagcctggaggtccaaccgccgtagacaggaagggctgaggtccatttgtatgcacacaaagaaaagagtttcttcctttcgaggaaataaaattggcctgaaagacgtcattactctacggaggcatgtggaaacaaaagttagagctaaaatccgtaagaggaaggtgacaacgaaaatcaaccgtcatgacaaaatcaatggaaagaggaagaccgccagaaaacagaaaatgtttcaacgtgcgcaagagttgcggcggcgggcagaggactaccacaaatgcaaaatccccccttctgcaagaaaggctctttgcaactgggtcagaatggcggcagcggagcatcgtcattcttcaggattgccctactggccctacctcacagctgaaactttaaaaaacaggatgggccaccagccacctcctccaactcaacaacattgtataactgataactccctgagcctcaagacacctctcgagtgtctgctcactccccttccaccctcagcggatgataatctcaagacacctcccgagtgtctgctcactccccttccaccctcagcggatgataatctcaagacacctcccgagtgtctgctcactccccttccaccctcagctccaccctcagctccaccctcagcggatgataatctcaagacacgtgccgagtgtctgctccatccccttccaccctcagcggatgataatctcaagacaccttccgagcgtcagctcactccccttccaccctcagctccaccctcagcagatgataatatcaagacaactgccgagcgtctgcgggggccgcttccaccctcagcggatgataatctcaagacaccttctgagcgtcagctcactccccttccaccctcagctccaccctcagcagatgataatatcaagacacctgccgagcatctgcgggggccgcttccaccctcagcggatgataatctcaagacaccttctgagcgtcagctcactccccttccaccctcagctccaccctcagcagatgataatatcaagacacctgccgagcgtctgcgggggccgcttccaccctcagccgatgataatctcaagacaccttctgagcgtcagctcactccccttccaccctcagctccaccctcagcagatgataatatcaagacacctgccgagcatctgcgggggccgcttccaccctcagcggatgataatctcaagacaccttctgagcgtcagctcactccccttccaccctcagctccaccctcagcagatgataatatcaagacaactgccgagcatctgcgggggccgcttccaccctcagcggatgataatctcaagacaccttccgagcgtcagctcactccccttccaccctcagctccaccctcagcagatgataatatcaagacacctgccgagcatctgcagttccgcttccaccctcagcggatgataatctcaagagaccttccgagcgtcagctcactccccttccaccctcagctccaccctcagcagatgataatatcaagatacctgctgagcatctgcgggttccgcttccaccgtcagcggatgataatctcaagacaccttccgagcgtcagctcactccccttccaccctcagctccaccctcagcagatgataatatcaagacacctgccgagcgtctgcgggggccgcttccaccctcagccgatgataatctcaagacaccttccgagcgtcagctcactccccttccaccctcagctccaccctcagcagatgataatatcaagacacctgccgagcgtctgcgggggccgcttccaccctcagccgatgataatctcaagacaccttccgagcgtcagctcactccccttccaccctcagctccaccctcagcagatgataatatcaagacacctgccgagcgtctgcgggggccgcttccaccctcagccgatgataatctcaagacaccttccgagcgtcagctcactccccttccaccctcagctccaccctcagcagatgataatatcaagacacctgccgagcgtctgcgggggccgcttccaccctcagccgatgataatctcaagacaccttccgagcgtcagctcactccccttccaccctcagctccaccctcagcagatgataatatcaagacacctgccgagcgtctgcgggggccgcttccaccctcagccgatgataatctcaagacaccttccgagcgtcagctcactccccttccaccctcagctccaccctcagcagatgataatatcaagacacctgccgagcgtctgcggggagcgtctgtgggttccgcttccaccctcagcggatgataatctcaagacaccttccaaacgtcagctcactccccttccaccctcagctccaccctcagcagatgataatatcaagacacctgccgagcgtctgcgggggccgcttccaccctcagccgatgataatctcaagacaccttccaaacgtcagctcactccccttccaccctcagctccaccctcagcagatgataatatcaagacacctgccgagcgtctgcgggggccgcttccaccctcagccgatgataatctcaagacaccttccgagcgtcagctcactccccttccaccctcagctccaccctcagcagatgataatatcaagacacctgccgagcgtctgcgggggccgcttccaccctcagcggatgataatctcaagacaccttccgagcgtcagctcactccccttccaccctcagctccaacctcagcagatgataatatcaagacacctgccgagcgtctgcgggggccgcttccaccctcagccgatgataatctcaagacacctcccttagctactcaggaggctgaggcagaaaaaccacgcaaacccaagaggcagagggcggctgagatggaaccacctcccgaacccaagaggcggagggtcggtgacgtggaaccgtcacgcaaacccaagaggcggagggccgctgacgtggaaccatcatcacccgaacccaagaggcggagggtcggtgatgtggaaccgtcacgcaaacccaagaggcggagggccgctgacgtggaaccatcatcacccgaacccaagaggcggaggttgagctgagaagaggccagtgcactcaagcctgagcaataagaataaaaccgagtagaacaaaataaaaaattcaaaaaacaaaacaaaacccacactcc

SEQ ID NO: 160641 - DNA, 1216 bp, Homo sapiens
  Payload ID: 11395
  Gene Symbol: NPIPB11
  Gene Name: nuclear pore complex interacting protein family, member B11
  ENST ID: ENST00000614927
  CDS Start-End: 55-807
agccacctccacctctgtcctggacgcctcagggcgccctgaaaggaccaggacatgcgggggcggtggatgctcttttggctcctctttgggctcctgctggaatttatcagccatcagtgcatccgtgttatcaatactctggctgaccatcatcatcgtgggactgactttggtggaagtccttggttacatattattattgcgtttccgacaagttataaagttgtcattaccctctggatagtttacctttgggtgtctctcctgaagactatcttctggtctcgaaatggacatgatggatccacggatgtacagcagagagcctggaggtccaaccgccgtagacaggaaggaaataaaattggcctgaaagacgtcattactctacggaggcatgtggaaacaaaagttagagctaaaatccgtaagaggaaggtgacaacgaaaatcaaccgtcatgacaaaatcaatggaaagaggaagaccgccagaaaacagaaaatgtttcaacgtgcgcaagagttgcggcggcgggcagaggactaccacaaatgcaaaatccccccttctgcaagaaaggctctttgcaactgggtaagtttgcttgttttccttgcttttggacatagtctgccaggtcaggacatggatacatttttctccctacagctctgtgctcaagccctgcagagggagatggcagagagaaaggctgcctacaagcatcacagtcccatccctgttggtaaccgtgttgcgcaaaaacaccttcatccccacccagtggggcccctgatctaatattctaagtgtcagaggttccgtatttgtaatagcagatgggccctgactgtaaactagtgaagagtgaatgtaacttattacccacagggacaattccaaatgaaggccttaaatgatgctcagctaagctggttcttgtgtggcctctgtaccttcaaaagctgccgagtcctatgattacacgtgatgggacttgtacacttgaagtgaaacacagttttaaaacttgctttgtttagaattcccacctcatttttccatggacaaaagtattctttatgtcctagtgcacttacaatttggtattacctgggagtgaaaagaaatattacagccatgcctaagtgacttcttgaggtgagattgttctgtcagaaaaccctctcccagttcccctgcagctctt

SEQ ID NO: 160642 - DNA, 1428 bp, Homo sapiens
  Payload ID: 11396
  Gene Symbol: NPIPB15
  Gene Name: nuclear pore complex interacting protein family, member B15
  Uniprot ID: A6NHN6
  ENST ID: ENST00000429990
  CDS Start-End: 97-1428
atccggccccggtccccgtccccttccctcccccctgccctaagccacctccacctctgtcctggccgcctcagggcgccctgaaaggaccaggacatgcggctgcgcttttggctcctcatttggctcctgctgggatttatcagccatcagcccacccctgtcatcaatagtctggctgtctatcgtcatcgtgagactgactttggtgtaggagttcgagaccaccctggccaacatggcaaaaccccatctccacaaaaattggataatttgataattatcattattgggtttctgagacgtgacacatttaccattctcttctgcacaagttacctttgtgtgtctttcctgaagactatcttctggtctcgaaatggacatgatggatccacggatgtacagcagagagcctggaggtccaaccgcagtagacagaaagggctgaggtccatttgtatgcacacaaagaaaagagtttcttcctttcgaggaaataaaattggcctgaaagacgtcattactctacggaggcatgtggaaacaaaagttagagctaaaatccgtaagaggaaggtgacaacgaaaatcaaccgtcatgacaaaatcaatggaaagaggaagaccgccagaaaacagaaaatgtttcaacgtgcgcaagagttgcggcggcgggcagaggactaccacaaatgcaaaatccccccttctgcaagaaagcctctttgcaactgggtcagaatggcggcagcggagcatcgtcattcttcaggattgccctgctggccctacctcacagctgaagctttaaaaaacaggatgggccgccagccacctcctccaactcaacaacattctataactgataactccctgagcctcaagacacctcccgaatgtctccttcatccccttccaccctcagtggatgataatatcaaggagtgtcctcttgctcctcttccaccctcagtggatgataatctgaaggagtatctcctggtccctcttccaccctctcctcttccaccctcagtggatgataatctgaaggactgtctctttgtccctcttccaccctctcctcttccaccctcagtggatgataatctcaagactcctcccttagctactcaggaggccgaggcggaaaaaccacccaaacccaagaggtggagggtggatgaggtggaacaatcaccgaaacccaagaggcggagggcggatgaggtggaacaatcgcccaagcccaagaggcagagggaggccgaggcacaacaattacccaaacccaagaggcggaggttgagtaagctgagaacacgccattgcactcaagcctgggcaataagaataaatccgtgggtcgaaaaaaagaaaaaaatcaaaaaacaaaacaaaacccacgctccaaaaacaaactaa

SEQ ID NO: 160643 - DNA, 1216 bp, Homo sapiens
  Payload ID: 11397
  Gene Symbol: NPIPB3
  Gene Name: nuclear pore complex interacting protein family, member B3
  ENST ID: ENST00000448012
  CDS Start-End: 55-807
agccacctccacctctgtcctggccgcctcagggcgccctgaaaggaccaggacatgcgggtgcggtggatgctcttttggctcctctttgggctcctactggaatttatcagccatcagtgcatctctgttatcaatactctggctgaccatcatcatcgtgggactgactttggtggaagtccttggttacatgtcattattgcgtttccgacaagttataaagttgtcattaccctctggatagtttacctttgggtgtctctcctgaagactatcttctggtctcgaaatggacatgatggatccacggatgtacagcagagagcctggaggtccaaccgccgtagacaggaaggaaataaaattggcctgaaagacgtcattactctacggagacatgtggaaacaaaagttagagctaaaatccgtaagaggaaggtgacaacgaaaatcaaccatcatgacaaaatcaatggaaagaggaagaccgccagaaaacagaaaatgtttcaacgtgcgcaagagttgcggcggcgagcagaggactaccacaaatgcaaaatccccccttctgcaagaaaggctctttgcaactgggtaagtttgcttgttttccttgcttttggacatagtctgccaggtcaggacatggatacatttttctccctacagctctgtgctcaagccctgcagagggagatggcagagagaaaggctgcctacaagcatcacagtcccatccctgttggtaaccgtgttgcgcaaaaacaccttcatccccacccagtggggcccctgatctaatattctaagtgtcagaggttccgtatttgtaatagcagatgggccctgactgtaaactagtgaagagtgaatgtaacttattacccacagggacaattccaaatgaaggccttaaatgatgctcagctaagctggttcttgtgtggcctctgtaccttcaaaagctgccgagtcctatgattacacgtgatgggacttgtacacttgaagtgaaacacagttttaaaacttgctttgtttagaattcccacctcatttttccatggacaaaagtattctttatgtcctagtgcacttacaatttggtattacctgggagtgaaaagaaatattacagccatgcctaagtgacttcttgaggtgagattgttctgtcagaaaaccctctcccagttcccctgcagctctt

SEQ ID NO: 160644 - DNA, 910 bp, Homo sapiens
  Payload ID: 11397
  Gene Symbol: NPIPB3
  Gene Name: nuclear pore complex interacting protein family, member B3
  ENST ID: ENST00000419180
  CDS Start-End: 157-910
gtttcacacagaagaaaactgaggttggcactcatcatgagcccctgttctcattctgcaaatggtgaagctctctattgtcctgaccccacagttcctgtcccatgaccagggccagctcaccaaggagctgcagcagcatgtaaagtcagtgacatgcccatgcgagtacctgaggaagtgaccttgaggaaccctgggagctcaggaaggaaggagcgcccagaagcagggacagggagctggttggggaggaccagaaatcaggttatcaatactctggctgaccatcatcatcgtgggactgactttggtggaagtccttggttacatgtcattattgcgtttccgacaagttataaagttgtcattaccctctggatagtttacctttgggtgtctctcctgaagactatcttctggtctcgaaatggacatgatggatccacggatgtacagcagagagcctggaggtccaaccgccgtagacaggaagggctgaggtccatttgtatgcacacaaagaaaagagtttcttcctttcgaggaaataaaattggcctgaaagacgtcattactctacggagacatgtggaaacaaaagttagagctaaaatccgtaagaggaaggtgacaacgaaaatcaaccatcatgacaaaatcaatggaaagaggaagaccgccagaaaacagaaaatgtttcaacgtgcgcaagagttgcggcggcgagcagaggactaccacaaatgcaaaatccccccttctgcaagaaaggctctttgcaactgggtcagaatggcggcagcggagcatcgtcattcttcaggattgccctactggccctacctcacagctgaaactttaaaaaacaggatgggccaccagccacctcctccaactcaacaacatt

SEQ ID NO: 160645 - DNA, 679 bp, Homo sapiens
  Payload ID: 11397
  Gene Symbol: NPIPB3
  Gene Name: nuclear pore complex interacting protein family, member B3
  ENST ID: ENST00000521589
  CDS Start-End: 389-679
tgtcgcccagcctgaagtgcagtcgtgtgtttcatgcgcgtccgtgtgaagagaccaccaaacaggctttgtgtatgatctcgtgaaatcttgagagaaactgaatgacgaatgaaactattgttcctgtttcacacagaagaaaactgaggttaaaaggggttggcactcatcatgagcccctgttctcattctgcaaatggtgaagctctctattgtcctgaccccacagttcctgtcccatgaccagggccagctcaccaaggagctgcagcagcatgtaaagtcagtgacatgcccatgcgagtacctgaggaaggttgatggacggatggctacatggatgtgatggagatggtttactatcgggaccttccgcaccctgctgatgttttgttgcttaggatatgaatggctgagcggaggctgtaaaacctggcactctgcttgggttatcaatactctggctgaccatcatcatcgtgggactgactttggtggaagtccttggttacatgtcattattgcgtttccgacaagttataaagttgtcattaccctctggatagtttacctttgggtgtctctcctgaagactatcttctggtctcgaaatggacatgatggatccacggatgtacagcagagagcctggaggtccaaccgccgtagacaggaa

SEQ ID NO: 160646 - DNA, 490 bp, Homo sapiens
  Payload ID: 11397
  Gene Symbol: NPIPB3
  Gene Name: nuclear pore complex interacting protein family, member B3
  ENST ID: ENST00000534903
  CDS Start-End: 177-490
tttaaaggatgactgatggtccttggaagagaaacagtaaacaaataaggtatgatctcgtgaaatcttgagagaaactgaatgacgaatgaaactattgttcctgtttcacacagaagaaaactgaggttaaaaggggttggcactcatcatgagcccctgttctcattctgcaaatggtgaagctctctattgtcctgaccccacagttcctgtcccatgaccagggccagctcaccaaggagctgcagcagcatgtaaagtcagtgacatgcccatgcgagtacctgaggaaggttatcaatactctggctgaccatcatcatcgtgggactgactttggtggaagtccttggttacatgtcattattgcgtttccgacaagttataaagttgtcattaccctctggatagtttacctttgggtgtctctcctgaagactatcttctggtctcgaaatggacatgatggatccacggatgtacagca

SEQ ID NO: 160647 - DNA, 1342 bp, Homo sapiens
  Payload ID: 11397
  Gene Symbol: NPIPB3
  Gene Name: nuclear pore complex interacting protein family, member B3
  Uniprot ID: Q92617
  ENST ID: ENST00000542817
  CDS Start-End: 33-1295
aaacattccctcctttggccctacaggtcagaatggcggcagcggagcatcgtcattcttcaggattgccctactggccctacctcacagctgaaactttaaaaaacaggatgggccaccagccacctcctccaactcaacaacattctataactgataactccctgagcctcaagacacctcccgagtgtctgctcactccccttccaccctcagcggatgataatctcaagacacctcccgagtgtgtgctcactccccttccaccctcagcggatgataatctcaagacacctcccgagtgtgtgctcactccccttccaccctcagcggatgataatctcaagacacctcctgagtgtctgctcactccccttccaccctcagcggatgataatctcaagacacctcccgagtgtctactcactccccttccaccctcagctctaccctcagctccaccctcagcggatgataatctcaagacacgtgccgagtgtctgctccatccccttccaccctcagcggatgataatctcaagacaccttccgagcgtcagctcactccccttccaccctcagctccaccctcagcagatgataatatcaagacacctgccgagcgtctgcgggggccgcttccaccctcagcggatgataatctcaagacaccttccgagcgtcagctcactccccttccaccctcagctccaccctcagcagatgataatatcaagacacctgctgagcgtctgcgggggccgcttccaccctcagcggatgataatctcaagacaccttccgagcgtcagctcactccccttccaccctcagctccaccctcagcagatgataatatcaagacacctgccgagcgtctgcgggggccgcttccaccctcagccgatgataatctcaagacacctcccttagctactcaggaggctgaggcagaaaaaccacgcaaacccaagaggcagagggcggctgagatggaaccacctcccgaacccaagaggcggagggtcggtgacgtggaaccgtcacgcaaacccaagaggcggagggccgctgacgtggaaccatcatcacccgaacccaagaggcggagggtcggtgatgtggaaccgtcacgcaaacccaagaggcggagggccgctgacgtggaaccatcatcacccgaacccaagaggcggagggtcggtgacgtggaaccgtcacgcaaacccaagaggcggagggccgctgacgtggaaccatcattacccgaacccaagaggcggaggttgagctgagaagaggccagtgcactcaagcctgagcaataagaataaaaccgagt

SEQ ID NO: 160648 - DNA, 1254 bp, Homo sapiens
  Payload ID: 11397
  Gene Symbol: NPIPB3
  Gene Name: nuclear pore complex interacting protein family, member B3
  ENST ID: ENST00000504841
  CDS Start-End: 181-1254
ttgcatggcatgaagtagaaattcaaagtacaggaatttgaacttggttctgtccttttctgaagcccttgaccactatagactcaaacatcaccttgtttttccactcattcaacacttttttttttaaattatctaataggttggcactcatcatgagcccctgttctcattctgcaaatggtgaagctctctattgtcctgaccccacagttcctgtcccatgaccagggccagctcaccaaggagctgcagcagcatgtaaagtcagtgacatgcccatgcgagtacctgaggaaggttatcaatactctggctgaccatcatcatcgtgggactgactttggtggaagtccttggttacatgtcattattgcgtttccgacaagttataaagttgtcattaccctctggatagtttacctttgggtgtctctcctgaagactatcttctggtctcgaaatggacatgatggatccacggatgtacagcagagagcctggaggtccaaccgccgtagacaggaagggctgaggtccatttgtatgcacacaaagaaaagagtttcttcctttcgaggaaataaaattggcctgaaagacgtcattactctacggagacatgtggaaacaaaagttagagctaaaatccgtaagaggaaggtgacaacgaaaatcaaccatcatgacaaaatcaatggaaagaggaagaccgccagaaaacagaaaatgtttcaacgtgcgcaagagttgcggcggcgagcagaggactaccacaaatgcaaaatccccccttctgcaagaaaggctctttgcaactgggtcagaatggcggcagcggagcatcgtcattcttcaggattgccctactggccctacctcacagctgaaactttaaaaaacaggatgggccaccagccacctcctccaactcaacaacattctataactgataactccctgagcctcaagacacctcccgagtgtctgctcactccccttccaccctcagcggatgataatctcaagacacctcccgagtgtgtgctcactccccttccaccctcagcggatgataatctcaagacacctcccgagtgtgtgctcactccccttccaccctcagcggatgataatctcaagacacctcctgagtgtctgctcactccccttccaccctcagcggatgataatctcaagacacctcccgagtgtctactcactccccttccaccctcagctctaccctcagct

SEQ ID NO: 160649 - DNA, 767 bp, Homo sapiens
  Payload ID: 11398
  Gene Symbol: NPIPB4
  Gene Name: nuclear pore complex interacting protein family, member B4
  ENST ID: ENST00000341400
  CDS Start-End: 280-767
tatgatctcgtgaaatcttgagagaaactgaatgacgaatgaaactattgttcctgtttcacacagaagaaaactgaggttaaaaggggtaaagtaattttgcatggcatgaagtagaaattcaaagtacaggaatttgaacttggttctgtccttttctgaagcccttgaccactatagactcaaacatcaccttgtttttccactcattcaacacttttttttttaaattatctaataggttggcactcatcatgagcccctgttctcattctgcaaatggtgaagctctctattgtcctgaccccacagttcctgtcccatgaccagggccagctcaccaaggagctgcagcagcatgtaaagtcagtgacatgcccatgcgagtacctgaggaaggttatcaatactctggctgaccatcatcatcgtgggactgactttggtggaagtccttggttacatgtcattattgcatttccgacaagttataaagttgtcattaccctctggatagtttacctttgggtgtctctcctgaagactatcttctggtctcgaaatggacatgatggatccacggatgtacagcagagagcctggaggtccaaccgccgtagacaggaagggctgaggtccatttgtatgcacacaaagaaaagagtttcttcctttcgaggaaataaaattgtcctgaaagacgtcattactctacggagacatgtggaaacaaaagttagagctaaaatccgtaagaggaaggtgac

SEQ ID NO: 160650 - DNA, 3606 bp, Homo sapiens
  Payload ID: 11398
  Gene Symbol: NPIPB4
  Gene Name: nuclear pore complex interacting protein family, member B4
  Uniprot ID: C9JG80
  ENST ID: ENST00000415645
  CDS Start-End: 41-3457
aggttggcactcatcatgagcccctgttctcattctgcaaatggtgaagctctctattgtcctgaccccacagttcctgtcccatgaccagggccagctcaccaaggagctgcagcagcatgtaaagtcagtgacatgcccatgcgagtacctgaggaaggttatcaatactctggctgaccatcatcatcgtgggactgactttggtggaagtccttggttacatgtcattattgcatttccgacaagttataaagttgtcattaccctctggatagtttacctttgggtgtctctcctgaagactatcttctggtctcgaaatggacatgatggatccacggatgtacagcagagagcctggaggtccaaccgccgtagacaggaagggctgaggtccatttgtatgcacacaaagaaaagagtttcttcctttcgaggaaataaaattgtcctgaaagacgtcattactctacggagacatgtggaaacaaaagttagagctaaaatccgtaagaggaaggtgacaacgaaaatcaaccatcatgacaaaatcaatggaaagaggaagaccgccagaaaacagaaaatgtttcaacgtgcgcaagagttgcggcggcgagcagaggactaccacaaatgcaaaatccccccttctgcaagaaaggctctttgcaactgggtcagaatggcggcagcggagcatcgtcattcttcaggattgccctactggccctacctcacagctgaaactttaaaaaacaggatgggccaccagccacctcctccaactcaacaacattctataactgataactccctgagcctcaagacacctcccgagtgtctgctcactccccttccaccctcagcggatgataatctcaagacacctcccgagtgtgtgctcactccccttccaccctcagcggatgataatctcaagacacctcccgagtgtgtgctcactccccttccaccctcagcggatgataatctcaagacacctcctgagtgtctcctcactccccttccaccctcagcggatgataaactcaagacacctcccgagtgtctgctcactccccttccaccctcagctctaccctcagctccaccctcagcggatgataatctcaagacacgtgccgagtgtctgctccatccccttccaccctcagcggatgataatctcaagacaccttccgagcgtcagctcactccccttccaccctcagctccaccctcagcagatgataatatcaagacacctgccgagcgtctgcgggggccgcttccaccctcagcggatgataatctcaagacaccttccgagcgtcagctcactccccttccaccctcagctccaccctcagcagatgataatatcaagacacctgctgagcgtctgcgggggccgcttccaccctcagcggatgataatctcaagacaccttccgagcgtcagctcactccccttccaccctcagctccaccctcagcagatgataatatcaagacacctgccgagcgtctgcgggggccgcttccaccctcagcggatgataatctcaagacaccttccgagcgtcagctcactccccttccaccctcagctccaccctcagcagatgataatatcaagacacctgccgagcgtctgcgggggccgcttccaccctcagcggatgataatctcaagacaccttccgagcgtcagctcactccccttccaccctcagctccaccctcagcagatgataatatcaagacacctgccgagcgtctgcgggggccgcttccaccctcagcggatgataatctcaagacaccttccgagcgtcagctcactccccttccaccctcagctccaccctcagcagatgataacatcaagacacctgccttccaccctcagcggatgataatctcaagacaccttccgagcgtcagctcactccccttccaccctcagctccaccctcagcagatgataatatcaagatacctgctgagcgtctgcggattccgcttccaccatcagccgatgataatctcaagacaccttccgagcgtcagctcactccccttccaccctcagctccaccctcagcagatgataatatcaagacacctgccgagcgtctgcgggggccgcttccaccctcagcggatgataatctcaagacaccttccgagcgtcagctcactccccttccaccctcagctccaccctcagcagatgataatatcaagacacctgccgagcgtctgcgggggccgcttccaccctcagcggatgataatctcaagacaccttccgagcgtcagctcactccccttccaccctcagctccaccctcagcagatgataatatcaagacacctgccgagcgtctgcgggggccgcttccaccctcagcggatgataatctcaagacaccttccgagcgtcagctcactccccttccaccctcagctccaccctcagcagatgataatatcaagacacctgccgagcgtctgcgggggccgcttccaccctcagcggatgataatctcaagacaccttccgagcgtcagctcactccccttccaccctcagctccaccctcagcagatgataatatcaagacacctgccgagcgtctgcggggagcgtctgcgggggccgcttccaccctcagcggatgataatctcaagacaccttccgagcgtcagctcactccccttccaccctcagctccaccctcagcagatgataatatcaagacacctgccgagcgtctgcgggggccgcttccaccctcagcggatgataatctcaagacaccttccgagcgtcagctcactccccttccaccctcagctccaccctcagcagatgataatatcaagacacctgccgagcgtctgcgggggccgcttccaccctcagcggatgataatctcaagacaccttccgagcgtcagctcactccccttccaccctcagctccaccctcagcagatgataatatcaagacacctgccgagcgtctgcgggggccgcttccaccctcagccgatgataatctcaagacacctcccttagctactcaggaggctgaggcagaaaaaccacgcaaacccaagaggcagagggcggctgagatggaaccacctcccgaacccaagaggcggagggtcggtgacgtggaaccgtcacgcaaacccaagaggcggagggccgctgacgtggaaccatcatcacccgaacccaagaggcggagggtcggtgatgtggaaccgtcacgcaaacccaagaggcggagggccgctgacgtggaaccatcatcacccgaacccaagaggcggagggtcggtgacgtggaaccgtcacgcaaacccaagaggcggagggccgctgacgtggaaccatcattacccgaacccaagaggcggaggttgagctgagaagaggccagtgcactcaagcctgagcaataagaataaaaccgagtagaacaaaataaaaaattcaaaaaacaaaacaaaacccacactccaaaaactaacaaagaataaataaataatataaaaataaaataaatactgcagtcctt

SEQ ID NO: 160651 - DNA, 560 bp, Homo sapiens
  Payload ID: 11398
  Gene Symbol: NPIPB4
  Gene Name: nuclear pore complex interacting protein family, member B4
  ENST ID: ENST00000520808
  CDS Start-End: 130-279
aggtatgatctcgtgaaatcttgagagaaactgaatgacgaatgaaactattgttcctgtttcacacagaagaaaactgaggttaaaaggggttggcactcatcatgagcccctgttctcattctgcaaatggtgaagctctctattgtcctgaccccacagttcctgtcccatgaccagggccagctcaccaaggagctgcagcagcatgtaaagtcagtgacatgcccatgcgagtacctgaggaaggttgatggacggatggctacatggatgtgatggagatggtttactatcgggaccttccgcaccctgctgatgttttgttgcttaggatatgaatggctgagcggaggctgtaaaacctggcactctgcttgggttatcaatactctggctgaccatcatcatcgtgggactgactttggtggaagtccttggttacatgtcattattgcatttccgacaagttataaagttgtcattaccctctggatagtttacctttgggtgtctctcctgaagactatcttctggtctcgaaatggacatgatggatc

SEQ ID NO: 160652 - DNA, 576 bp, Homo sapiens
  Payload ID: 11398
  Gene Symbol: NPIPB4
  Gene Name: nuclear pore complex interacting protein family, member B4
  ENST ID: ENST00000518761
  CDS Start-End: 132-576
ataggtatgatctcgtgaaatcttgagagaaactgaatgacgaatgaaactattgttcctgtttcacacagaagaaaactgaggttaaaaggggttggcactcatcatgagcccctgttctcattctgcaaatggtgaagctctctattgtcctgaccccacagttcctgtcccatgaccagggccagctcaccaaggagctgcagcagcatgtaaagtcagtgacatgcccatgcgagtacctgaggaaggttatcaatactctggctgaccatcatcatcgtgggactgactttggtggaagtccttggttacatgtcattattgcatttccgacaagttataaagttgtcattaccctctggatagtttacctttgggtgtctctcctgaagactatcttctggtctcgaaatggacatgatggatccacggatgtacagcagagagcctggaggtccaaccgccgtagacaggaagggctgaggtccatttgtatgcacacaaagaaaagagtttcttcctttcgaggaaataaaattgtcctgaaagacgtcattactctacggagacatg

SEQ ID NO: 160653 - DNA, 519 bp, Homo sapiens
  Payload ID: 11398
  Gene Symbol: NPIPB4
  Gene Name: nuclear pore complex interacting protein family, member B4
  ENST ID: ENST00000529969
  CDS Start-End: 63-212
ttaaatgacttggatgttttataggttggcactcatcatgagcccctgttctcattctgcaaatggtgaagctctctattgtcctgaccccacagttcctgtcccatgaccagggccagctcaccaaggagctgcagcagcatgtaaagtcagtgacatgcccatgcgagtacctgaggaaggttgatggacggatggctacatggatgtgatggagatggtttactatcgggaccttccgcaccctgctgatgttttgttgcttaggatatgaatggctgagcggaggctgtaaaacctggcactctgcttgggtatgaggttcttcctgccatcctgccatcatttgttttttatgttttgtcgccataagtgaccttgaggaaccctgggagctcaggaaggaaggagcgcccagaagcagggacagggagctggttggggaggaccagaaatcaggttatcaatactctggctgaccatcatcatcgtgggactgactttggtggaagtccttgg

SEQ ID NO: 160654 - DNA, 1342 bp, Homo sapiens
  Payload ID: 11398
  Gene Symbol: NPIPB4
  Gene Name: nuclear pore complex interacting protein family, member B4
  ENST ID: ENST00000537951
  CDS Start-End: 33-1295
aaacattccctcctttggccctacaggtcagaatggcggcagcggagcatcgtcattcttcaggattgccctactggccctacctcacagctgaaactttaaaaaacaggatgggccaccagccacctcctccaactcaacaacattctataactgataactccctgagcctcaagacacctcccgagtgtctgctcactccccttccaccctcagcggatgataatctcaagacacctcccgagtgtgtgctcactccccttccaccctcagcggatgataatctcaagacacctcccgagtgtgtgctcactccccttccaccctcagcggatgataatctcaagacacctcctgagtgtctcctcactccccttccaccctcagcggatgataaactcaagacacctcccgagtgtctgctcactccccttccaccctcagctctaccctcagctccaccctcagcggatgataatctcaagacacgtgccgagtgtctgctccatccccttccaccctcagcggatgataatctcaagacaccttccgagcgtcagctcactccccttccaccctcagctccaccctcagcagatgataatatcaagacacctgccgagcgtctgcgggggccgcttccaccctcagcggatgataatctcaagacaccttccgagcgtcagctcactccccttccaccctcagctccaccctcagcagatgataatatcaagacacctgctgagcgtctgcgggggccgcttccaccctcagcggatgataatctcaagacaccttccgagcgtcagctcactccccttccaccctcagctccaccctcagcagatgataatatcaagacacctgccgagcgtctgcgggggccgcttccaccctcagccgatgataatctcaagacacctcccttagctactcaggaggctgaggcagaaaaaccacgcaaacccaagaggcagagggcggctgagatggaaccacctcccgaacccaagaggcggagggtcggtgacgtggaaccgtcacgcaaacccaagaggcggagggccgctgacgtggaaccatcatcacccgaacccaagaggcggagggtcggtgatgtggaaccgtcacgcaaacccaagaggcggagggccgctgacgtggaaccatcatcacccgaacccaagaggcggagggtcggtgacgtggaaccgtcacgcaaacccaagaggcggagggccgctgacgtggaaccatcattacccgaacccaagaggcggaggttgagctgagaagaggccagtgcactcaagcctgagcaataagaataaaaccgagt

SEQ ID NO: 160655 - DNA, 513 bp, Homo sapiens
  Payload ID: 11398
  Gene Symbol: NPIPB4
  Gene Name: nuclear pore complex interacting protein family, member B4
  ENST ID: ENST00000536041
  CDS Start-End: 173-322
atgaattttaaaggatgactgatggtccctggaagagaaacagtaaacaaataaggtatgatctcgtgaaatcttgagagaaactgaatgacgaatgaaactattgttcctgtttcacacagaagaaaactgaggttggcactcatcatgagcccctgttctcattctgcaaatggtgaagctctctattgtcctgaccccacagttcctgtcccatgaccagggccagctcaccaaggagctgcagcagcatgtaaagtcagtgacatgcccatgcgagtacctgaggaaggttgatggacggatggctacatggatgtgatggagatggtttactatcgggaccttccgcaccctgctgatgttttgttgcttaggatatgaatggctgagcggaggctgtaaaacctggcactctgcttgggttatcaatactctggctgaccatcatcatcgtgggactgactttggtggaagtccttggttacatgtcattattgcatttccgacaag

SEQ ID NO: 160656 - DNA, 513 bp, Homo sapiens
  Payload ID: 11398
  Gene Symbol: NPIPB4
  Gene Name: nuclear pore complex interacting protein family, member B4
  ENST ID: ENST00000543654
  CDS Start-End: 244-513
attagcttttaatcattgacttctagcacagttatatgatcagaaacatgctgtgtgatttgattgctctcaaatatattgagatttgctggaacaaaataagtcaggttaatttttgtaaatgtaccaggcatgcttaaaatgaatgtatctacatttgttcccgagatacaggttgatggacggatggctacatggatgtgatggagatggtttactatcgggaccttccgcaccctgctgatgttttgttgcttaggatatgaatggctgagcggaggctgtaaaacctggcactctgcttgggttatcaatactctggctgaccatcatcatcgtgggactgactttggtggaagtccttggttacatgtcattattgcatttccgacaagttataaagttgtcattaccctctggatagtttacctttgggtgtctctcctgaagactatcttctggtctcgaaatggacatgatggatccacggatgtacagcagagagcctggagg

SEQ ID NO: 160657 - DNA, 544 bp, Homo sapiens
  Payload ID: 11398
  Gene Symbol: NPIPB4
  Gene Name: nuclear pore complex interacting protein family, member B4
  ENST ID: ENST00000541674
  CDS Start-End: 458-544
tttttagatgctaaaacttatgggtgaaagtggattaaatgtagccaaatgcaacatcaaaatcttcaggcacaaaaacccattaactttttcatactctcagaaggtgaacctaatttcaaatgaaagctgcctccagaatatattgttaagcgtattctagatataattcattttggcaaacatactgtagaaattcacataacattttactgtactaaaagtaaattgcccatgtaacaaaaaatatcttttcagagcttgaaatgaattttaaaggatgactgatggtccctggaagagaaacagtaaacaaataaggtttcaggcacagaactgtatatccaataatagtgaaatggatcccactaattatgacagaaatgatgatacatttaaatgacttggatgttttataggttggcactcatcatgagcccctgttctcattctgcaaatggtgaagctctctattgtcctgaccccacagttcctgtcccatgaccagggccagctcaccaaggagctgcagcagcatgtaaag

SEQ ID NO: 160658 - DNA, 910 bp, Homo sapiens
  Payload ID: 11398
  Gene Symbol: NPIPB4
  Gene Name: nuclear pore complex interacting protein family, member B4
  ENST ID: ENST00000542133
  CDS Start-End: 62-184
gtttcacacagaagaaaactgaggttggcactcatcatgagcccctgttctcattctgcaaatggtgaagctctctattgtcctgaccccacagttcctgtcccatgaccagggccagctcaccaaggagctgcagcagcatgtaaagtcagtgacatgcccatgcgagtacctgaggaagtgaccttgaggaaccctgggagctcaggaaggaaggagcgcccagaagcagggacagggagctggttggggaggaccagaaatcaggttatcaatactctggctgaccatcatcatcgtgggactgactttggtggaagtccttggttacatgtcattattgcatttccgacaagttataaagttgtcattaccctctggatagtttacctttgggtgtctctcctgaagactatcttctggtctcgaaatggacatgatggatccacggatgtacagcagagagcctggaggtccaaccgccgtagacaggaagggctgaggtccatttgtatgcacacaaagaaaagagtttcttcctttcgaggaaataaaattgtcctgaaagacgtcattactctacggagacatgtggaaacaaaagttagagctaaaatccgtaagaggaaggtgacaacgaaaatcaaccatcatgacaaaatcaatggaaagaggaagaccgccagaaaacagaaaatgtttcaacgtgcgcaagagttgcggcggcgagcagaggactaccacaaatgcaaaatccccccttctgcaagaaaggctctttgcaactgggtcagaatggcggcagcggagcatcgtcattcttcaggattgccctactggccctacctcacagctgaaactttaaaaaacaggatgggccaccagccacctcctccaactcaacaacatt

SEQ ID NO: 160659 - DNA, 400 bp, Homo sapiens
  Payload ID: 11398
  Gene Symbol: NPIPB4
  Gene Name: nuclear pore complex interacting protein family, member B4
  ENST ID: ENST00000544693
  CDS Start-End: 319-400
attacagctattacaaatctcctaagatgtctcgggtagtgtattagttacttttcatactgctatgaagaaatactggaaactgggtaatttataaagaaaaagaggtttaatgtactcacagttccacaaggctggagaggcctcagaatcatggtggaaggcaaagaaggagcaaaaaggtttcaggcacagaactgtatatccaataatagtgaaatggatcccactaattatgacagaaatgatgatacatttaaatgacttggatgttttataggttggcactcatcatgagcccctgttctcattctgcaaatggtgaagctctctattgtcctgaccccacagttcctgtcccatgaccagggccagctcaccaaggagctgcagcagcatg

SEQ ID NO: 160660 - DNA, 1216 bp, Homo sapiens
  Payload ID: 11398
  Gene Symbol: NPIPB4
  Gene Name: nuclear pore complex interacting protein family, member B4
  ENST ID: ENST00000614197
  CDS Start-End: 55-807
agccacctccacctctgtcctggccgcctcagggcgccctgaaaggaccaggacatgcgggtgcggtggatgctcttttggctcctctttgggctcctactggaatttatcagccatcagtgcatctctgttatcaatactctggctgaccatcatcatcgtgggactgactttggtggaagtccttggttacatgtcattattgcatttccgacaagttataaagttgtcattaccctctggatagtttacctttgggtgtctctcctgaagactatcttctggtctcgaaatggacatgatggatccacggatgtacagcagagagcctggaggtccaaccgccgtagacaggaaggaaataaaattgtcctgaaagacgtcattactctacggagacatgtggaaacaaaagttagagctaaaatccgtaagaggaaggtgacaacgaaaatcaaccatcatgacaaaatcaatggaaagaggaagaccgccagaaaacagaaaatgtttcaacgtgcgcaagagttgcggcggcgagcagaggactaccacaaatgcaaaatccccccttctgcaagaaaggctctttgcaactgggtaagtttgcttgttttccttgcttttggacatagtctgccaggtcaggacatggatacatttttctccctacagctctgtgctcaagccctgcagagggagatggcagagagaaaggctgcctacaagcatcacagtcccatccctgttggtaaccgtgttgcgcaaaaacaccttcatccccacccagtggggcccctgatctaatattctaagtgtcagaggttccgtatttgtaatagcagatgggccctgactgtaaactagtgaagagtgaatgtaacttattacccacagggacaattccaaatgaaggccttaaatgatgctcagctaagctggttcttgtgtggcctctgtaccttcaaaagctgccgagtcctatgattacacgtgatgggacttgtacacttgaagtgaaacacagttttaaaacttgctttgtttagaattcccacctcatttttccatggacaaaagtattctttatgtcctagtgcacttacaatttggtattacctgggagtgaaaagaaatattacagccatgcctaagtgacttcttgaggtgagattgttctgtcagaaaaccctctcccagttcccctgcagctctt

SEQ ID NO: 160661 - DNA, 1342 bp, Homo sapiens
  Payload ID: 11399
  Gene Symbol: NPIPB5
  Gene Name: nuclear pore complex interacting protein family, member B5
  ENST ID: ENST00000357370
  CDS Start-End: 33-1295
aaacattccctcctttggccctacaggtcagaatggcggcagcggagcatcgtcattcttcaggattgccctactggccctacctcacagctgaaactttaaaaaacaggatgggccaccagccacctcctccaactcaacaacattctataactgataactccctgagcctcaagacacctcccgagtgtctgctcactccccttccaccctcagcggatgataatctcaagacacctcccgagtgtgtgctcactccccttccaccctcagcggatgataatctcaagacacctcccgagtgtgtgctcactccccttccaccctcagcggatgataatctcaagacacctcctgagtgtctgctcactccccttccaccctcagcggatgataatctcaagacacctcccgagtgtctgctcactccccttccaccctcagctctaccctcagctccaccctcagcggatgataatctcaagacacgtgccgagtgtctgctccatccccttccaccctcagcggatgataatctcaagacaccttccgagcgtcagctcactccccttccaccctcagctccaccctcagcagatgataatatcaagacacctgccgagcgtctgcgggggccgcttccaccctcagcggatgataatctcaagacaccttccgagcgtcagctcactccccttccaccctcagctccaccctcagcagatgataatatcaagacacctgctgagcgtctgcgggggccgcttccaccctcagcggatgataatctcaagacaccttccgagcgtcagctcactccccttccaccctcagctccaccctcagcagatgataatatcaagacacctgccgagcgtctgcgggggccgcttccaccctcagccgatgataatctcaagacacctcccttagctactcaggaggctgaggcagaaaaaccacgcaaacccaagaggcagagggcggctgagatggaaccacctcccgaacccaagaggcggagggtcggtgacgtggaaccgtcacgcaaacccaagaggcggagggccgctgacgtggaaccatcatcacccgaacccaagaggcggagggtcggtgatgtggaaccgtcacgcaaacccaagaggcggagggccgctgacgtggaaccatcatcacccgaacccaagaggcggagggtcggtgacgtggaaccgtcacgcaaacccaagaggcggagggccgctgacgtggaaccatcattacccgaacccaagaggcggaggttgagctgagaagaggccagtgcactcaagcctgagcaataagaataaaaccgagt

SEQ ID NO: 160662 - DNA, 3660 bp, Homo sapiens
  Payload ID: 11399
  Gene Symbol: NPIPB5
  Gene Name: nuclear pore complex interacting protein family, member B5
  ENST ID: ENST00000451409
  CDS Start-End: 280-3660
tatgatctcgtgaaatcttgagagaaactgaatgacgaatgaaactattgttcctgtttcacacagaagaaaactgaggttaaaaggggtaaagtaattttgcatggcatgaagtagaaattcaaagtacaggaatttgaacttggttctgtccttttctgaagcccttgaccactatagactcaaacatcaccttgtttttccactcattcaacacttttttttttaaattatctaataggttggcactcatcatgagcccctgttctcattctgcaaatggtgaagctctctattgtcctgaccccacagttcctgtcccatgaccagggccagctcaccaaggagctgcagcagcatgtaaagtcagtgacatgcccatgcgagtacctgaggaaggttatcaatactctggctgaccatcatcatcgtgggactgactttggtggaagtccttggttacatgtcattattgcgtttccgacaagttataaagttgtcattaccctctggatagtttacctttgggtgtctctcctgaagactatcttctggtctcgaaatggacatgatggatccacggatgtacagcagagagcctggaggtccaaccgccgtagacaggaagggctgaggtccatttgtatgcacacaaagaaaagagtttcttcctttcgaggaaataaaattggcctgaaagacgtcattactctacggagacatgtggaaacaaaagttagagctaaaatccgtaagaggaaggtgacaacgaaaatcaaccatcatgacaaaatcaatggaaagaggaagaccgccagaaaacagaaaatgtttcaacgtgcgcaagagttgcggcggcgagcagaggactaccacaaatgcaaaatccccccttctgcaagaaaggctctttgcaactgggtcagaatggcggcagcggagcatcgtcattcttcaggattgccctactggccctacctcacagctgaaactttaaaaaacaggatgggccaccagccacctcctccaactcaacaacattctataactgataactccctgagcctcaagacacctcccgagtgtctgctcactccccttccaccctcagcggatgataatctcaagacacctcccgagtgtgtgctcactccccttccaccctcagcggatgataatctcaagacacctcccgagtgtgtgctcactccccttccaccctcagcggatgataatctcaagacacctcctgagtgtctgctcactccccttccaccctcagcggatgataatctcaagacacctcccgagtgtctgctcactccccttccaccctcagctctaccctcagctccaccctcagcggatgataatctcaagacacgtgccgagtgtctgctccatccccttccaccctcagcggatgataatctcaagacaccttccgagcgtcagctcactccccttccaccctcagctccaccctcagcagatgataatatcaagacacctgccgagcgtctgcgggggccgcttccaccctcagcggatgataatctcaagacaccttccgagcgtcagctcactccccttccaccctcagctccaccctcagcagatgataatatcaagacacctgctgagcgtctgcgggggccgcttccaccctcagcggatgataatctcaagacaccttccgagcgtcagctcactccccttccaccctcagctccaccctcagcagatgataatatcaagacacctgccgagcgtctgcgggggccgcttccaccctcagcggatgataatctcaagacaccttccgagcgtcagctcactgcccttccaccctcagcagatgataatatcaagacacctgccgagcgtctgcgggggccgcttccaccctcagcggatgataatctcaagacaccttccgagcgtcagctcactccccttccaccctcagctccaccctcagcagatgataatatcaagacacctcttccaccctcagcggatgatctcaagacaccttccgagcgtcagctcactccccttccaccctcagctccaccctcagcagatgataatatcaagatacctggcttccaccatcagccgatgataatctcaagacaccttccgagcgtcagctcactccccttccaccctcagctccaccctcagcagatgataatatcaagacacctgccgagcgtctgcgggggccgcttccaccctgagcggatgataatctcaagacaccttccgagcgtcagctcactccccttccaccctcagctccaccctcagcagatgataatatcaagacacctgccgagcgtctgcgggggccgcttccaccctcagcagatgataatctcaagacaccttccgagcgtcagctcactccccttccaccctcagctccaccctcagcagatgataatatcaagacacctgccgagcgtctgcgggggccgcttccaccctcagcggatgataatctcaagacaccttccgagcgtcagctcactccccttccaccctcagctccaccctcagcagatgataatatcaagacacctgccgagcgtctgcgggggccgcttccaccctcagcagatgataatctcaagacaccttccgagcgtcagctcactccccttccaccctcagctccaccctcagcagatgataatatcaagacacctgccgagcgtctgcgggggccgcttccaccctcagcggatgataatctcaagacaccttccgagcgtcagctcactccctttccaccctcagctccaccctcagcagatgataatatcaagacacctgccgagcgtctgcggggagcgtctgcgggggccgcttccaccctcagcggatgataatctcaagacaccttccgagcgtcagctcactccccttccaccctcagctccaccctcagcagatgataatatcaagacacctgccgagcgtctgcgggggccgcttccaccctcagcggatgataatctcaagacaccttccgagcgtcagctcactccccttccaccctcagctccaccctcagcagatgataatatcaagacacctgccgagcgtctgcgggggccgcttccaccctcagcggatgataatctcaagacaccttccgagcgtcagctcactccccttccaccctcagctccaccctcagcagatgataatatcaagacacctgccgagcgtctgcgggggccgcttccaccctcagccgatgataatctcaagacacctcccttagctactcaggaggctgaggcagaaaaaccacgcaaacccaagaggcagagggcggctgagatggaaccacctcccgaacccaagaggcggagggtcggtgacgtggaaccgtcacgcaaacccaagaggcggagggccgctgacgtggaaccatcatcacccgaacccaagaggcggagggtcggtgatgtggaaccgtcacgcaaacccaagaggcggagggccgctgacgtggaaccatcatcacccgaacccaagaggcggagggtcggtgacgtggaaccgtcacgcaaacccaagaggcggagggccgctgacgtggaaccatcattacccgaacccaagaggcggaggttgagctga

SEQ ID NO: 160663 - DNA, 828 bp, Homo sapiens
  Payload ID: 11399
  Gene Symbol: NPIPB5
  Gene Name: nuclear pore complex interacting protein family, member B5
  ENST ID: ENST00000517347
  CDS Start-End: 43-192
ataggttggcactcatcatgagcccctgttctcattctgcaaatggtgaagctctctattgtcctgaccccacagttcctgtcccatgaccagggccagctcaccaaggagctgcagcagcatgtaaagtcagtgacatgcccatgcgagtacctgaggaaggttgatggacggatggctacatggatgtgatggagatggtttactatcgggaccttccgcaccctgctgatgttttgttgcttaggatatgaatggctgagcggaggctgtaaaacctggcactctgcttgggtatgaggttcttcctgccatcctgccatcatttgttttttatgttttgtcgccataagtgaccttgaggaaccctgggagctcaggaaggaaggagcgcccagaagcagggacagggagctggttggggaggaccagaaatcaggttatcaatactctggctgaccatcatcatcgtgggactgactttggtggaagtccttggttacatgtcattattgcgtttccgacaagttataaagttgtcattaccctctggatagtttacctttgggtgtctctcctgaagactatcttctggtctcgaaatggacatgatggatccacggatgtacagcagagagcctggaggtccaaccgccgtagacaggaagggctgaggtccatttgtatgcacacaaagaaaagagtttcttcctttcgaggaaataaaattggcctgaaagacgtcattactctacggagacatgtggaaacaaaagttagagctaaaatccgtaagaggaaggtgacaacgaaaatcaaccatcatga

SEQ ID NO: 160664 - DNA, 3797 bp, Homo sapiens
  Payload ID: 11399
  Gene Symbol: NPIPB5
  Gene Name: nuclear pore complex interacting protein family, member B5
  ENST ID: ENST00000521555
  CDS Start-End: 128-277
gtatgatctcgtgaaatcttgagagaaactgaatgacgaatgaaactattgttcctgtttcacacagaagaaaactgaggttaaaaggggttggcactcatcatgagcccctgttctcattctgcaaatggtgaagctctctattgtcctgaccccacagttcctgtcccatgaccagggccagctcaccaaggagctgcagcagcatgtaaagtcagtgacatgcccatgcgagtacctgaggaaggttgatggacggatggctacatggatgtgatggagatggtttactatcgggaccttccgcaccctgctgatgttttgttgcttaggatatgaatggctgagcggaggctgtaaaacctggcactctgcttgggttatcaatactctggctgaccatcatcatcgtgggactgactttggtggaagtccttggttacatgtcattattgcgtttccgacaagttataaagttgtcattaccctctggatagtttacctttgggtgtctctcctgaagactatcttctggtctcgaaatggacatgatggatccacggatgtacagcagagagcctggaggtccaaccgccgtagacaggaagggctgaggtccatttgtatgcacacaaagaaaagagtttcttcctttcgaggaaataaaattggcctgaaagacgtcattactctacggagacatgtggaaacaaaagttagagctaaaatccgtaagaggaaggtgacaacgaaaatcaaccatcatgacaaaatcaatggaaagaggaagaccgccagaaaacagaaaatgtttcaacgtgcgcaagagttgcggcggcgagcagaggactaccacaaatgcaaaatccccccttctgcaagaaaggctctttgcaactgggtcagaatggcggcagcggagcatcgtcattcttcaggattgccctactggccctacctcacagctgaaactttaaaaaacaggatgggccaccagccacctcctccaactcaacaacattctataactgataactccctgagcctcaagacacctcccgagtgtctgctcactccccttccaccctcagcggatgataatctcaagacacctcccgagtgtgtgctcactccccttccaccctcagcggatgataatctcaagacacctcccgagtgtgtgctcactccccttccaccctcagcggatgataatctcaagacacctcctgagtgtctgctcactccccttccaccctcagcggatgataatctcaagacacctcccgagtgtctgctcactccccttccaccctcagctctaccctcagctccaccctcagcggatgataatctcaagacacgtgccgagtgtctgctccatccccttccaccctcagcggatgataatctcaagacaccttccgagcgtcagctcactccccttccaccctcagctccaccctcagcagatgataatatcaagacacctgccgagcgtctgcgggggccgcttccaccctcagcggatgataatctcaagacaccttccgagcgtcagctcactccccttccaccctcagctccaccctcagcagatgataatatcaagacacctgctgagcgtctgcgggggccgcttccaccctcagcggatgataatctcaagacaccttccgagcgtcagctcactccccttccaccctcagctccaccctcagcagatgataatatcaagacacctgccgagcgtctgcgggggccgcttccaccctcagcggatgataatctcaagacaccttccgagcgtcagctcactgcccttccaccctcagcagatgataatatcaagacacctgccgagcgtctgcgggggccgcttccaccctcagcggatgataatctcaagacaccttccgagcgtcagctcactccccttccaccctcagctccaccctcagcagatgataatatcaagacacctgccttccaccctcagcggatgatctcaagacaccttccgagcgtcagctcactccccttccaccctcagctccaccctcagcagatgataatatcaagatacctgctgagcgtctgcggattccgcttccaccatcagccgatgataatctcaagacaccttccgagcgtcagctcactccccttccaccctcagctccaccctcagcagatgataatatcaagacacctgccgagcgtctgcgggggccgcttccaccctgagcggatgataatctcaagacaccttccgagcgtcagctcactccccttccaccctcagctccaccctcagcagatgataatatcaagacacctgccgagcgtctgcgggggccgcttccaccctcagcagatgataatctcaagacaccttccgagcgtcagctcactccccttccaccctcagctccaccctcagcagatgataatatcaagacacctgccgagcgtctgcgggggccgcttccaccctcagcggatgataatctcaagacaccttccgagcgtcagctcactccccttccaccctcagctccaccctcagcagatgataatatcaagacacctgccgagcgtctgcgggggccgcttccaccctcagcagatgataatctcaagacaccttccgagcgtcagctcactccccttccaccctcagctccaccctcagcagatgataatatcaagacacctgccgagcgtctgcgggggccgcttccaccctcagcggatgataatctcaagacaccttccgagcgtcagctcactccctttccaccctcagctccaccctcagcagatgataatatcaagacacctgccgagcgtctgcggggagcgtctgcgggggccgcttccaccctcagcggatgataatctcaagacaccttccgagcgtcagctcactccccttccaccctcagctccaccctcagcagatgataatatcaagacacctgccgagcgtctgcgggggccgcttccaccctcagcggatgataatctcaagacaccttccgagcgtcagctcactccccttccaccctcagctccaccctcagcagatgataatatcaagacacctgccgagcgtctgcgggggccgcttccaccctcagcggatgataatctcaagacaccttccgagcgtcagctcactccccttccaccctcagctccaccctcagcagatgataatatcaagacacctgccgagcgtctgcgggggccgcttccaccctcagccgatgataatctcaagacacctcccttagctactcaggaggctgaggcagaaaaaccacgcaaacccaagaggcagagggcggctgagatggaaccacctcccgaacccaagaggcggagggtcggtgacgtggaaccgtcacgcaaacccaagaggcggagggccgctgacgtggaaccatcatcacccgaacccaagaggcggagggtcggtgatgtggaaccgtcacgcaaacccaagaggcggagggccgctgacgtggaaccatcatcacccgaacccaagaggcggagggtcggtgacgtggaaccgtcacgcaaacccaagaggcggagggccgctgacgtggaaccatcattacccgaacccaagaggcggaggttgagctgagaagaggccagtgcactcaagcctgagcaataagaataaaaccgagtagaacaaaataaaaaattcaaaaaacaaaacaaaacccacactccaaaaactaacaaagaataaataaataatataaaaataaaataaa

SEQ ID NO: 160665 - DNA, 3569 bp, Homo sapiens
  Payload ID: 11399
  Gene Symbol: NPIPB5
  Gene Name: nuclear pore complex interacting protein family, member B5
  Uniprot ID: A8MRT5
  ENST ID: ENST00000517539
  CDS Start-End: 76-3477
tcctgtttcacacagaagaaaactgaggttaaaaggggttggcactcatcatgagcccctgttctcattctgcaaatggtgaagctctctattgtcctgaccccacagttcctgtcccatgaccagggccagctcaccaaggagctgcagcagcatgtaaagtcagtgacatgcccatgcgagtacctgaggaaggttatcaatactctggctgaccatcatcatcgtgggactgactttggtggaagtccttggttacatgtcattattgcgtttccgacaagttataaagttgtcattaccctctggatagtttacctttgggtgtctctcctgaagactatcttctggtctcgaaatggacatgatggatccacggatgtacagcagagagcctggaggtccaaccgccgtagacaggaagggctgaggtccatttgtatgcacacaaagaaaagagtttcttcctttcgaggaaataaaattggcctgaaagacgtcattactctacggagacatgtggaaacaaaagttagagctaaaatccgtaagaggaaggtgacaacgaaaatcaaccatcatgacaaaatcaatggaaagaggaagaccgccagaaaacagaaaatgtttcaacgtgcgcaagagttgcggcggcgagcagaggactaccacaaatgcaaaatccccccttctgcaagaaaggctctttgcaactgggtcagaatggcggcagcggagcatcgtcattcttcaggattgccctactggccctacctcacagctgaaactttaaaaaacaggatgggccaccagccacctcctccaactcaacaacattctataactgataactccctgagcctcaagacacctcccgagtgtctgctcactccccttccaccctcagcggatgataatctcaagacacctcccgagtgtgtgctcactccccttccaccctcagcggatgataatctcaagacacctcccgagtgtgtgctcactccccttccaccctcagcggatgataatctcaagacacctcctgagtgtctgctcactccccttccaccctcagcggatgataatctcaagacacctcccgagtgtctgctcactccccttccaccctcagctctaccctcagctccaccctcagcggatgataatctcaagacacgtgccgagtgtctgctccatccccttccaccctcagcggatgataatctcaagacaccttccgagcgtcagctcactccccttccaccctcagctccaccctcagcagatgataatatcaagacacctgccgagcgtctgcgggggccgcttccaccctcagcggatgataatctcaagacaccttccgagcgtcagctcactccccttccaccctcagctccaccctcagcagatgataatatcaagacacctgctgagcgtctgcgggggccgcttccaccctcagcggatgataatctcaagacaccttccgagcgtcagctcactccccttccaccctcagctccaccctcagcagatgataatatcaagacacctgccgagcgtctgcgggggccgcttccaccctcagcggatgataatctcaagacaccttccgagcgtcagctcactgcccttccaccctcagcagatgataatatcaagacacctgccgagcgtctgcgggggccgcttccaccctcagcggatgataatctcaagacaccttccgagcgtcagctcactccccttccaccctcagctccaccctcagcagatgataatatcaagacacctgccttccaccctcagcggatgatctcaagacaccttccgagcgtcagctcactccccttccaccctcagctccaccctcagcagatgataatatcaagatacctgctgagcgtctgcggattccgcttccaccatcagccgatgataatctcaagacaccttccgagcgtcagctcactccccttccaccctcagctccaccctcagcagatgataatatcaagacacctgccgagcgtctgcgggggccgcttccaccctgagcggatgataatctcaagacaccttccgagcgtcagctcactccccttccaccctcagctccaccctcagcagatgataatatcaagacacctgccgagcgtctgcgggggccgcttccaccctcagcagatgataatctcaagacaccttccgagcgtcagctcactccccttccaccctcagctccaccctcagcagatgataatatcaagacacctgccgagcgtctgcgggggccgcttccaccctcagcggatgataatctcaagacaccttccgagcgtcagctcactccccttccaccctcagctccaccctcagcagatgataatatcaagacacctgccgagcgtctgcgggggccgcttccaccctcagcagatgataatctcaagacaccttccgagcgtcagctcactccccttccaccctcagctccaccctcagcagatgataatatcaagacacctgccgagcgtctgcgggggccgcttccaccctcagcggatgataatctcaagacaccttccgagcgtcagctcactccctttccaccctcagctccaccctcagcagatgataatatcaagacacctgccgagcgtctgcggggagcgtctgcgggggccgcttccaccctcagcggatgataatctcaagacaccttccgagcgtcagctcactccccttccaccctcagctccaccctcagcagatgataatatcaagacacctgccgagcgtctgcgggggccgcttccaccctcagcggatgataatctcaagacaccttccgagcgtcagctcactccccttccaccctcagctccaccctcagcagatgataatatcaagacacctgccgagcgtctgcgggggccgcttccaccctcagcggatgataatctcaagacaccttccgagcgtcagctcactccccttccaccctcagctccaccctcagcagatgataatatcaagacacctgccgagcgtctgcgggggccgcttccaccctcagccgatgataatctcaagacacctcccttagctactcaggaggctgaggcagaaaaaccacgcaaacccaagaggcagagggcggctgagatggaaccacctcccgaacccaagaggcggagggtcggtgacgtggaaccgtcacgcaaacccaagaggcggagggccgctgacgtggaaccatcatcacccgaacccaagaggcggagggtcggtgatgtggaaccgtcacgcaaacccaagaggcggagggccgctgacgtggaaccatcatcacccgaacccaagaggcggagggtcggtgacgtggaaccgtcacgcaaacccaagaggcggagggccgctgacgtggaaccatcattacccgaacccaagaggcggaggttgagctgagaagaggccagtgcactcaagcctgagcaataagaataaaaccgagtagaacaaaataaaaaattcaaaaaacaaaacaaaacccacactcc

SEQ ID NO: 160666 - DNA, 1906 bp, Homo sapiens
  Payload ID: 11399
  Gene Symbol: NPIPB5
  Gene Name: nuclear pore complex interacting protein family, member B5
  ENST ID: ENST00000528249
  CDS Start-End: 121-1906
tgaagcccttgaccactatagactcaaacatcaccttgtttttccactcattcaacacttttttttttaaattatctaataggttggcactcatcatgagcccctgttctcattctgcaaatggtgaagctctctattgtcctgaccccacagttcctgtcccatgaccagggccagctcaccaaggagctgcagcagcatgtaaagtcagtgacatgcccatgcgagtacctgaggaaggttatcaatactctggctgaccatcatcatcgtgggactgactttggtggaagtccttggttacatgtcattattgcgtttccgacaagttataaagttgtcattaccctctggatagtttacctttgggtgtctctcctgaagactatcttctggtctcgaaatggacatgatggatccacggatgtacagcagagagcctggaggtccaaccgccgtagacaggaagggctgaggtccatttgtatgcacacaaagaaaagagtttcttcctttcgaggaaataaaattggcctgaaagacgtcattactctacggagacatgtggaaacaaaagttagagctaaaatccgtaagaggaaggtgacaacgaaaatcaaccatcatgacaaaatcaatggaaagaggaagaccgccagaaaacagaaaatgtttcaacgtgcgcaagagttgcggcggcgagcagaggactaccacaaatgcaaaatccccccttctgcaagaaaggctctttgcaactgggtcagaatggcggcagcggagcatcgtcattcttcaggattgccctactggccctacctcacagctgaaactttaaaaaacaggatgggccaccagccacctcctccaactcaacaacattctataactgataactccctgagcctcaagacacctcccgagtgtctgctcactccccttccaccctcagcggatgataatctcaagacacctcccgagtgtgtgctcactccccttccaccctcagcggatgataatctcaagacacctcccgagtgtgtgctcactccccttccaccctcagcggatgataatctcaagacacctcctgagtgtctgctcactccccttccaccctcagcggatgataatctcaagacacctcccgagtgtctgctcactccccttccaccctcagctctaccctcagctccaccctcagcggatgataatctcaagacacgtgccgagtgtctgctccatccccttccaccctcagcggatgataatctcaagacaccttccgagcgtcagctcactccccttccaccctcagctccaccctcagcagatgataatatcaagacacctgccgagcgtctgcgggggccgcttccaccctcagcggatgataatctcaagacaccttccgagcgtcagctcactccccttccaccctcagctccaccctcagcagatgataatatcaagacacctgctgagcgtctgcgggggccgcttccaccctcagcggatgataatctcaagacaccttccgagcgtcagctcactccccttccaccctcagctccaccctcagcagatgataatatcaagacacctgccgagcgtctgcgggggccgcttccaccctcagcggatgataatctcaagacaccttccgagcgtcagctcactgcccttccaccctcagcagatgataatatcaagacacctgccgagcgtctgcgggggccgcttccaccctcagcggatgataatctcaagacaccttccgagcgtcagctcactccccttccaccctcagctccaccctcagcagatgataatatcaagacacctgccttccaccctcagcggatgatctcaagacaccttccgagcgtcagctcactccccttcc

SEQ ID NO: 160667 - DNA, 543 bp, Homo sapiens
  Payload ID: 11399
  Gene Symbol: NPIPB5
  Gene Name: nuclear pore complex interacting protein family, member B5
  ENST ID: ENST00000542518
  CDS Start-End: 257-379
gaaactgaatgacgaatgaaactattgttcctgtttcacacagaagaaaactgaggttaaaaggggtaaagtaattttgcatggcatgaagtagaaattcaaagtacaggaatttgaacttggttctgtccttttctgaagcccttgaccactatagactcaaacatcaccttgtttttccactcattcaacacttttttttttaaattatctaataggttggcactcatcatgagcccctgttctcattctgcaaatggtgaagctctctattgtcctgaccccacagttcctgtcccatgaccagggccagctcaccaaggagctgcagcagcatgtaaagtcagtgacatgcccatgcgagtacctgaggaagtgaccttgaggaaccctgggagctcaggaaggaaggagcgcccagaagcagggacagggagctggttggggaggaccagaaatcaggttatcaatactctggctgaccatcatcatcgtgggactgactttggtggaagtccttggttacatgtcattattgcgttt

SEQ ID NO: 160668 - DNA, 551 bp, Homo sapiens
  Payload ID: 11399
  Gene Symbol: NPIPB5
  Gene Name: nuclear pore complex interacting protein family, member B5
  ENST ID: ENST00000356156
  CDS Start-End: 519-551
ctaatactcacagggaatatatagagtctagaagaaaatatacaggtccttaaaggctgccctgccaacaaaaccataacgcaggaacaaacatcacaactatgccaaataatcaatcctacaatgtccaaaattttactttaaaactggaattaccagacttcctttctgcattaaccagtttaactagacagtaacgaaatattcctactttatgctgtgatagtttgtttgtttgtttgtttgtttatttatttatttatttaagacagagtttcgctcttgttgcccaggctggagtgcagtggcacgatctcagctcaccacaacctccgcctcccaggttcaagcgattctcctgcctcagcctcccgagtagctgggattacaggtatgatctcgtgaaatcttgagagaaactgaatgacgaatgaaactattgttcctgtttcacacagaagaaaactgaggttaaaaggggttggcactcatcatgagcccctgttctcattctgcaaatggtgaagctctctattgtcctgaccccacag

SEQ ID NO: 160669 - DNA, 513 bp, Homo sapiens
  Payload ID: 11399
  Gene Symbol: NPIPB5
  Gene Name: nuclear pore complex interacting protein family, member B5
  ENST ID: ENST00000545375
  CDS Start-End: 173-322
atgaattttaaaggatgactgatggtccttggaagagaaacagtaaacaaataaggtatgatctcgtgaaatcttgagagaaactgaatgacgaatgaaactattgttcctgtttcacacagaagaaaactgaggttggcactcatcatgagcccctgttctcattctgcaaatggtgaagctctctattgtcctgaccccacagttcctgtcccatgaccagggccagctcaccaaggagctgcagcagcatgtaaagtcagtgacatgcccatgcgagtacctgaggaaggttgatggacggatggctacatggatgtgatggagatggtttactatcgggaccttccgcaccctgctgatgttttgttgcttaggatatgaatggctgagcggaggctgtaaaacctggcactctgcttgggttatcaatactctggctgaccatcatcatcgtgggactgactttggtggaagtccttggttacatgtcattattgcgtttccgacaag

SEQ ID NO: 160670 - DNA, 3801 bp, Homo sapiens
  Payload ID: 11399
  Gene Symbol: NPIPB5
  Gene Name: nuclear pore complex interacting protein family, member B5
  Uniprot ID: A8MRT5
  ENST ID: ENST00000424340
  CDS Start-End: 280-3681
tatgatctcgtgaaatcttgagagaaactgaatgacgaatgaaactattgttcctgtttcacacagaagaaaactgaggttaaaaggggtaaagtaattttgcatggcatgaagtagaaattcaaagtacaggaatttgaacttggttctgtccttttctgaagcccttgaccactatagactcaaacatcaccttgtttttccactcattcaacacttttttttttaaattatctaataggttggcactcatcatgagcccctgttctcattctgcaaatggtgaagctctctattgtcctgaccccacagttcctgtcccatgaccagggccagctcaccaaggagctgcagcagcatgtaaagtcagtgacatgcccatgcgagtacctgaggaaggttatcaatactctggctgaccatcatcatcgtgggactgactttggtggaagtccttggttacatgtcattattgcgtttccgacaagttataaagttgtcattaccctctggatagtttacctttgggtgtctctcctgaagactatcttctggtctcgaaatggacatgatggatccacggatgtacagcagagagcctggaggtccaaccgccgtagacaggaagggctgaggtccatttgtatgcacacaaagaaaagagtttcttcctttcgaggaaataaaattggcctgaaagacgtcattactctacggagacatgtggaaacaaaagttagagctaaaatccgtaagaggaaggtgacaacgaaaatcaaccatcatgacaaaatcaatggaaagaggaagaccgccagaaaacagaaaatgtttcaacgtgcgcaagagttgcggcggcgagcagaggactaccacaaatgcaaaatccccccttctgcaagaaaggctctttgcaactgggtcagaatggcggcagcggagcatcgtcattcttcaggattgccctactggccctacctcacagctgaaactttaaaaaacaggatgggccaccagccacctcctccaactcaacaacattctataactgataactccctgagcctcaagacacctcccgagtgtctgctcactccccttccaccctcagcggatgataatctcaagacacctcccgagtgtgtgctcactccccttccaccctcagcggatgataatctcaagacacctcccgagtgtgtgctcactccccttccaccctcagcggatgataatctcaagacacctcctgagtgtctgctcactccccttccaccctcagcggatgataatctcaagacacctcccgagtgtctgctcactccccttccaccctcagctctaccctcagctccaccctcagcggatgataatctcaagacacgtgccgagtgtctgctccatccccttccaccctcagcggatgataatctcaagacaccttccgagcgtcagctcactccccttccaccctcagctccaccctcagcagatgataatatcaagacacctgccgagcgtctgcgggggccgcttccaccctcagcggatgataatctcaagacaccttccgagcgtcagctcactccccttccaccctcagctccaccctcagcagatgataatatcaagacacctgctgagcgtctgcgggggccgcttccaccctcagcggatgataatctcaagacaccttccgagcgtcagctcactccccttccaccctcagctccaccctcagcagatgataatatcaagacacctgccgagcgtctgcgggggccgcttccaccctcagcggatgataatctcaagacaccttccgagcgtcagctcactgcccttccaccctcagcagatgataatatcaagacacctgccgagcgtctgcgggggccgcttccaccctcagcggatgataatctcaagacaccttccgagcgtcagctcactccccttccaccctcagctccaccctcagcagatgataatatcaagacacctgccttccaccctcagcggatgatctcaagacaccttccgagcgtcagctcactccccttccaccctcagctccaccctcagcagatgataatatcaagatacctgctgagcgtctgcggattccgcttccaccatcagccgatgataatctcaagacaccttccgagcgtcagctcactccccttccaccctcagctccaccctcagcagatgataatatcaagacacctgccgagcgtctgcgggggccgcttccaccctgagcggatgataatctcaagacaccttccgagcgtcagctcactccccttccaccctcagctccaccctcagcagatgataatatcaagacacctgccgagcgtctgcgggggccgcttccaccctcagcagatgataatctcaagacaccttccgagcgtcagctcactccccttccaccctcagctccaccctcagcagatgataatatcaagacacctgccgagcgtctgcgggggccgcttccaccctcagcggatgataatctcaagacaccttccgagcgtcagctcactccccttccaccctcagctccaccctcagcagatgataatatcaagacacctgccgagcgtctgcgggggccgcttccaccctcagcagatgataatctcaagacaccttccgagcgtcagctcactccccttccaccctcagctccaccctcagcagatgataatatcaagacacctgccgagcgtctgcgggggccgcttccaccctcagcggatgataatctcaagacaccttccgagcgtcagctcactccctttccaccctcagctccaccctcagcagatgataatatcaagacacctgccgagcgtctgcggggagcgtctgcgggggccgcttccaccctcagcggatgataatctcaagacaccttccgagcgtcagctcactccccttccaccctcagctccaccctcagcagatgataatatcaagacacctgccgagcgtctgcgggggccgcttccaccctcagcggatgataatctcaagacaccttccgagcgtcagctcactccccttccaccctcagctccaccctcagcagatgataatatcaagacacctgccgagcgtctgcgggggccgcttccaccctcagcggatgataatctcaagacaccttccgagcgtcagctcactccccttccaccctcagctccaccctcagcagatgataatatcaagacacctgccgagcgtctgcgggggccgcttccaccctcagccgatgataatctcaagacacctcccttagctactcaggaggctgaggcagaaaaaccacgcaaacccaagaggcagagggcggctgagatggaaccacctcccgaacccaagaggcggagggtcggtgacgtggaaccgtcacgcaaacccaagaggcggagggccgctgacgtggaaccatcatcacccgaacccaagaggcggagggtcggtgatgtggaaccgtcacgcaaacccaagaggcggagggccgctgacgtggaaccatcatcacccgaacccaagaggcggagggtcggtgacgtggaaccgtcacgcaaacccaagaggcggagggccgctgacgtggaaccatcattacccgaacccaagaggcggaggttgagctgagaagaggccagtgcactcaagcctgagcaataagaataaaaccgagtagaacaaaataaaaaattcaaaaaacaaaacaaaacccacactccaaaaactaacaaagaataaataaataat

SEQ ID NO: 160671 - DNA, 597 bp, Homo sapiens
  Payload ID: 11399
  Gene Symbol: NPIPB5
  Gene Name: nuclear pore complex interacting protein family, member B5
  ENST ID: ENST00000541154
  CDS Start-End: 363-597
actctcagaaggtgaacctaatttcaaatgaaagctgcctccagaatatattgttaagcgtattctagatataattcattttggcaaacatactgtagaaattcacataacattttactgtactaaaagtaaattgcccatgtaacaaaaaatatcttttcagagcttgaaatgaattttaaaggatgactgatggtccttggaagagaaacagtaaacaaataaggtttcaggcacagaactgtatatccaataatagtgaaatggatcccactaattatgacagaaatgatgatacatttaaatgacttggatgttttataggttggcactcatcatgagcccctgttctcattctgcaaatggtgaagctctctattgtcctgaccccacagttcctgtcccatgaccagggccagctcaccaaggagctgcagcagcatgtaaagtcagtgacatgcccatgcgagtacctgaggaaggttatcaatactctggctgaccatcatcatcgtgggactgactttggtggaagtccttggttacatgtcattattgcgtttccgacaagttataaagttgtcattaccctctgga

SEQ ID NO: 160672 - DNA, 910 bp, Homo sapiens; identical to SEQ ID NO: 160644
  Payload ID: 11399
  Gene Symbol: NPIPB5
  Gene Name: nuclear pore complex interacting protein family, member B5
  ENST ID: ENST00000541664
  CDS Start-End: 62-184

SEQ ID NO: 160673 - DNA, 711 bp, Homo sapiens
  Payload ID: 11399
  Gene Symbol: NPIPB5
  Gene Name: nuclear pore complex interacting protein family, member B5
  ENST ID: ENST00000543407
  CDS Start-End: 398-711
atgctaaaaatatggtggacctggcattacagctattacaaatctcctaagatgtctcgggtagtgtattagttacttttcatactgctatgaagaaatactggaaactgggtaatttataaagaaaaagaggtttaatgtactcacagttccacaaggctggagaggcctcagaatcatggtggaaggcaaagaaggagcaaaaagagcttgaaatgaattttaaaggatgactgatggtccttggaagagaaacagtaaacaaataaggtatgatctcgtgaaatcttgagagaaactgaatgacgaatgaaactattgttcctgtttcacacagaagaaaactgaggttaaaaggggttggcactcatcatgagcccctgttctcattctgcaaatggtgaagctctctattgtcctgaccccacagttcctgtcccatgaccagggccagctcaccaaggagctgcagcagcatgtaaagtcagtgacatgcccatgcgagtacctgaggaaggttatcaatactctggctgaccatcatcatcgtgggactgactttggtggaagtccttggttacatgtcattattgcgtttccgacaagttataaagttgtcattaccctctggatagtttacctttgggtgtctctcctgaagactatcttctggtctcgaaatggacatgatggatccacggatgtacagca

SEQ ID NO: 160674 - DNA, 638 bp, Homo sapiens
  Payload ID: 11399
  Gene Symbol: NPIPB5
  Gene Name: nuclear pore complex interacting protein family, member B5
  ENST ID: ENST00000538606
  CDS Start-End: 280-638
tatgatctcgtgaaatcttgagagaaactgaatgacgaatgaaactattgttcctgtttcacacagaagaaaactgaggttaaaaggggtaaagtaattttgcatggcatgaagtagaaattcaaagtacaggaatttgaacttggttctgtccttttctgaagcccttgaccactatagactcaaacatcaccttgtttttccactcattcaacacttttttttttaaattatctaataggttggcactcatcatgagcccctgttctcattctgcaaatggtgaagctctctattgtcctgaccccacagttcctgtcccatgaccagggccagctcaccaaggagctgcagcagcatgtaaagtcagtgacatgcccatgcgagtacctgaggaaggttatcaatactctggctgaccatcatcatcgtgggactgactttggtggaagtccttggttacatgtcattattgcgtttccgacaagttataaagttgtcattaccctctggatagtttacctttgggtgtctctcctgaagactatcttctggtctcgaaatggacatgatggatccacggatgtacagcagagagcctggaggtccaaccgccgtagacaggaagggctgaggtc

SEQ ID NO: 160675 - DNA, 543 bp, Homo sapiens
  Payload ID: 11399
  Gene Symbol: NPIPB5
  Gene Name: nuclear pore complex interacting protein family, member B5
  ENST ID: ENST00000536620
  CDS Start-End: 503-543
tgaaaatgaagatttggaaggagatcatcacagctaatgtttaacaagcccctcctgtgtgccaaatcattcacccctcaccacaaccgaatgagctaaggattctcattatatatagtttatggagagggaagtgcagacataaagaggtgaattatcttacccagatcacacagctgataagtggtggaggcagaatagaatctaaacagtgtggctccggagcccacatgcattgattcgacaagtgtttattgagcacctgccgcggacaaggccttgtgtgattaaatagggttataattagtaatataaaaatgagaaatcactaatgctttttagacttaacattttgtttttttgtaggtttcaggcacagaactgtatatccaataatagtgaaatggatcccactaattatgacagaaatgatgatacatttaaatgacttggatgttttataggttggcactcatcatgagcccctgttctcattctgcaaatggtgaagctctctattgtcctgaccccacagttcctgtc

SEQ ID NO: 160676 - DNA, 2268 bp, Homo sapiens
  Payload ID: 11399
  Gene Symbol: NPIPB5
  Gene Name: nuclear pore complex interacting protein family, member B5
  ENST ID: ENST00000415833
  CDS Start-End: 483-2268
gggaacctcagaaatccattgaagttccattgttaagaagttctgtttgtttggcaactgctttaaacccgatagaacaagatcagaagtggcagtctataactgaaaatgtggtaaagtacttgaagcaaacatcccgcatcgctattggacctctgagactttctactttaacagtttcacagtctttgccagttctaagtaccttgcagctgtattgctcgtctgctttggagaccacagtttctaacagactttcaacagaggactgtcttattccactcttcggcgaagctttacgttcatgtaaacagcatgacgtgaggccgtggatgcaggcattaaggtttcaggcacagaactgtatatccaataatagtgaaatggatcccactaattatgacagaaatgatgatacatttaaatgacttggatgttttataggttggcactcatcatgagcccctgttctcattctgcaaatggtgaagctctctattgtcctgaccccacagttcctgtcccatgaccagggccagctcaccaaggagctgcagcagcatgtaaagtcagtgacatgcccatgcgagtacctgaggaaggttatcaatactctggctgaccatcatcatcgtgggactgactttggtggaagtccttggttacatgtcattattgcgtttccgacaagttataaagttgtcattaccctctggatagtttacctttgggtgtctctcctgaagactatcttctggtctcgaaatggacatgatggatccacggatgtacagcagagagcctggaggtccaaccgccgtagacaggaagggctgaggtccatttgtatgcacacaaagaaaagagtttcttcctttcgaggaaataaaattggcctgaaagacgtcattactctacggagacatgtggaaacaaaagttagagctaaaatccgtaagaggaaggtgacaacgaaaatcaaccatcatgacaaaatcaatggaaagaggaagaccgccagaaaacagaaaatgtttcaacgtgcgcaagagttgcggcggcgagcagaggactaccacaaatgcaaaatccccccttctgcaagaaaggctctttgcaactgggtcagaatggcggcagcggagcatcgtcattcttcaggattgccctactggccctacctcacagctgaaactttaaaaaacaggatgggccaccagccacctcctccaactcaacaacattctataactgataactccctgagcctcaagacacctcccgagtgtctgctcactccccttccaccctcagcggatgataatctcaagacacctcccgagtgtgtgctcactccccttccaccctcagcggatgataatctcaagacacctcccgagtgtgtgctcactccccttccaccctcagcggatgataatctcaagacacctcctgagtgtctgctcactccccttccaccctcagcggatgataatctcaagacacctcccgagtgtctgctcactccccttccaccctcagctctaccctcagctccaccctcagcggatgataatctcaagacacgtgccgagtgtctgctccatccccttccaccctcagcggatgataatctcaagacaccttccgagcgtcagctcactccccttccaccctcagctccaccctcagcagatgataatatcaagacacctgccgagcgtctgcgggggccgcttccaccctcagcggatgataatctcaagacaccttccgagcgtcagctcactccccttccaccctcagctccaccctcagcagatgataatatcaagacacctgctgagcgtctgcgggggccgcttccaccctcagcggatgataatctcaagacaccttccgagcgtcagctcactccccttccaccctcagctccaccctcagcagatgataatatcaagacacctgccgagcgtctgcgggggccgcttccaccctcagcggatgataatctcaagacaccttccgagcgtcagctcactgcccttccaccctcagcagatgataatatcaagacacctgccgagcgtctgcgggggccgcttccaccctcagcggatgataatctcaagacaccttccgagcgtcagctcactccccttccaccctcagctccaccctcagcagatgataatatcaagacacctgccttccaccctcagcggatgatctcaagacaccttccgagcgtcagctcactccccttcc

SEQ ID NO: 160677 - DNA, 516 bp, Homo sapiens
  Payload ID: 11399
  Gene Symbol: NPIPB5
  Gene Name: nuclear pore complex interacting protein family, member B5
  ENST ID: ENST00000544308
  CDS Start-End: 245-394
tttagacttaacattttgtttttttgtaggtttcaggcacagaactgtatatccaataatagtgaaatggatcccactaattatgacagaaatgatgatacatttaaatgacttggatgttttataggtatgatctcgtgaaatcttgagagaaactgaatgacgaatgaaactattgttcctgtttcacacagaagaaaactgaggttggcactcatcatgagcccctgttctcattctgcaaatggtgaagctctctattgtcctgaccccacagttcctgtcccatgaccagggccagctcaccaaggagctgcagcagcatgtaaagtcagtgacatgcccatgcgagtacctgaggaaggttgatggacggatggctacatggatgtgatggagatggtttactatcgggaccttccgcaccctgctgatgttttgttgcttaggatatgaatggctgagcggaggctgtaaaacctggcactctgcttggagacggggtttcaccatgtt

SEQ ID NO: 160678 - DNA, 696 bp, Homo sapiens
  Payload ID: 11399
  Gene Symbol: NPIPB5
  Gene Name: nuclear pore complex interacting protein family, member B5
  ENST ID: ENST00000539604
  CDS Start-End: 1-207
catgtcattattgcgtttccgacaagttataaagttgtcattaccctctggatagtttacctttgggtgtctctcctgaagactatcttctggtctcgaaatggacatgatggatccacggatgtacagcagagagcctggaggtccaaccgccgtagacaggaaggtttctcaccttctcctctcctcactctcaccaagggctgaggtccatttgtatgcacacaaagaaaagagtttcttcctttcgaggaaataaaattggcctgaaagacgtcattactctacggagacatgtggaaacaaaagttagagctaaaatccgtaagaggaaggtgacaacgaaaatcaaccatcatgacaaaatcaatggaaagaggaagaccgccagaaaacagaaactaagcgtgaaagaatgtgagcatgcagaaaaggagaggcaggtatcagaggcagaggaaaatgggaaattggatatgaaagaaatacacacctacaagaaaatgtttcaacgtgcgcaagagttgcggcggcgagcagaggactaccacaaatgcaaaatccccccttctgcaagaaaggctctttgcaactgggtcagaatggcggcagcggagcatcgtcattcttcaggattgccctactggccctacctcacagctgaaactttaaaaaacaggatgggccaccagccac

SEQ ID NO: 160679 - DNA, 1216 bp, Homo sapiens; identical to SEQ ID NO: 160643
  Payload ID: 11399
  Gene Symbol: NPIPB5
  Gene Name: nuclear pore complex interacting protein family, member B5
  ENST ID: ENST00000621622
  CDS Start-End: 55-807

SEQ ID NO: 160680 - DNA, 2016 bp, Homo sapiens
  Payload ID: 11400
  Gene Symbol: NPIPB6
  Gene Name: nuclear pore complex interacting protein family, member B6
  Uniprot ID: E9PJ23
  ENST ID: ENST00000532254
  CDS Start-End: 687-1964
tgtgccaaatcattcacccctcaccacaaccgaatgagctaaggattctcattatatatagtttatggagagggaagtgcagacataaagaggtgaattgtcttacccagatcacacagctgataagtggtggaggcagaatagaatctaaacagtgtggctccggagcccacatgcattgattcgacaagtgtttattgagcacctgccacggacaaggccttgtgtgattaaatagggttataattagtaatataaaaatgagaaatcactaatgctttttagacttaacattttctttttttgtaggtttcaggcacagaactgtatatccaataatagtgaaatggatcccactaattatgacagaaatgatgatacatttaaatgacttggatgttttataggtatgatctcgtgaaaccttgagagaaactgaatgacgaatgaaactattgttcctgtttcacacagaagaaaactgaggttaaaaggggtaaagtaattttgcatggcatgaagtagaaattcaaagtacaggaatttgaacttggttctgtccttttctgaagcccttgaccactatagactcaaacatcaccttgtttttccactcattcaacactatttttttaaattatctaataggttggcactcatgatgagcccctgttctcattctgcaaatggtgaagctctctattgtcctgaccccacagttcctgtcgcatgaccagagccagctcaccaaggagctgcagcagcatgtaaagtcagtgacatgcccatgcgagtacctgaggaaggttatcaatagtctggctgtctatcgtcatcgtgagactgactttggtgtaggagttcgagaccaccctggccaacatggcaaaaccccatctccacaaaaattggataatttgataattatcattattgggtttctgagacgttacacatttaacattctcttctgcacaagttgcctttgtgtgtctttcctgaagactatcttctggtctcgaaatggacatgatggatccatggatgtacagcagagagcctggaggtccaaccgcagtagacagaaagggctgaggtccatttgtatgcacacaaagaaaagagtttcttcctttcgaggaaataaaattggcctgaaagacgtcattactctacggaggcatgtggaaacaaaagttagagctaaaatccgtaagaggaaggtgacaacgaaaatcaaccgtcatgacaaaatcaatggaaagaggaagaccgccagaaaacagaaaatgtttcaacgtgcgcaagagttgcggcggcgggcagaggactaccacaaatgcaaaatccccccttctgcaagaaagcctctttgcaactgggtcagaatggtggcagcggagcatcgtcattcttcaggattgccctactggccctacctcacagctgaaactttaaaaaacaggatgggccgccagccacctcctccaactcaacaacattctataactgataactccctgagcctcaagacacctactgagtgtctgctcactccccttccaccctcagtggatgataatatcaaggagtgtcctcttgctcctcttccaccctctcctcttccaccctcagtggatgataatctgaaggaatgtctctttgtcccgcttccaccctctcctcttccaccctcagtggatgataatctcaagactcctcccttagctactcaggaggccgaggtggaaaaaccacccaaacccaagaggtggagggtggatgaggtggaacaatcaccgaaacccaagaggcggagggtggatgaggtggaacaatcgcccaagcccaagaggcagagggaggccgaggcacaacaattacccaaacccaagaggcggaggttgagtaagctgagaacacgccattgcactcaagcctgggcaataagaataaatccgtaggtcgaaaaaaagaaaaaaatcaaaaaacaaaacaaaacccacgctccaaaaa

SEQ ID NO: 160681 - DNA, 1329 bp, Homo sapiens
  Payload ID: 11400
  Gene Symbol: NPIPB6
  Gene Name: nuclear pore complex interacting protein family, member B6
  ENST ID: ENST00000533640
  CDS Start-End: 54-1277
gccacctccacctctgtcctggccgcctcagggcaccctgaaaggatcatgacatgcggctgcgcttttggctcctcatttggctcctgctgggatttatcagccatcagcccacccctgttatcaatagtctggctgtctatcgtcatcgtgagactgactttggtgtaggagttcgagaccaccctggccaacatggcaaaaccccatctccacaaaaattggataatttgataattatcattattgggtttctgagacgttacacatttaacattctcttctgcacaagttgcctttgtgtgtctttcctgaagactatcttctggtctcgaaatggacatgatggatccatggatgtacagcagagagcctggaggtccaaccgcagtagacagaaagggctgaggtccatttgtatgcacacaaagaaaagagtttcttcctttcgaggaaataaaattggcctgaaagacgtcattactctacggaggcatgtggaaacaaaagttagagctaaaatccgtaagaggaaggtgacaacgaaaatcaaccgtcatgacaaaatcaatggaaagaggaagaccgccagaaaacagaaaatgtttcaacgtgcgcaagagttgcggcggcgggcagaggactaccacaaatgcaaaatccccccttctgcaagaaagcctctttgcaactgggtcagaatggtggcagcggagcatcgtcattcttcaggattgccctactggccctacctcacagctgaaactttaaaaaacaggatgggccgccagccacctcctccaactcaacaacattctataactgataactccctgagcctcaagacacctactgagtgtctgctcactccccttccaccctcagtggatgataatatcaaggagtgtcctcttgctcctcttccaccctctcctcttccaccctcagtggatgataatctgaaggaatgtctctttgtcccgcttccaccctctcctcttccaccctcagtggatgataatctcaagactcctcccttagctactcaggaggccgaggtggaaaaaccacccaaacccaagaggtggagggtggatgaggtggaacaatcaccgaaacccaagaggcggagggtggatgaggtggaacaatcgcccaagcccaagaggcagagggaggccgaggcacaacaattacccaaacccaagaggcggaggttgagtaagctgagaacacgccattgcactcaagcctgggcaataagaataaatccgtaggtcgaaaaaaagaaaaaaatcaaaaaacaaaacaaaacccacgctccaaaaa

SEQ ID NO: 160682 - DNA, 1406 bp, Homo sapiens
  Payload ID: 11401
  Gene Symbol: NPIPB7
  Gene Name: nuclear pore complex interacting protein family, member B7
  Uniprot ID: O75200
  ENST ID: ENST00000452313
  CDS Start-End: 110-1354
cgccccaactcagatccggccccggtccccgtccccttccctcccccctgccctaagccacctccacctctgtcctggccgcctcagggcaccctgaaaggatcaggacatgcggctgcgcttttggctcctcatttggctcctgctgggatttatcagccatcagcccacccctgttatcaatagtctggctgtctatcgtcatcgtgagactgactttggtgtaggagttcgagaccaccctggccaacatggcaaaaccccatctccacaaaaattggataatttgataattatcattattgggtttctgagacgttacacatttaacgttctcttctgcacaagttgcctttgtgtgtctttcctgaagactatcttctggtctcgaaatggacatgatggatccatggatgtacagcagagagcctggaggtccaaccgcagtagacagaaagggctgaggtccatttgtatgcacacaaagaaaagagtttcttcctttcgaggaaataaaattggcctgaaagacgtcattactctacggaggcatgtggaaacaaaagttagagctaaaatccgtaagaggaaggtgacaacgaaaatcaaccgtcatgacaaaatcaatggaaagaggaagaccgccagaaaacagaaaatgtttcaacgtgcgcaagagttgcggcggcgggcagaggactaccacaaatgcaaaatccccccttctgcaagaaagcctctttgcaactgggtcagaatggcggcagcggagcattgtcattcttcaggattgccctactggctctacctcacagctgaaactttaaaaaacaggatgggccgccagccacctcctccaactcaacaacattctataactgataactccctgagcctcaagacacctcccgagtgtctgctcactccccttccaccctcagtggatgataatatcaaggagtgtcctcttgctcctcttccaccctctcctcttccaccctcagtggatgataatctgaaggaatgtctctttgtcccgcttccaccctctcctcttccaccctcagtggatgataatctgaaggaatgtctctttgtcccgcttccaccctctcctcttccaccctcagtggatgataatctcaagactcctcccttagctactcaggaggccgaggtggaaaaaccacccaaacccaagaggtggagggtggatgaggtggaacaatcgcccaagcccaagaggcagagggaggccgaggcacaacaattacccaaacccaagaggcggaggttgagtaagctgagaacacgccattgcactcaagcctgggcaataagaataaatccgtaggtcgaaaaaaagaaaaaaatcaaaaaacaaaacaaaacccacgctccaaaaa

SEQ ID NO: 160683 - DNA, 1266 bp, Homo sapiens
  Payload ID: 11401
  Gene Symbol: NPIPB7
  Gene Name: nuclear pore complex interacting protein family, member B7
  ENST ID: ENST00000435324
  CDS Start-End: 1-1266
gtgaccttgaggaaccctgggagctcaggaaggaaggagcgcccagaagcagggacagggagctggttggggaggaccagaaatcaggttatcaatagtctggctgtctatcgtcatcgtgagactgactttggtgtaggagttcgagaccaccctggccaacatggcaaaaccccatctccacaaaaattggataatttgataattatcattattgggtttctgagacgttacacatttaacgttctcttctgcacaagttgcctttgtgtgtctttcctgaagactatcttctggtctcgaaatggacatgatggatccatggatgtacagcagagagcctggaggtccaaccgcagtagacagaaagggctgaggtccatttgtatgcacacaaagaaaagagtttcttcctttcgaggaaataaaattggcctgaaagacgtcattactctacggaggcatgtggaaacaaaagttagagctaaaatccgtaagaggaaggtgacaacgaaaatcaaccgtcatgacaaaatcaatggaaagaggaagaccgccagaaaacagaaaatgtttcaacgtgcgcaagagttgcggcggcgggcagaggactaccacaaatgcaaaatccccccttctgcaagaaagcctctttgcaactgggtcagaatggcggcagcggagcattgtcattcttcaggattgccctactggctctacctcacagctgaaactttaaaaaacaggatgggccgccagccacctcctccaactcaacaacattctataactgataactccctgagcctcaagacacctcccgagtgtctgctcactccccttccaccctcagtggatgataatatcaaggagtgtcctcttgctcctcttccaccctctcctcttccaccctcagtggatgataatctgaaggaatgtctctttgtcccgcttccaccctctcctcttccaccctcagtggatgataatctgaaggaatgtctctttgtcccgcttccaccctctcctcttccaccctcagtggatgataatctcaagactcctcccttagctactcaggaggccgaggtggaaaaaccacccaaacccaagaggtggagggtggatgaggtggaacaatcgcccaagcccaagaggcagagggaggccgaggcacaacaattacccaaacccaagaggcggaggttgagtaagctgagaacacgccattgcactcaagcctgggcaataagaataaatccgtag

SEQ ID NO: 160684 - DNA, 508 bp, Homo sapiens
  Payload ID: 11402
  Gene Symbol: NPIPB8
  Gene Name: nuclear pore complex interacting protein family, member B8
  ENST ID: ENST00000526428
  CDS Start-End: 1-435
ctgaaagacgtcattactctacggaggcatgtggaaacaaaagttagagctaaaatccgtaagaggaaggtgacaacgaaaatcaaccgtcatgacaaaatcaatggaaagaggaagaccgccagaaaacagaaaatgtttcaacgtgcgcaagagttgcggcggcgggcagaggactaccacaaatgcaaaatccccccttctgcaagaaagcctctttgcaactgggtaagtttgtttgttttccttgcttttgaacatagtctgccaggtcaggacatggatacatttttctccctacagctctgtgctcaagccctgcagagggagatggcagagaggaaggctgcctacaggcatcacagtcccatccctgttggtaaccgtgttgtgcaaaaacaccttcatccccacccagtggggcccctgatctaaattcaaagtgtcagaggttccatatttgtaatagcaaatgggccctgactgtaaattagtgaagagtgaatgt

SEQ ID NO: 160685 - DNA, 2058 bp, Homo sapiens
  Payload ID: 11402
  Gene Symbol: NPIPB8
  Gene Name: nuclear pore complex interacting protein family, member B8
  Uniprot ID: E9PQR5
  ENST ID: ENST00000529716
  CDS Start-End: 708-2006
tgtgccaaatcattcacccgtcaccacaaccgaatgagctaaggattctcattatatatagtttatggagagggaagtgcagacataaagaggtgaattatcttacccagatcacacagctgataagtggtggaggcagaatagaatctaaacagtgtagaatctaaacagaatagaatctaaacatgcattgatttgacaagtgtttattgagcacctgccatgaacaaggccttgtgtgattaaatagggttataattagtaatataaaaatgagaaatcactaatgctttttagacttaacattttcttttttgtaggtttcaggcacagaactgtatatccaataatagtgaaatggatcccactaattatgacagaaatgatgatacatttaaatgacttggatgttttataggtatgatctcatgaaaccttgagagaaactgaatgacgaatgaaactattgttcctgtttcacacagaagaaaactgaggttaaaaggggtaaagtaattttgcatggcatgaagtagaaattcaaagtacaggaatttgaacttggttctgtccttttctgaagcccctatgctcttgaccactatagactcaaacatcaccttgtttttccactcattcaacaaactttttttcttaattgtctaataggttggcactcatcatgagcccctgttctcattctgcaaatggtgaagctctctattgtcctgaccccacagttcctgtcccatgaccagggccagctcaccaaggagctgcagcagcatgtaaagtcagtgacatgcccatgcgagtacctgaggaaggttatcaatagtctggctgtctatcgtcatcgtgagactgactttggtgtaggagttcgagaccaccctggccaacatggcaaaaccccatctccacaaaaattggataatttgataattatcattattgggtttctgagatgttacacatttaacattctcttctgcacaagttgcctttgtgtgtctttcctgaagactatcttctggtctcgaaatggacatgatggatccatggatgtacagcagagagcctggaggtccaaccgcagtagacagaaagggctgaggtccatttgtatgcacacaaagaaaagagtttcttcctttcgaggaaataaaattggcctgaaagacgtcattactctacggaggcatgtggaaacaaaagttagagctaaaatccgtaagaggaaggtgacaacgaaaatcaaccgtcatgacaaaatcaatggaaagaggaagaccgccagaaaacagaaaatgtttcaacgtgcgcaagagttgcggcggcgggcagaggactaccacaaatgcaaaatccccccttctgcaagaaagcctctttgcaactgggtcagaatggcggcagcggagcatcgtcattcttcaggattgccctactggctctacctcacagctgaaactttaaaaaacaggatgggccgccagccacctcctccaactcaacaacattctataactgataactccctgagcctcaagacacctcctgagtgtctgctcactccccttccaccctcagtggatgataatatcaaggagtgtcctcttgctcctcttccaccctctcctcttccaccctcagtggatgataatctgaaggaatgtctctttgtcccgcttccaccctctcctcttccaccctcagtggatgataatctgaaggaatgtctctttgtcccgcttccaccctctcctcttccaccctcagtggatgataatctcaagactcctcccttagctactcaggaggccgaggtggaaaaaccacccaaacccaagaggtggagggtggatgaggtggaacaatcgcccaagcccaagaggcagagggaggccgaggcacaacaattacccaaacccaagaggcggaggttgagtaagctgagaacacgccattgcactcaagcctgggcaataagaataaatccgtaggtcgaaaaaaagaaaaaaatcaaaaaacaaaacaaaacccacgctccaaaaa

SEQ ID NO: 160686 - DNA, 2037 bp, Homo sapiens
  Payload ID: 11403
  Gene Symbol: NPIPB9
  Gene Name: nuclear pore complex interacting protein family, member B9
  ENST ID: ENST00000357796
  CDS Start-End: 1041-1985
tgtgccaaatcattcacccctcaccacaaccgaatgagctaaggattctcattatatatagtttatggagagggaagtgcagacataaagaggtgaattgtcttacccagatcacacagctgataagtggtggaggcagaatagaatctaaacagtgtggctccggagcccacatgcattgattcgacaagtgtttattgagcacctgccacggacaaggccttgtgtgattaaatagggttataattagtaatataaaaatgagaaatcactaatgctttttagacttaacattttctttttttgtaggtttcaggcacagaactgtatatccaataatagtgaaatggatcccactaattatgacagaaatgatgatacatttaaatgacttggatgttttataggtatgatctcgtgaaaccttgagagaaactgaatgacgaatgaaactattgttcctgtttcacacagaagaaaactgaggttaaaaggggtaaagtaattttgcatggcatgaagtagaaattcaaagtacaggaatttgaacttggttctgtccttttctgaagcccttgaccactatagactcaaacatcaccttgtttttccactcattcaacactttttttttaaattatctaataggttggcactcatgatgagcccctgttctcattctgcaaatggtgaagctctctattgtcctgaccccacagttcctgtcgcatgaccagagccagttcaccaaggagctgcagcagcatgtaaagtcagtgacatgcccatgcgagtacctgaggaaggttatcaatagtctggctgtctatcgtcatcgtgagactgactttggtgtaggagttcgagaccaccctggccaacatggcaaaaccccatctccacaaaaattggataatttgataattatcattattgggtttctgagacgttacacatttaacattctcttctgcacaagttgcctttgtgtgtctttcctgaagactatcttctggtctcgaaatggacatgatggatccatggatgtacagcagagagcctggaggtccaaccgcagtagacagaaagggctgaggtccatttgtatgcacacaaagaaaagagtttcttcctttcgaggaaataaaattggcctgaaagacgtcattactctacggaggcatgtggaaacaaaagttagagctaaaatccgtaagaggaaggtgacaacgaaaatcaaccgtcatgacaaaatcaatggaaagaggaagaccgccagaaaacagaaaatgtttcaacgtgcgcaagagttgcggcggcgggcagaggactaccacaaatgcaaaatccccccttctgcaagaaagcctctttgcaactgggtcagaatggcggcagcggagcatcgtcattcttcaggattgccctactggctctacctcacagctgaaactttaaaaaacaggatgggccgccagccacctcctccaactcaacaacattctataactgataactccctgagcctcaagacacctcctgagtgtctgctcactccccttccaccctcagtggatgataatatcaaggagtgtcctcttgctcctcttccaccctctcctcttccaccctcagtggatgataatctgaaggaatgtctctttgtcccgcttccaccctctcctcttccaccctcagtggatgataatctgaaggaatgtctctttgtcccgcttccaccctctcctcttccaccctcagtggatgataatctcaagactcctcccttagctactcaggaggccgaggtggaaaaaccacccaaacccaagaggtggagggtggatgaggtggaacaatcgcccaagcccaagaggcagagggaggccgaggcacaacaattacccaaacccaagaggcggaggttgagtaagctgagaacacgccattgcactcaagcctgggcaataagaataaatccgtaggtcgaaaaaaagaaaaaaatcaaaaaacaaaacaaaacccacgctccaaaaa

SEQ ID NO: 160687 - DNA, 2123 bp, Homo sapiens
  Payload ID: 11403
  Gene Symbol: NPIPB9
  Gene Name: nuclear pore complex interacting protein family, member B9
  Uniprot ID: F8W1W9
  ENST ID: ENST00000550983
  CDS Start-End: 782-2071
tgtgccaaatcattcacccctcaccacaaccgaatgagctaaggattctcattatatatagtttatggagagggaagtgcagacataaagaggtgaattgtcttacccagatcacacagctgataagtggtggaggcagaatagaatctaaacagtgtggctccggagcccacatgcattgattcgacaagtgtttattgagcacctgccacggacaaggccttgtgtgattaaatagggttataattagtaatataaaaatgagaaatcactaatgctttttagacttaacattttctttttttgtaggtttcaggcacagaactgtatatccaataatagtgaaatggatcccactaattatgacagaaatgatgatacatttaaatgacttggatgttttataggtatgatctcgtgaaaccttgagagaaactgaatgacgaatgaaactattgttcctgtttcacacagaagaaaactgaggttaaaaggggtaaagtaattttgcatggcatgaagtagaaattcaaagtacaggaatttgaacttggttctgtccttttctgaagcccttgaccactatagactcaaacatcaccttgtttttccactcattcaacactttttttttaaattatctaataggttggcactcatgatgagcccctgttctcattctgcaaatggtgaagctctctattgtcctgaccccacagttcctgtcgcatgaccagagccagttcaccaaggagctgcagcagcatgtaaagtcagtgacatgcccatgcgagtacctgaggaagtgaccttgaggaaccctgggagctcaggaaggaaggagcgcccagaagcagggacagggagctggttggggaggaccagaaatcaggttatcaatagtctggctgtctatcgtcatcgtgagactgactttggtgtaggagttcgagaccaccctggccaacatggcaaaaccccatctccacaaaaattggataatttgataattatcattattgggtttctgagacgttacacatttaacattctcttctgcacaagttgcctttgtgtgtctttcctgaagactatcttctggtctcgaaatggacatgatggatccatggatgtacagcagagagcctggaggtccaaccgcagtagacagaaagggctgaggtccatttgtatgcacacaaagaaaagagtttcttcctttcgaggaaataaaattggcctgaaagacgtcattactctacggaggcatgtggaaacaaaagttagagctaaaatccgtaagaggaaggtgacaacgaaaatcaaccgtcatgacaaaatcaatggaaagaggaagaccgccagaaaacagaaaatgtttcaacgtgcgcaagagttgcggcggcgggcagaggactaccacaaatgcaaaatccccccttctgcaagaaagcctctttgcaactgggtcagaatggcggcagcggagcatcgtcattcttcaggattgccctactggctctacctcacagctgaaactttaaaaaacaggatgggccgccagccacctcctccaactcaacaacattctataactgataactccctgagcctcaagacacctcctgagtgtctgctcactccccttccaccctcagtggatgataatatcaaggagtgtcctcttgctcctcttccaccctctcctcttccaccctcagtggatgataatctgaaggaatgtctctttgtcccgcttccaccctctcctcttccaccctcagtggatgataatctgaaggaatgtctctttgtcccgcttccaccctctcctcttccaccctcagtggatgataatctcaagactcctcccttagctactcaggaggccgaggtggaaaaaccacccaaacccaagaggtggagggtggatgaggtggaacaatcgcccaagcccaagaggcagagggaggccgaggcacaacaattacccaaacccaagaggcggaggttgagtaagctgagaacacgccattgcactcaagcctgggcaataagaataaatccgtaggtcgaaaaaaagaaaaaaatcaaaaaacaaaacaaaacccacgctccaaaaa

SEQ ID NO: 160688 - DNA, 1487 bp, Homo sapiens
  Payload ID: 11404
  Gene Symbol: NARF
  Gene Name: nuclear prelamin A recognition factor
  Uniprot ID: Q9UHQ1
  ENST ID: ENST00000345415
  CDS Start-End: 156-1382
tctcccggtgctctcattggccgagcgcggccgttgggggtgaggccgcgtcgggggaggacaacaaagggccgcgggcggcgggcagtggtgtcccagtctcccggtgcttccctgaggctgaggcgcccggcctcccgcccgccgcgctccagatgaagtgtgagcactgcacgcgcaaggaatgtagtaagaaaacaaaaactgatgaccaagagaatgtgtcagccgatgcaccgagtccagcccaggaaaatggagagaaatgtgatacctcaaagcacaaagtgctggtagtgtctgtgtgtcctcaatctttgccttattttgctgctaaattcaacctcagtgtaactgatgcatccagaagactctgtggtttcctcaaaagtcttggggtgcactatgtatttgatacgacgatagctgcggattttagtatcctggagagtcaaaaagaattcgtgcgtcgctatcgccagcacagtgaggaggaacgcaccctgcccatgctgacctctgcctgtcctggctgggtccgatacgccgagcgggtgctgggtcgccccatcactgcccacctctgcaccgccaagtccccccagcaggtcatgggctctttggtgaaggattatttcgccagacagcagaacctgtctccagagaagattttccacgtcattgtggccccttgttatgacaagaagctggaggctcttcaggaaagccttccccctgctttgcatggctcccggggcgctgactgcgtgttaacatcaggtgaaattgctcaaataatggagcaaggtgacctctcagtgagagatgctgccgtcgacactctgtttggagacttgaaggaggacaaagtgacgcgtcatgatggagccagctcagacgggcacctggcacacatcttcagacatgcggccaaggagctgttcaacgaggatgtggaggaggtcacttaccgagccctgagaaacaaagacttccaagaggtcacccttgagaagaacggagaggtggtgttacgctttgctgcagcctatggctttcgaaacatccagaacatgatcctgaagcttaagaagggcaagttcccattccactttgtggaggtcctcgcctgtgctggaggatgcttaaatggcagaggccaagcccagactccagacggacatgcggataaggccctgctgcggcagatggaaggcatttacgctgacatccctgtgcggcgtccggagtccagtgcacacgtgcaggagctgtaccaggagtggctggaggggatcaactcccccaaggcccgagaggtgctgcataccacgtaccagagccaggagcgtggcacacacagcctggacatcaagtggtgaagtcaggccagggccttccagctgctcttggggccagagccaagagcctctcagtagagggaggggctgccctgagtggagtattaaagacacttaagaaaaccg

SEQ ID NO: 160689 - DNA, 3949 bp, Homo sapiens
  Payload ID: 11404
  Gene Symbol: NARF
  Gene Name: nuclear prelamin A recognition factor
  Uniprot ID: Q9UHQ1
  ENST ID: ENST00000309794
  CDS Start-End: 199-1569
gtaagggtggggaatcctattggcccaggggtgcggcttgtcctctcccggtgctctcattggccgagcgcggccgttgggggtgaggccgcgtcgggggaggacaacaaagggccgcgggcggcgggcagtggtgtcccagtctcccggtgcttccctgaggctgaggcgcccggcctcccgcccgccgcgctccagatgaagtgtgagcactgcacgcgcaaggaatgtagtaagaaaacaaaaactgatgaccaagagaatgtgtcagccgatgcaccgagtccagcccaggaaaatggagagaagggagaattccacaagttggctgatgccaagatatttttgagcgactgcctggcatgtgacagctgtatgactgcagaggaaggagtccaactttcccagcaaaatgccaaggacttcttccgcgttctgaaccttaacaagaaatgtgatacctcaaagcacaaagtgctggtagtgtctgtgtgtcctcaatctttgccttattttgctgctaaattcaacctcagtgtaactgatgcatccagaagactctgtggtttcctcaaaagtcttggggtgcactatgtatttgatacgacgatagctgcggattttagtatcctggagagtcaaaaagaattcgtgcgtcgctatcgccagcacagtgaggaggaacgcaccctgcccatgctgacctctgcctgtcctggctgggtccgatacgccgagcgggtgctgggtcgccccatcactgcccacctctgcaccgccaagtccccccagcaggtcatgggctctttggtgaaggattatttcgccagacagcagaacctgtctccagagaagattttccacgtcattgtggccccttgttatgacaagaagctggaggctcttcaggaaagccttccccctgctttgcatggctcccggggcgctgactgcgtgttaacatcaggtgaaattgctcaaataatggagcaaggtgacctctcagtgagagatgctgccgtcgacactctgtttggagacttgaaggaggacaaagtgacgcgtcatgatggagccagctcagacgggcacctggcacacatcttcagacatgcggccaaggagctgttcaacgaggatgtggaggaggtcacttaccgagccctgagaaacaaagacttccaagaggtcacccttgagaagaacggagaggtggtgttacgctttgctgcagcctatggctttcgaaacatccagaacatgatcctgaagcttaagaagggcaagttcccattccactttgtggaggtcctcgcctgtgctggaggatgcttaaatggcagaggccaagcccagactccagacggacatgcggataaggccctgctgcggcagatggaaggcatttacgctgacatccctgtgcggcgtccggagtccagtgcacacgtgcaggagctgtaccaggagtggctggaggggatcaactcccccaaggcccgagaggtgctgcataccacgtaccagagccaggagcgtggcacacacagcctggacatcaagtggtgaagtcaggccagggccttccagctgctcttggggccagagccaagagcctctcagtagagggaggggctgccctgagtggagtattaaagacacttaagaaaaccgctcaatggattactttggtttctccgagttccctgctaccccgtttattggaggcccctcaggcagtttcatgtggtgctatcttcataataggtgtgggattggaactttttttttctttttttttttttgagacggagtctcactctgtcacccaggctggagtgcaatggcgcaatctcagctcactgcaacctctgcctcccgggttcaagcgattctcttgccccagcctcccgagtagctgggactaacgcgcacaccaccatgcccagctaatttttgtatttttagtagagatggggtttcactatgttggccaggctggtattgaattcctgacctcctgatccacccgccttggcctcccaaagtgccaggactgcaggcatgagccaccgtgcctggcagattggaacgttttaacatgagaggagcacttccccaatttatcccttcatcctaagattgtgaaaaagtcccaaagagtgggaatggagacagactactgtattttaggtttaaaaagaaaaatccagaaagtgtcctgtgaagagctaggacccccagaggttctaatgcacatgacttgaaggtgatttgatgtgggagtgagggcagagggtggggtggctgtgcctgtggactcctgtggccctggggttgttagggcaggcagtccacagtcccagatccctgcccattttggctctttcttttacccactcatattttccttgaaaatgtttttgccagaacattaataactgtcagccttttagaatcaggagacttacgtacaaatctggattttcagcttttcttagaaaaactgtagtttctgacaacagtaggccccattcctcacagccagtcaccaccctcctcccattcctcacagccagtcaccaccctcctggaccatactcggccctgggccattcctcacagccagtcaccaccctcctcccattcctcacagccagtcaccaccctcctggaccacactcggccctgggccattcctcacagccagtcaccaccctcctggaccatactcagggccctggaggcctggcaacccaggccccaactcaaacttgtacattcagtctttcagtcggactcgcactggggcaagggtgacagacacgagaatggaaaattgagaaggctgcccgcaccagctgggtgggtgcagggggccccagctcatcatcagcactgtcgtggggtgggagtcgggggtaaaggttccgtctgaccctgaggggttgaggatattcaggtggtccagcctcccgcagaagacttccctgtcacccttggcagacaggtttcttctcacacggccctggcccatccactcgccatgaagccctctgtgctcagggtgatggagccccctccattctggcactgcactgtgggcatgagcttgccttaaaaagaaaggagaggccaggcacggtggctcgtgccctataatcccagcacactgggaggccaaggtgggaggattgctggagtccaggagtttctacatgggagactctgtctctacaaattttttttttttttttgagacagagtctcactttgtcacccaggctggagttcagtggcgtgatctcggctcacagcaacctccgcctcctgggttcaagcgattctcctgcctcagcctctggagtagctgggattacaggcgcgcgccaccgcgcctggctaattgtattcttagttgagacgggtttcgccatgttgatcgggccggtcaggctggaatttctgacctcaggtgatccaaccacctcagcctcccaaaatgctgggattacaggcgtgagccactgcacctggcaaaaaatttttttttaaaaaggagaaagcagtttaaccacaaacagtgaaacagagctggcagacgcctgaaactccatggaaccatgcagctgtaccctagggctcctcccaggaaaagagagatgtcaacgtggcccaaggtgtcctgaagcactgggattggattaactcgagcgatggccttcccagccctccgtgctgcagagcctctgctcgctaggctgccttcatctcactctgtgtgctgtgcctgtgcacctgtcttgtcaataactgcatatattgtgttgcgttgcctgtcttgctggataactgcatatattgtgttcagttgtgtatttgttttgctttcagtctatatacagttgggtttccaacctctgattctggaataaacagttgcagcgtg

SEQ ID NO: 160690 - DNA, 1722 bp, Homo sapiens
  Payload ID: 11404
  Gene Symbol: NARF
  Gene Name: nuclear prelamin A recognition factor
  ENST ID: ENST00000374611
  CDS Start-End: 108-896
cgtcgggggaggacaacaaagggccgcgggcggcgggcagtggtgtcccagtctcccggtgcttccctgaggctgaggcgcccggcctcccgcccgccgcgctccagatgaagtgtgagcactgcacgcgcaaggaatgtagtaagaaaacaaaaactgatgaccaagagaatgtgtcagccgatgcaccgagtccagcccaggaaaatggagagaagggagaattccacaagttggctgatgccaagatatttttgagcgactgcctggcatgtgacagctgtatgactgcagaggaaggagtccaactttcccagcaaaatgccaaggacttcttccgcgttctgaaccttaacaagaaatgtgatacctcaaagcacaaagtgctggtagtgtctgtgtgtcctcaatctttgccttattttgctgctaaattcaacctcagtgtaactgatgcatccagaagactctgtggtttcctcaaaagtcttggggtgcactatgtatttgatacgacgatagctgcggattttagtatcctggagagtcaaaaagaattcgtgcgtcgctatcgccagcacagtgaggaggaacgcaccctgcccatgctgacctctgcctgtcctggctgggtccgatacgccgagcgggtgctgggtcgccccatcactgcccacctctgcaccgccaagtccccccagcaggtcatgggctctttggtgaaggattatttcgccagacagcagaacctgtctccagagaagattttccacgtcattgtggccccttgttatgacaagaagctggaggctcttcaggaaagccttccccctgctttgcatggctcccggggcgctgactgcgtgttaacatcaggtgagagccaggcgtggtagtgcacacctgtaatcacagctactcaggaggctgcggcaagagaatcacttgaacccgggaggcagaggttacagcgagacaagattgcaccactggactccagcctgggcggcggaggtgaaattgctcaaataatggagcaaggtgacctctcagtgagagatgctgccgtcgacactctgtttggagacttgaaggaggacaaagtgacgcgtcatgatggagccagctcagacgggcacctggcacacatcttcagacatgcggccaaggagctgttcaacgaggatgtggaggaggtcacttaccgagccctgagaaacaaagacttccaagaggtcacccttgagaagaacggagaggtggtgttacgctttgctgcagcctatggctttcgaaacatccagaacatgatcctgaagcttaagaagggcaagttcccattccactttgtggaggtcctcgcctgtgctggaggatgcttaaatggcagaggccaagcccagactccagacggacatgcggataaggccctgctgcggcagatggaaggcatttacgctgacatccctgtgcggcgtccggagtccagtgcacacgtgcaggagctgtaccaggagtggctggaggggatcaactcccccaaggcccgagaggtgctgcataccacgtaccagagccaggagcgtggcacacacagcctggacatcaagtggtgaagtcaggccagggccttccagctgctcttggggccagagccaagagcctctcagtagagggaggggctgccctgagtggagtattaaagacacttaagaaaaccgc

SEQ ID NO: 160691 - DNA, 1766 bp, Homo sapiens
  Payload ID: 11404
  Gene Symbol: NARF
  Gene Name: nuclear prelamin A recognition factor
  Uniprot ID: Q9UHQ1
  ENST ID: ENST00000390006
  CDS Start-End: 475-1668
tactccgccgagcctacgtgacacgacgtcaagtggcaatggcggcggacgagggctgtgcccccggcccgccccgttaggagccgcgagtaaggcgagtgtccaacgccgagctggctgacagagcccggccgcggcctccgcgggcccaggggcctccaggccccgtgaccaccggaccgagcaccctggaacggccccagcttggcctcgggacagtccgcgcgctcaccgactccctggtgaacgccgcttggccgccgccgccgccgcaggacccacgagaagcggaaaccggcgcaaggacccggtccccccggcgccgaatgtagtaagaaaacaaaaactgatgaccaagagaatgtgtcagccgatgcaccgagtccagcccaggaaaatggagagaagggagaattccacaagttggctgatgccaagatatttttgagcgactgcctggcatgtgacagctgtatgactgcagaggaaggagtccaactttcccagcaaaatgccaaggacttcttccgcgttctgaaccttaacaagaaatgtgatacctcaaagcacaaagtgctggtagtgtctgtgtgtcctcaatctttgccttattttgctgctaaattcaacctcagtgtaactgatgcatccagaagactctgtggtttcctcaaaagtcttggggtgcactatgtatttgatacgacgatagctgcggattttagtatcctggagagtcaaaaagaattcgtgcgtcgctatcgccagcacagtgaggaggaacgcaccctgcccatgctgacctctgcctgtcctggctgggtccgatacgccgagcgggtgctgggtcgccccatcactgcccacctctgcaccgccaagtccccccagcaggtcatgggctctttggtgaaggattatttcgccagacagcagaacctgtctccagagaagattttccacgtcattgtggccccttgttatgacaagaagctggaggctcttcaggaaagccttccccctgctttgcatggctcccggggcgctgactgcgtgttaacatcaggtgaaattgctcaaataatggagcaaggtgacctctcagtgagagatgctgccgtcgacactctgtttggagacttgaaggaggacaaagtgacgcgtcatgatggagccagctcagacgggcacctggcacacatcttcagacatgcggccaaggagctgttcaacgaggatgtggaggaggtcacttaccgagccctgagaaacaaagacttccaagaggtcacccttgagaagaacggagaggtggtgttacgctttgctgcagcctatggctttcgaaacatccagaacatgatcctgaagcttaagaagggcaagttcccattccactttgtggaggtcctcgcctgtgctggaggatgcttaaatggcagaggccaagcccagactccagacggacatgcggataaggccctgctgcggcagatggaaggcatttacgctgacatccctgtgcggcgtccggagtccagtgcacacgtgcaggagctgtaccaggagtggctggaggggatcaactcccccaaggcccgagaggtgctgcataccacgtaccagagccaggagcgtggcacacacagcctggacatcaagtggtgaagtcaggccagggccttccagctgctcttggggccagagccaagagcctctcagtagagggaggggctgccctgagtggagtattaaagacacttaag

SEQ ID NO: 160692 - DNA, 1760 bp, Homo sapiens
  Payload ID: 11404
  Gene Symbol: NARF
  Gene Name: nuclear prelamin A recognition factor
  ENST ID: ENST00000412079
  CDS Start-End: 141-1652
attggccgagcgcggccgttgggggtgaggccgcgtcgggggaggacaacaaagggccgcgggcggcgggcagtggtgtcccagtctcccggtgcttccctgaggctgaggcgcccggcctcccgcccgccgcgctccagatgaagtgtgagcactgcacgcgcaaggaatgtagtaagaaaacaaaaactgatgaccaagagaatgtgtcagccgatgcaccgagtccagcccaggaaaatggagagaagggagaattccacaagttggctgatgccaagatatttttgagcgactgcctggcatgtgacagctgtatgactgcagaggaaggagtccaactttcccagcaaaatgccaaggacttcttccgcgttctgaaccttaacaagaaatgtgatacctcaaagcacaaagtgctggtagtgtctgtgtgtcctcaatctttgccttattttgctgctaaattcaacctcagtgtaactgatgcatccagaagactctgtggtttcctcaaaagtcttggggtgcactatgtatttgatacgacgatagctgcggattttagtatcctggagagtcaaaaagaattcgtgcgtcgctatcgccagcacagtgaggaggaacgcaccctgcccatgctgacctctgcctgtcctggctgggtccgatacgccgagcgggtgctgggtcgccccatcactgcccacctctgcaccgccaagtccccccagcaggtcatgggctctttggtgaaggattatttcgccagacagcagaacctgtctccagagaagattttccacgtcattgtggccccttgttatgacaagaagctggaggctcttcaggaaagccttccccctgctttgcatggctcccggggcgctgactgcgtgttaacatcaggtaaggtacttatctcttggtggtgcacacctgtaatcacagctactcaggaggctgcggcaagagaatcacttgaacccgggaggcagaggttacagcgagacaagattgcaccactggactccagcctgggcggcggaggtgaaattgctcaaataatggagcaaggtgacctctcagtgagagatgctgccgtcgacactctgtttggagacttgaaggaggacaaagtgacgcgtcatgatggagccagctcagacgggcacctggcacacatcttcagacatgcggccaaggagctgttcaacgaggatgtggaggaggtcacttaccgagccctgagaaacaaagacttccaagaggtcacccttgagaagaacggagaggtggtgttacgctttgctgcagcctatggctttcgaaacatccagaacatgatcctgaagcttaagaagggcaagttcccattccactttgtggaggtcctcgcctgtgctggaggatgcttaaatggcagaggccaagcccagactccagacggacatgcggataaggccctgctgcggcagatggaaggcatttacgctgacatccctgtgcggcgtccggagtccagtgcacacgtgcaggagctgtaccaggagtggctggaggggatcaactcccccaaggcccgagaggtgctgcataccacgtaccagagccaggagcgtggcacacacagcctggacatcaagtggtgaagtcaggccagggccttccagctgctcttggggccagagccaagagcctctcagtagagggaggggctgccctgagtggagtattaaagacacttaagaaaaccgctc

SEQ ID NO: 160693 - DNA, 1668 bp, Homo sapiens
  Payload ID: 11404
  Gene Symbol: NARF
  Gene Name: nuclear prelamin A recognition factor
  ENST ID: ENST00000457415
  CDS Start-End: 102-1610
gggaggacaacaaagggccgcgggcggcgggcagtggtgtcccagtctcccggtgcttccctgaggctgaggcgcccggcctcccgcccgccgcgctccagatgaagtgtgagcactgcacgcgcaaggaatgtagtaagaaaacaaaaactgatgaccaagagaatgtgtcagccgatgcaccgagtccagcccaggaaaatggagagaagggagaattccacaagttggctgatgccaagatatttttgagcgactgcctggcatgtgacagctgtatgactgcagaggaaggagtccaactttcccagcaaaatgccaaggacttcttccgcgttctgaaccttaacaagaaatgtgatacctcaaagcacaaagtgctggtagtgtctgtgtgtcctcaatctttgccttattttgctgctaaattcaacctcagtgtaactgatgcatccagaagactctgtggtttcctcaaaagtcttggggtgcactatgtatttgatacgacgatagctgcggattttagtatcctggagagtcaaaaagaattcgtgcgtcgctatcgccagcacagtgaggaggaacgcaccctgcccatgctgacctctgcctgtcctggctgggtccgatacgccgagcgggtgctgggtcgccccatcactgcccacctctgcaccgccaagtccccccagcaggtcatgggctctttggtgaaggattatttcgccagacagcaggttcaggaggaaatgggctcagccttcccggttcttccaggaggctccactggctggggggctttgcagatgtttgggaggaccacacccagtcctgagggaggcagcagacagacatggatggagtgctggtgctcgaacctgtctccagagaagattttccacgtcattgtggccccttgttatgacaagaagctggaggctcttcaggaaagccttccccctgctttgcatggctcccggggcgctgactgcgtgttaacatcaggtgaaattgctcaaataatggagcaaggtgacctctcagtgagagatgctgccgtcgacactctgtttggagacttgaaggaggacaaagtgacgcgtcatgatggagccagctcagacgggcacctggcacacatcttcagacatgcggccaaggagctgttcaacgaggatgtggaggaggtcacttaccgagccctgagaaacaaagacttccaagaggtcacccttgagaagaacggagaggtggtgttacgctttgctgcagcctatggctttcgaaacatccagaacatgatcctgaagcttaagaagggcaagttcccattccactttgtggaggtcctcgcctgtgctggaggatgcttaaatggcagaggccaagcccagactccagacggacatgcggataaggccctgctgcggcagatggaaggcatttacgctgacatccctgtgcggcgtccggagtccagtgcacacgtgcaggagctgtaccaggagtggctggaggggatcaactcccccaaggcccgagaggtgctgcataccacgtaccagagccaggagcgtggcacacacagcctggacatcaagtggtgaagtcaggccagggccttccagctgctcttggggccagagccaagagcctctcagtaga

SEQ ID NO: 160694 - DNA, 1454 bp, Homo sapiens
  Payload ID: 11404
  Gene Symbol: NARF
  Gene Name: nuclear prelamin A recognition factor
  ENST ID: ENST00000582907
  CDS Start-End: 79-645
gcggcgggcagtggtgtcccagtctcccggtgcttccctgaggctgaggcgcccggcctcccgcccgccgcgctccagatgaagtgtgagcactgcacgcgcaaggaatgtagtaagaaaacaaaaactgatgaccaagagaatgtgtcagccgatgcaccgagtccagcccaggaaaatggagagaagggagaattccacaagttggctgatgccaagatatttttgagcgactgcctggcatgtgacagctgtatgactgcagaggaaggagtccaactttcccagcaaaatgccaaggacttcttccgcgttctgaaccttaacaagaaatgtgatacctcaaagcacaaagtgctggtagtgtctgtgtgtcctcaatctttgccttattttgctgctaaattcaacctcagtgtaactgatgcatccagaagactctgtggtttcctcaaaagtcttggggtgcactatgtatttgatacgacgatagctgcggattttagtatcctggagagtcaaaaagaattcgtgcgtcgctatcgccagcacagtgaggaggaacgcaccctgcccatgctgacctctgcctgtcctgggatgctcccatttcccagtagcctccaggcctgcaggttcccatgacccacagccgggccaccgaggacgggttttgggtccagcacgagctcctggctgggtccgatacgccgagcgggtgctgggtcgccccatcactgcccacctctgcaccgccaagtccccccagcaggtcatgggctctttggtgaaggattatttcgccagacagcagaacctgtctccagagaagattttccacgtcattgtggccccttgttatgacaagaagctggaggctcttcaggaaagccttccccctgctttgcatggctcccggggcgctgactgcgtgttaacatcaggtgaaattgctcaaataatggagcaaggtgacctctcagtgagagatgctgccgtcgacactctgtttggagacttgaaggaggacaaagtgacgcgtcatgatggagccagctcagacgggcacctggcacacatcttcagacatgcggccaaggagctgttcaacgaggatgtggaggaggtcacttaccgagccctgagaaacaaagacttccaagaggtcacccttgagaagaacggagaggtggtgttacgctttgctgcagcctatggctttcgaaacatccagaacatgatcctgaagcttaagaagggcaagttcccattccactttgtggaggtcctcgcctgtgctggaggatgcttaaatggcagaggccaagcccagactccagacggacatgcggataaggccctgctgcggcagatggaaggcatttacgctgacatccctgtgcggcgtccggagtccagtgcacacgtgcaggagctgtaccaggagtggctgg

SEQ ID NO: 160695 - DNA, 599 bp, Homo sapiens
  Payload ID: 11404
  Gene Symbol: NARF
  Gene Name: nuclear prelamin A recognition factor
  ENST ID: ENST00000579198
  CDS Start-End: 489-599
gctgctactccgccgagcctacgtgacacgacgtcaagtggcaatggcggcggacgagggctgtgcccccggcccgccccgttaggagccgcgagtaaggcgagtgtccaacgccgagctggctgacagagcccggccgcggcctccgcgggcccaggggcctccaggccccgtgaccaccggaccgagcaccctggaacggccccagcttggcctcgggacagtccgcgcgctcaccgactccctggtgaacgccgcttggccgccgccgccgccgcaggacccacgagaagcggaaaccggcgcaaggacccggtccccccggcgccgtacgtggagaatgtagtaagaaaacaaaaactgatgaccaagagaatgtgtcagccgatgcaccgagtccagcccaggaaaatggagagaagggagaattccacaagttggctgatgccaagatatttttgagcgactgcctggcatgtgacagctgtatgactgcagaggaaggagtccaactttcccagcaaaatgccaaggacttcttccgcgttctgaaccttaacaagaaatgtgatacctcaaagcacaaagtgctggtagtg

SEQ ID NO: 160696 - DNA, 1013 bp, Homo sapiens
  Payload ID: 11404
  Gene Symbol: NARF
  Gene Name: nuclear prelamin A recognition factor
  ENST ID: ENST00000581202
  CDS Start-End: 141-794
attggccgagcgcggccgttgggggtgaggccgcgtcgggggaggacaacaaagggccgcgggcggcgggcagtggtgtcccagtctcccggtgcttccctgaggctgaggcgcccggcctcccgcccgccgcgctccagatgaagtgtgagcactgcacgcgcaaggaatgtagtaagaaaacaaaaactgatgaccaagagaatgtgtcagccgatgcaccgagtccagcccaggaaaatggagagaagggagaattccacaagttggctgatgccaagatatttttgagcgactgcctggcatgtgacagctgtatgactgcagaggaaggagtccaactttcccagcaaaatgccaaggacttcttccgcgttctgaaccttaacaagaaatgtgatacctcaaagcacaaagtgctggtagtgtctgtgtgtcctcaatctttgccttattttgctgctaaattcaacctcagtgtaactgatgcatccagaagactctgtggtttcctcaaaagtcttggctgggtccgatacgccgagcgggtgctgggtcgccccatcactgcccacctctgcaccgccaagtccccccagcaggtcatgggctctttggtgaaggattatttcgccagacagcagaacctgtctccagagaagattttccacgtcattgtggccccttgttatgacaagaagctggaggctcttcaggaaagccttccccctgctttgcatggctcccggggcgctgactgcgtgttaacatcaggtgagagccaggcgtggtagtgcacacctgtaatcacagctactcaggaggctgcggcaagagaatcacttgaacccgggaggcagaggttacagcgagacaagattgcaccactggactccagcctgggcggcggaggtgaaattgctcaaataatggagcaaggtgacctctcagtgagagatgctgccgtcgacactctgtaagtggcttctctggggagagtcctctggggggca

SEQ ID NO: 160697 - DNA, 866 bp, Homo sapiens
  Payload ID: 11404
  Gene Symbol: NARF
  Gene Name: nuclear prelamin A recognition factor
  ENST ID: ENST00000577432
  CDS Start-End: 81-866
gggcggcgggcagtggtgtcccagtctcccggtgcttccctgaggctgaggcgcccggcctcccgcccgccgcgctccagatgaagtgtgagcactgcacgcgcaaggaatgtagtaagaaaacaaaaactgatgaccaagagaatgtgtcagccgatgcaccgagtccagcccaggaaaatggagagaagggagaattccacaagttggctgatgccaagatatttttgagcgactgcctggcatgtgacagctgtatgactgcagaggaaggagtccaactttcccagcaaaatgccaaggacttcttccgcgttctgaaccttaacaagaaatgtgatacctcaaagcacaaagtgctggtagtgtctgtgtgtcctcaatctttgccttattttgctgctaaattcaacctcagtgtaactgatgcatccagaagactctgtggtttcctcaaaagtcttggctgggtccgatacgccgagcgggtgctgggtcgccccatcactgcccacctctgcaccgccaagtccccccagcaggtcatgggctctttggtgaaggattatttcgccagacagcagaacctgtctccagagaagattttccacgtcattgtggccccttgttatgacaagaagctggaggctcttcaggaaagccttccccctgctttgcatggctcccggggcgctgactgcgtgttaacatcaggtgaaattgctcaaataatggagcaaggtgacctctcagtgagagatgctgccgtcgacactctgtttggagacttgaaggaggacaaagtgacgcgtcatgatggagccagctcagacgggcacctggcacacatcttcagacatgcggcc

SEQ ID NO: 160698 - DNA, 500 bp, Homo sapiens
  Payload ID: 11404
  Gene Symbol: NARF
  Gene Name: nuclear prelamin A recognition factor
  ENST ID: ENST00000584513
  CDS Start-End: 1-500
gaacctgtctccagagaagattttccacgtcattgtggccccttgttatgacaagaagctggaggctcttcaggaaagccttccccctgctttgcatggctcccggggcgctgactgcgtgttaacatcaggtgaaattgctcaaataatggagcaaggtgacctctcagtgagagatgctgccgtcgacactctaaacaaagacttccaagaggtcacccttgagaagaacggagaggtggtgttacgctttgctgcagcctatggctttcgaaacatccagaacatgatcctgaagcttaagaagggcaagttcccattccactttgtggaggtcctcgcctgtgctggaggatgcttaaatggcagaggccaagcccagactccagacggacatgcggataaggccctgctgcggcagatggaaggcatttacgctgacatccctgtgcggcgtccggagtccagtgcacacgtgcaggagctgtaccaggagtggc

SEQ ID NO: 160699 - DNA, 1430 bp, Homo sapiens
  Payload ID: 11404
  Gene Symbol: NARF
  Gene Name: nuclear prelamin A recognition factor
  ENST ID: ENST00000581795
  CDS Start-End: 94-525
aacaaagggccgcgggcggcgggcagtggtgtcccagtctcccggtgcttccctgaggctgaggcgcccggcctcccgcccgccgcgctccagatgaagtgtgagcactgcacgcgcaaggaatgtagtaagaaaacaaaaactgatgaccaagagaatgtgtcagccgatgcaccgagtccagcccaggaaaatggagagaagggagaattccacaagttggctgatgccaagatatttttgagcgactgcctggcatgtgacagctgtatgactgcagaggaaggagtccaactttcccagcaaaatgccaaggacttcttccgcgttctgaaccttaacaagaaatgtgatacctcaaagcacaaagtgctggtagtgtctgtgtgtcctcaatctttgccttattttgctgctaaattcaacctcagtgtaactgatgcatccagaagactctgtggtttcctcaaaagtcttgggatgctcccatttcccagtagcctccaggcctgcaggttcccatgacccacagccgggccaccgaggacgggttttgggtccagcacgagctcctggctgggtccgatacgccgagcgggtgctgggtcgccccatcactgcccacctctgcaccgccaagtccccccagcaggtcatgggctctttggtgaaggattatttcgccagacagcagaacctgtctccagagaagattttccacgtcattgtggccccttgttatgacaagaagctggaggctcttcaggaaagccttccccctgctttgcatggctcccggggcgctgactgcgtgttaacatcaggtgaaattgctcaaataatggagcaaggtgacctctcagtgagagatgctgccgtcgacactctgtaagtggcttctctggggagagtcctctggggggcaggacctctcgtcagccctgccagccacctgccaggcccagggctgccctgctttatgacgaggccatgtgaagcactgcgatgcagtcccccaggcccctgccacaaccctcagccaccctatagctgttgaatgggataccattcaccagggctgccagggagttgaaggtttggcgggcttccatggtgtgattgccaccctaaacccttgaggaaggacaaaatgcacaaacagctttgtcctcgctggcgcagggctgttcatgtgtgcaccagcccccttcttcctgagtgccgtctgtgcctcacattccgtgtggtctatggggcagtggggcagctccctcaggcccctttgcaccaagagtggcagtctgggttctgctgggggcggtgacctcgatacccagcaaggcccagggctcctgctgcaccccaggcactgggcagagagcaccacaaaggcagcagcgtgtgtcctcgccaacagtccgcatcccagg

SEQ ID NO: 160700 - DNA, 733 bp, Homo sapiens
  Payload ID: 11404
  Gene Symbol: NARF
  Gene Name: nuclear prelamin A recognition factor
  ENST ID: ENST00000580296
  CDS Start-End: 475-733
ccggaccgagcaccctggaacggccccagcttggcctcgggacagtccgcgcgctcaccgactccctggtgaacgccgcttggccgccgccgccgccgcaggacccacgagaagcggaaaccggcgcaaggacccggtccccccggcgccgccatggcaacaaccgcgcagcgcacgcaggggggttttgtagctgttattgccggaatgggctcctgtggatgctgctctgtggctggcacttctgcgcgtgacgccgtggcaggaggcttcctaacattccatgggtcgttcatccccggtggtggctgcgtcctattctaagaatgtagtaagaaaacaaaaactgatgaccaagagaatgtgtcagccgatgcaccgagtccagcccaggaaaatggagagaagggagaattccacaagttggctgatgccaagatatttttgagcgactgcctggcatgtgacagctgtatgactgcagaggaaggagtccaactttcccagcaaaatgccaaggacttcttccgcgttctgaaccttaacaagaaatgtgatacctcaaagcacaaagtgctggtagtgtctgtgtgtcctcaatctttgccttattttgctgctaaattcaacctcagtgtaactgatgcatccagaagactctgtggtttcctcaaaagtcttggggtgcactatgtatttgatacgacgatagctgcggattttagtatcctgg

SEQ ID NO: 160701 - DNA, 577 bp, Homo sapiens
  Payload ID: 11404
  Gene Symbol: NARF
  Gene Name: nuclear prelamin A recognition factor
  ENST ID: ENST00000580748
  CDS Start-End: 51-350
ggtgcttccctgaggctgaggcgcccggcctcccgcccgccgcgctccagatgaagtgtgagcactgcacgcgcaaggaatgtagtaagaaaacaaaaactgatgaccaagagaatgtgtcagccgatgcaccgagtccagcccaggaaaatggagaggcaagtagatttttcagttttgtatcagcccagagtaaactactgctgctgtttttctctttgggggctcacagcaccgtgcacatcactgctttaaagaagactgaagtacgcgggcatggtggctcacgcctggaatcccagcactttgggaggccgaggtggacggatcacttgaggtcaggagtttgagaccagcctggccaacatggtgaaaccttatctctgctaaaaatacaaaaattatccagaagggagaattccacaagttggctgatgccaagatatttttgagcgactgcctggcatgtgacagctgtatgactgcagaggaaggagtccaactttcccagcaaaatgccaaggacttcttccgcgttctgaaccttaacaagaaatgtgatacctcaaagcacaaa

SEQ ID NO: 160702 - DNA, 873 bp, Homo sapiens
  Payload ID: 11404
  Gene Symbol: NARF
  Gene Name: nuclear prelamin A recognition factor
  ENST ID: ENST00000577410
  CDS Start-End: 400-873
gtggggctctgggcggccgaggttggcggtccgggcccgccgctcgctcgcttcagggctcttcaaggcgcccccggcctcggcaccctgggcccgctcggcgtggaggcggccggcgcggggtccgctgcgctctgcagggcgggttcggtcttcgcggttctccctgaacttgtccatctttcccacgcccgcgaagcgcggaaacgcacggagaccgagcctctcgtgccgcgcaccacagtccgagaatgtagtaagaaaacaaaaactgatgaccaagagaatgtgtcagccgatgcaccgagtccagcccaggaaaatggagagaagggagaattccacaagttggctgatgccaagatatttttgagcgactgcctggcatgtgacagctgtatgactgcagaggaaggagtccaactttcccagcaaaatgccaaggacttcttccgcgttctgaaccttaacaagaaatgtgatacctcaaagcacaaagtgctggtagtgtctgtgtgtcctcaatctttgccttattttgctgctaaattcaacctcagtgtaactgatgcatccagaagactctgtggtttcctcaaaagtcttggggtgcactatgtatttgatacgacgatagctgcggattttagtatcctggagagtcaaaaagaattcgtgcgtcgctatcgccagcacagtgaggaggaacgcaccctgcccatgctgacctctgcctgtcctggctgggtccgatacgccgagcgggtgctgggtcgccccatcactgcccacctctgcaccgccaagtccccccagcaggtcatgggctctttggtgaaggattatttcgccagacagcagaacctgtctcca

SEQ ID NO: 160703 - DNA, 525 bp, Homo sapiens
  Payload ID: 11404
  Gene Symbol: NARF
  Gene Name: nuclear prelamin A recognition factor
  ENST ID: ENST00000584411
  CDS Start-End: 263-525
aacaaagggccgcgggcggcgggcagtggtgtcccagtctcccggtgcttccctgaggctgaggcgcccggcctcccgcccgccgcgctccagatgaagtgtgagcactgcacgcgcaagtaagaaaacaaaaactgatgaccaagagaatgtgtcagccgatgcaccgagtccagcccaggaaaatggagagaagggagaattccacaagttggctgatgccaagatatttttgagcgactgcctggcatgtgacagctgtatgactgcagaggaaggagtccaactttcccagcaaaatgccaaggacttcttccgcgttctgaaccttaacaagaaatgtgatacctcaaagcacaaagtgctggtagtgtctgtgtgtcctcaatctttgccttattttgctgctaaattcaacctcagtgtaactgatgcatccagaagactctgtggtttcctcaaaagtcttggggtgcactatgtatttgatacgacgatagctgcggattttagtatcctggagag

SEQ ID NO: 160704 - DNA, 891 bp, Homo sapiens
  Payload ID: 11404
  Gene Symbol: NARF
  Gene Name: nuclear prelamin A recognition factor
  ENST ID: ENST00000582585
  CDS Start-End: 107-406
gtcgggggaggacaacaaagggccgcgggcggcgggcagtggtgtcccagtctcccggtgcttccctgaggctgaggcgcccggcctcccgcccgccgcgctccagatgaagtgtgagcactgcacgcgcaaggaatgtagtaagaaaacaaaaactgatgaccaagagaatgtgtcagccgatgcaccgagtccagcccaggaaaatggagaggcaagtagatttttcagttttgtatcagcccagagtaaactactgctgctgtttttctctttgggggctcacagcaccgtgcacatcactgctttaaagaagactgaagtacgcgggcatggtggctcacgcctggaatcccagcactttgggaggccgaggtggacggatcacttgaggtcaggagtttgagaccagcctggccaacatggtgaaaccttatctctgctaaaaatacaaaaattatccaggtatggtggtgtacgcctgtaatcccagctactcaggaggctgaggcaggagaattgcttgaccctggaagacagaggttgcagtgagctgagattgtaccactgtacttcagcctgggcaacagagtgagactctgtcccaaaaaaaagactgaaataggccaggcgtggtggctcatgcctgtaatcccagaactttgggaggccgaggcaggcggatcatgagatcaggagattgagactatcctggctaacacagtgaaacctcatctctactaaaaatgcaaaaaattagccgggcgtggtggggggcgcctgtagtcccagctactcgggaggctgagccaggagaaaggcgtgaacctgggaggcggaacttgcatggctcactgtatggctcaccgcagccttgacctctgaggctca

SEQ ID NO: 160705 - DNA, 2112 bp, Homo sapiens
  Payload ID: 11405
  Gene Symbol: NARFL
  Gene Name: nuclear prelamin A recognition factor-like
  Uniprot ID: Q9H6Q4
  ENST ID: ENST00000251588
  CDS Start-End: 18-1448
gcggcagtgcggccgtcatggcgtcgcccttcagcggggcgctgcagctgacggacctggatgacttcatcgggccgtctcaggagtgcatcaagcctgtcaaagtggaaaaaagggcgggaagtggcgtggccaagattcgcattgaagatgacgggagctacttccaaattaaccaagacggcgggacccggaggctggagaaggccaaggtctcgctaaacgactgcctggcgtgcagcggctgcatcacctccgcagagaccgtgcttatcacccagcagagccacgaggagctgaagaaggttctagatgctaacaagatggcggcacccagtcagcagaggctggttgtagtttcggtctcaccacagtctagagcatcgctggctgcacggtttcagctgaatcctacagatactgccaggaaattaacctcattctttaaaaaaataggggtgcacttcgtcttcgacaccgccttctcaaggcacttcagcctcctggagagccagcgagagtttgtgcggcgattccgaggacaggccgactgcagacaggcgctgcccctgctggcctctgcctgcccaggctggatctgctatgccgagaagactcacggcagcttcatcctcccccacatcagcaccgcccggtccccgcagcaggtcatgggctccctggtcaaggacttcttcgcccagcagcagcacttgacccctgacaagatctaccacgtcacagtgatgccctgctatgacaaaaagctggaagcctccagacccgactttttcaaccaggagcaccagacacgggatgtggactgtgtcctcacaacaggagaagttttcaggttgctggaggaagagggcgtctccctccccgacctggaaccagcccctctggacagcctgtgcagcggtgcctctgcagaggagcccaccagccatcggggagggggctcggggggctacctggagcacgtgttccggcacgcggcccgagagctctttggaatccatgtggctgaggttacctacaaacccctgaggaacaaagacttccaggaggtgacactggagaaggagggccaggtgctgctgcacttcgcaatggcgtacggcttccgcaacatccagaacctggtgcagaggctcaaacgagggcgctgcccctaccactacgtggaggtcatggcctgcccctcaggctgcctgaacggcgggggccagctccaggccccagacaggcccagcagagagctcctccagcacgtggagagactgtacggcatggtccgggctgaggcgcccgaggacgcgcctggggttcaggagctgtacacacactggctgcagggcacggactcggagtgtgcaggtcgcttgctgcatacgcagtaccacgccgtggagaaggccagcactggcctgggcatccggtggtaggggctgcaggaccaggactcccaggaggccgtgtccatgtgtgacagcagaaccacatgccccaagaccccagggcttcccccaaaattctgagtgagctgcagggtgtgctgggacccgagtaggagctaggactagccaggacccgcagccgcctcgtcacctccagttgggtgcctctgggttcccactggctctgcccaggtggggtggggtggcccaggcagcagaaggttccctgaggtcccagagcctgttccgttggccctgggccgaggcccacaggtgctgcccttgctgctgctggtcgggcacccaagtgcgtgaggggcttcagcctgtcccggggttgcctgaggcagagcaagacgggttctcacccctgacttctggaggcttcccttgaagctctgtgcaaaaggtgggagacagagctggacctgcaggggtggtcccgccacaaccctgcgtgtggaccctggcaggggggggtgccaggcccctggaaagcaggggttaccgttacgaggctgtggtccggggcaagccaagtacgaagcagcagccatcgcgggctgcatcatcccccagccaggtccccaccaggcctgtctcccagcgtttgtctaataaacgcacccctcctaaaacacgcctacgaaaa

SEQ ID NO: 160706 - DNA, 3212 bp, Homo sapiens
  Payload ID: 11405
  Gene Symbol: NARFL
  Gene Name: nuclear prelamin A recognition factor-like
  Uniprot ID: Q9H6Q4
  ENST ID: ENST00000540986
  CDS Start-End: 1437-2561
atcgggccgtctcaggtgggccggcctgggcgggcggggtcgaggctgcgctcggtgccctgtcgcgcggagggaaattgctctgcgccccacttcctcccctgaggaatgagatccgaatcccgggagcccggtctgggccgtcagggactctatcgacccgggcgcggggcctcagacactgaggcccgcttcttaccaacaaggaaactgaggccagggagggcggcgccccccaacccgctcctgtgccccatggtgtccgggcgggctgcgtgggagggtcccgtggtcgcgggctcgcgccggcctgcccaacccagaggaggcagcagaggcggctcccacacatccctaaccctaacccgacccctgggtcgcagctggagggcggcggggcccgggccggggcctcttccccttcccctgcgcaggacgccttgtcaggcctcaggacccccaagccacagcctttgcatctgcataaacgggtgcggtggggaccccacctcatttgagggcagtaggggcggcccgctagacgccccgcagtggctcctcagtagagctgtccttaacgtcgccctggtgggccggacagctacccttgaacccgggaggctgcaggcgcccttttctgggtgcacctgcctgtccatgtccaacagccccgcggggccagagctgagcagggcgagaggcgggctgctgggagcgcttccggcagggatgagctgggaggcggctttctgggctgccagggttctcaaggagaagagagagaaatccacttgtttcccgggcactgagcaggaggtggtctccaaacagatccaagcacacgtcctctcgatgggcagtgcaactctggtctctgtggtggtcacgccccctgttcacgtgaagggtgaaggtcagtgttggtggtgtctccgcaggtgggtagtttgcaggcgctgttagcactggccttcctgcacactgggaacttcagtgccgcaggatgttgggaacccgatccctgggtgagagcagtggggcaggaagaagacggtgggaccagcctcagtccctgagtgcatggctcctggcagagccttcaggctgtgcggctgggcagccatccttgaggcctggcctcccagggaacctccgcccactcacaggggctgatttggggtctcttcctgctctaggagtgcatcaagcctgtcaaagtggaaaaaagggcgggaagtggcgtggccaagattcgcattgaagatgacgggagctacttccaaattaaccaagacggcgggacccggaggctggagaaggccaaggtctcgctaaacgactgcctggcgtgcagcggctgcatcacctccgcagagaccgtgcttatcacccagcagagccacgaggagctgaagaaggttctagatgctaacaagatggcggcacccagtcagcagaggctggttgtagtttcggtctcaccacagtctagagcatcgctggctgcacggtttcagctgaatcctacagatactgccaggaaattaacctcattctttaaaaaaataggggtgcacttcgtcttcgacaccgccttctcaaggcacttcagcctcctggagagccagcgagagtttgtgcggcgattccgaggacaggccgactgcagacaggcgctgcccctgctggcctctgcctgcccaggctggatctgctatgccgagaagactcacggcagcttcatcctcccccacatcagcaccgcccggtccccgcagcaggtcatgggctccctggtcaaggacttcttcgcccagcagcagcacttgacccctgacaagatctaccacgtcacagtgatgccctgctatgacaaaaagctggaagcctccagacccgactttttcaaccaggagcaccagacacgggatgtggactgtgtcctcacaacaggagaagttttcaggttgctggaggaagagggcgtctccctccccgacctggaaccagcccctctggacagcctgtgcagcggtgcctctgcagaggagcccaccagccatcggggagggggctcggggggctacctggagcacgtgttccggcacgcggcccgagagctctttggaatccatgtggctgaggttacctacaaacccctgaggaacaaagacttccaggaggtgacactggagaaggagggccaggtgctgctgcacttcgcaatggcgtacggcttccgcaacatccagaacctggtgcagaggctcaaacgagggcgctgcccctaccactacgtggaggtcatggcctgcccctcaggctgcctgaacggcgggggccagctccaggccccagacaggcccagcagagagctcctccagcacgtggagagactgtacggcatggtccgggctgaggcgcccgaggacgcgcctggggttcaggagctgtacacacactggctgcagggcacggactcggagtgtgcaggtcgcttgctgcatacgcagtaccacgccgtggagaaggccagcactggcctgggcatccggtggtaggggctgcaggaccaggactcccaggaggccgtgtccatgtgtgacagcagaaccacatgccccaagaccccagggcttcccccaaaattctgagtgagctgcagggtgtgctgggacccgagtaggagctaggactagccaggacccgcagccgcctcgtcacctccagttgggtgcctctgggttcccactggctctgcccaggtggggtggggtggcccaggcagcagaaggttccctgaggtcccagagcctgttccgttggccctgggccgaggcccacaggtgctgcccttgctgctgctggtcgggcacccaagtgcgtgaggggcttcagcctgtcccggggttgcctgaggcagagcaagacgggttctcacccctgacttctggaggcttcccttgaagctctgtgcaaaaggtgggagacagagctggacctgcaggggtggtcccgccacaaccctgcgtgtggaccctggcaggggggggtgccaggcccctggaaagcaggggttaccgttacgaggctgtggtccggggcaagccaagtacgaagcagcagccatcgcgggctgcatcatcccccagccaggtccccaccaggcctgtctcccagcgtttgtctaataaacgcacccctcctaaaac

SEQ ID NO: 160707 - DNA, 546 bp, Homo sapiens
  Payload ID: 11405
  Gene Symbol: NARFL
  Gene Name: nuclear prelamin A recognition factor-like
  ENST ID: ENST00000570289
  CDS Start-End: 4-252
gtcatggcgtcgcccttcagcggggcgctgcagctgacggacctggatgacttcatcgggccgtctcaggagtgcatcaagcctgtcaaagtggaaaaaagggcgggaagtggcgtggccaagattcgcattgaagatgacgggagctacttccaaattaaccaagtaaggcacaggaggctgctccaccatctctcctgcccggctgatccgaaacacttttctctgcttcctcccgtcacagagcggtgaccccgagacactccaggacggcgggacccggaggctggagaaggccaaggtctcgctaaacgactgcctggcgtgcagcggctgcatcacctccgcagagaccgtgcttatcacccagcagagccacgaggagctgaagaaggttctagatgctaacaagatggcggcacccagtcagcagaggctggttgtagtttcggtctcaccacagtctagagcatcgctggctgcacggtttcagctgaatcctacagatactgccaggaaattaacctcattctttaaaaaaatagg

SEQ ID NO: 160708 - DNA, 634 bp, Homo sapiens
  Payload ID: 11405
  Gene Symbol: NARFL
  Gene Name: nuclear prelamin A recognition factor-like
  ENST ID: ENST00000565065
  CDS Start-End: 13-225
agtgcggccgtcatggcgtcgcccttcagcggggcgctgcagctgacggacctggatgacttcatcgggccgtctcagatccaagcacacgtcctctcgatgggcagtgcaactctggtctctgtggtggtcacgccccctgttcacgtgaagggtgaaggagtgcatcaagcctgtcaaagtggaaaaaagggcgggaagtggcgtggccaagattcgcattgaagatgacgggagctacttccaaattaaccaagacggcgggacccggaggctggagaaggccaaggtctcgctaaacgactgcctggcgtgcagcggctgcatcacctccgcagagaccgtgcttatcacccagcagagccacgaggagctgaagaaggttctagatgctaacaagatggcggcacccagtcagcagaggctggttgtagtttcggtctcaccacagtctagagcatcgctggctgcacggtttcagctgaatcctacagatactgccaggaaattaacctcattctttaaaaaaataggggtgcacttcgtcttcgacaccgccttctcaaggcacttcagcctcctggagagccagcgagagtttgtgcggcgattccgaggacaggccgactgcaga

SEQ ID NO: 160709 - DNA, 1918 bp, Homo sapiens
  Payload ID: 11405
  Gene Symbol: NARFL
  Gene Name: nuclear prelamin A recognition factor-like
  ENST ID: ENST00000565425
  CDS Start-End: 13-579
agtgcggccgtcatggcgtcgcccttcagcggggcgctgcagctgacggacctggatgacttcatcgggccgtctcaggagtgcatcaagcctgtcaaagtggaaaaaagggcgggaagtggcgtggccaagattcgcattgaagatgacgggagctacttccaaattaaccaagacggcgggacccggaggctggagaaggccaaggtctcgctaaacgactgcctggcgtgcagcggctgcatcacctccgcagagaccgtgcttatcacccagcagagccacgaggagctgaagaaggttctagatgctaacaaggggtgcacttcgtcttcgacaccgccttctcaaggcacttcagcctcctggagagccagcgagagtttgtgcggcgattccgaggacaggccgactgcagacaggcgctgcccctgctggcctctgcctgcccaggctggatctgctatgccgagaagactcacggcagcttcatcctcccccacatcagcaccgcccggtccccgcagcaggtcatgggctccctggtcaaggacttcttcgcccagcagcagcacttgacccctgacaagatctaccacgtcacagtgatgccctgctatgacaaaaagctggaagcctccagacccgactttttcaaccaggagcaccagacacgggatgtggactgtgtcctcacaacaggagaagttttcaggttgctggaggaagagggcgtctccctccccgacctggaaccagcccctctggacagcctgtgcagcggtgcctctgcagaggagcccaccagccatcggggagggggctcggggggctacctggagcacgtgttccggcacgcggcccgagagctctttggaatccatgtggctgaggttacctacaaacccctgaggaacaaagacttccaggaggtgacactggagaaggagggccaggtgctgctgcacttcgcaatggcgtacggcttccgcaacatccagaacctggtgcagaggctcaaacgagggcgctgcccctaccactacgtggaggtcatggcctgcccctcaggctgcctgaacggcgggggccagctccaggccccagacaggcccagcagagagctcctccagcacgtggagagactgtacggcatggtccgggctgaggcgcccgaggacgcgcctggggttcaggagctgtacacacactggctgcagggcacggactcggagtgtgcaggtcgcttgctgcatacgcagtaccacgccgtggagaaggccagcactggcctgggcatccggtggtaggggctgcaggaccaggactcccaggaggccgtgtccatgtgtgacagcagaaccacatgccccaagaccccagggcttcccccaaaattctgagtgagctgcagggtgtgctgggacccgagtaggagctaggactagccaggacccgcagccgcctcgtcacctccagttgggtgcctctgggttcccactggctctgcccaggtggggtggggtggcccaggcagcagaaggttccctgaggtcccagagcctgttccgttggccctgggccgaggcccacaggtgctgcccttgctgctgctggtcgggcacccaagtgcgtgaggggcttcagcctgtcccggggttgcctgaggcagagcaagacgggttctcacccctgacttctggaggcttcccttgaagctctgtgcaaaaggtgggagacagagctggacctgcaggggtggtcccgccacaaccctgcgtgtggaccctggcaggggggggtgccaggcccctggaaagcaggggttaccgttacgaggctgtggtccggggcaagccaagtacgaagcagcagccatcgcgggctgcatcatcccccagccaggtccccaccaggc

SEQ ID NO: 160710 - DNA, 961 bp, Homo sapiens
  Payload ID: 11405
  Gene Symbol: NARFL
  Gene Name: nuclear prelamin A recognition factor-like
  ENST ID: ENST00000562421
  CDS Start-End: 403-961
tcttcctgtgccttcgtcctttcctcctttgtcctcagctttcccgcctcctcctttcagagcccaccttcggcattttcctgccctacagccctgtgagtgtgcaccggggccagcaccccgtccagggccccatgggtgagtggggtggctgctgctttgctgagataccagtggcaagccttagtcctgtgattcggatgcactaaccaagtggtaccaagaagcagacttgacggcattatgaaactgtagagcgacggcgggacccggaggctggagaaggccaaggtctcgctaaacgactgcctggcgtgcagcggctgcatcacctccgcagagaccgtgcttatcacccagcagagccacgaggagctgaagaaggttctagatgctaacaagatggcggcacccagtcagcagaggctggttgtagtttcggtctcaccacagtctagagcatcgctggctgcacggtttcagctgaatcctacagatactgccaggaaattaacctcattctttaaaaaaataggggtgcacttcgtcttcgacaccgccttctcaaggcacttcagcctcctggagagccagcgagagtttgtgcggcgattccgaggacaggccgactgcagacaggcgctgcccctgctggcctctgcctgcccaggctggatctgctatgccgagaagactcacggcagcttcatcctcccccacatcagcaccgcccggtccccgcagcaggtcatgggctccctggtcaaggacttcttcgcccagcagcagcacttgacccctgacaagatctaccacgtcacagtgatgccctgctatgacaaaaagctggaagcctccagacccgactttttcaaccaggagcaccagacacgggatgtggactgtgtcctcacaacaggagaagttttcaggttgctggaggaagagggcgtctccctcc

SEQ ID NO: 160711 - DNA, 568 bp, Homo sapiens
  Payload ID: 11405
  Gene Symbol: NARFL
  Gene Name: nuclear prelamin A recognition factor-like
  ENST ID: ENST00000567403
  CDS Start-End: 237-568
tcctgtgccttcgtcctttcctcctttgtcctcagctttcccgcctcctcctttcagagcccaccttcggcattttcctgccctacagccctgacggcgggacccggaggctggagaaggccaaggtctcgctaaacgactgcctggcgtgcagcggctgcatcacctccgcagagaccgtgcttatcacccagcagagccacgaggagctgaagaaggttctagatgctaacaagatggcggcacccagtcagcagaggctggttgtagtttcggtctcaccacagtctagagcatcgctggctgcacggtttcagctgaatcctacagatactgccaggaaattaacctcattctttaaaaaaataggggtgcacttcgtcttcgacaccgccttctcaaggcacttcagcctcctggagagccagcgagagtttgtgcggcgattccgaggacaggccgactgcagacaggcgctgcccctgctggcctctgcctgcccaggctggatctgctatgccgagaagactcacggcagcttcatcctcccccacatcagcaccgcccg

SEQ ID NO: 160712 - DNA, 2486 bp, Homo sapiens
  Payload ID: 11405
  Gene Symbol: NARFL
  Gene Name: nuclear prelamin A recognition factor-like
  Uniprot ID: Q9H6Q4
  ENST ID: ENST00000568545
  CDS Start-End: 705-1829
gaaaagttgctgaggcatgtcccggaggcccccgactggaacaccttgttcctgcatctgtttggcgagtctgacggttgtttctgccccgcccaccggaggccaggctcccaggcttcctccctctgctctcctcttcctgtgccttcgtcctttcctcctttgtcctcagctttcccgcctcctcctttcagagcccaccttcggcattttcctgccctacagccctgtgagtgtgcaccggggccagcaccccgtccagggccccatgggtgagtggggtggctgctgctttgctgagataccagtggcaagccttagtcctgtgattcggatgcactaaccaagtggtaccaagaagcagacttgacggcattatgaaactgtagagcgtgcgtgtgcatttttgtaatacatacctaatttttaaaaattcagcggcacacaagcccagccagcagccatgttggttgtcggttatgagctggactccactatcctctgtctccatgtcctcgtgcagagggggcccctgtgcaccgggttcttctcccttgtaggacggcgggacccggaggctggagaaggccaaggtctcgctaaacgactgcctggcgtgcagcggctgcatcacctccgcagagaccgtgcttatcacccagcagagccacgaggagctgaagaaggttctagatgctaacaagatggcggcacccagtcagcagaggctggttgtagtttcggtctcaccacagtctagagcatcgctggctgcacggtttcagctgaatcctacagatactgccaggaaattaacctcattctttaaaaaaataggggtgcacttcgtcttcgacaccgccttctcaaggcacttcagcctcctggagagccagcgagagtttgtgcggcgattccgaggacaggccgactgcagacaggcgctgcccctgctggcctctgcctgcccaggctggatctgctatgccgagaagactcacggcagcttcatcctcccccacatcagcaccgcccggtccccgcagcaggtcatgggctccctggtcaaggacttcttcgcccagcagcagcacttgacccctgacaagatctaccacgtcacagtgatgccctgctatgacaaaaagctggaagcctccagacccgactttttcaaccaggagcaccagacacgggatgtggactgtgtcctcacaacaggagaagttttcaggttgctggaggaagagggcgtctccctccccgacctggaaccagcccctctggacagcctgtgcagcggtgcctctgcagaggagcccaccagccatcggggagggggctcggggggctacctggagcacgtgttccggcacgcggcccgagagctctttggaatccatgtggctgaggttacctacaaacccctgaggaacaaagacttccaggaggtgacactggagaaggagggccaggtgctgctgcacttcgcaatggcgtacggcttccgcaacatccagaacctggtgcagaggctcaaacgagggcgctgcccctaccactacgtggaggtcatggcctgcccctcaggctgcctgaacggcgggggccagctccaggccccagacaggcccagcagagagctcctccagcacgtggagagactgtacggcatggtccgggctgaggcgcccgaggacgcgcctggggttcaggagctgtacacacactggctgcagggcacggactcggagtgtgcaggtcgcttgctgcatacgcagtaccacgccgtggagaaggccagcactggcctgggcatccggtggtaggggctgcaggaccaggactcccaggaggccgtgtccatgtgtgacagcagaaccacatgccccaagaccccagggcttcccccaaaattctgagtgagctgcagggtgtgctgggacccgagtaggagctaggactagccaggacccgcagccgcctcgtcacctccagttgggtgcctctgggttcccactggctctgcccaggtggggtggggtggcccaggcagcagaaggttccctgaggtcccagagcctgttccgttggccctgggccgaggcccacaggtgctgcccttgctgctgctggtcgggcacccaagtgcgtgaggggcttcagcctgtcccggggttgcctgaggcagagcaagacgggttctcacccctgacttctggaggcttcccttgaagctctgtgcaaaaggtgggagacagagctggacctgcaggggtggtcccgccacaaccctgcgtgtggaccctggcaggggggggtgccaggcccctggaaagcaggggttaccgttacgaggctgtggtccggggcaagccaagtacgaagcagcagccatcgcgggctgcatcatcccccagccaggtccccaccaggcctgtctcccagcgtttgtctaataaacgcacccctcctaaaacacgcct

SEQ ID NO: 160713 - DNA, 565 bp, Homo sapiens
  Payload ID: 11405
  Gene Symbol: NARFL
  Gene Name: nuclear prelamin A recognition factor-like
  ENST ID: ENST00000570066
  CDS Start-End: 31-231
acacctgcgcgcggcggcagtgcggccgtcatggcgtcgcccttcagcggggcgctgcagctgacggacctggatgacttcatcgggccgtctcaggagtgcatcaagcctgtcaaagtggaaaaaagggcgggaagtggcgtggccaagattcgcattgaagatgacgggagctacttccaaattaaccaaagcccaccttcggcattttcctgccctacagccctgtgagtgtgcaccggggccagcaccccgtccagggccccatgggtgagtggggtggctgctgctttgctgagataccagtggcaagccttagtcctgtgattcggatgcactaaccaagtggtaccaagaagcagacttgacggcattatgaaactgtagagcgacggcgggacccggaggctggagaaggccaaggtctcgctaaacgactgcctggcgtgcagcggctgcatcacctccgcagagaccgtgcttatcacccagcagagccacgaggagctgaagaaggttctagatgctaacaagatggcggcacccagtcagcagaggctggttg

SEQ ID NO: 160714 - DNA, 561 bp, Homo sapiens
  Payload ID: 11405
  Gene Symbol: NARFL
  Gene Name: nuclear prelamin A recognition factor-like
  ENST ID: ENST00000566614
  CDS Start-End: 402-561
aggtacgcagaggatgaggaaatggacggagccagatcccctccgcttccttgtgaaggcggagagactccggggccggagctgcggcgctggcccgaccaacccctgcgccccctgcaccccaacccggggcctggggcgcgcgggaggtggacgaagcggagtgcatcaagcctgtcaaagtggaaaaaagggcgggaagtggcgtggccaagattcgcattgaagatgacgggagctacttccaaattaaccaagacggcgggacccggaggctggagaaggccaaggtctcgctaaacgactgcctggcgtgcagcggctgcatcacctccgcagagaccgtgcttatcacccagcagagccacgaggagctgaagaaggttctagatgctaacaagatggcggcacccagtcagcagaggctggttgtagtttcggtctcaccacagtctagagcatcgctggctgcacggtttcagctgaatcctacagatactgccaggaaattaacctcattctttaaaaaaataggggtgcacttcgtcttcgacaccgcct

SEQ ID NO: 160715 - DNA, 6117 bp, Homo sapiens
  Payload ID: 11406
  Gene Symbol: NPAT
  Gene Name: nuclear protein, ataxia-telangiectasia locus
  Uniprot ID: Q14207
  ENST ID: ENST00000278612
  CDS Start-End: 107-4390
gttcagtgccgccactggaaccaggagatgcggcgcaggagctgtcgctgtgtttgctttaacctgagtcttgttccttattgtggttcctgctgtggttttgatcatgttgttaccctcggacgtagcccggcttgtattgggttacttacagcaagaaaacctcatttctacctgccagacttttattttggaaagttcagatttaaaagaatatgcagaacattgtacagatgaagggtttattccagcctgcttactgtccttatttggaaaaaacttgacaacaattttaaatgagtatgtagctatgaaaacaaaagaaacatcaaataatgtcccagcaataatgtcatctctatggaagaaattggaccatacactttctcagatcaggagcatgcaaagttccccaaggtttgctggcagtcagagagcccgaacgagaactggaattgcagaaatcaaacggcagagaaagcttgcatctcaaacagctccagccagtgcagagttgctcactttaccttacctttcaggacagtttaccactcctccttccacaggtacacaggttactcgaccaagtggccaaatttcagatccatcgaggtcatattttgtagtggtcaaccactcacagtcacaagatactgtaaccactggagaagctttaaatgtcattcctggtgctcaggaaaagaaagcacatgccagtttaatgtctcccggtagacgcaaaagtgaatctcagagaaaaagtaccactttgtctggccctcattcaacaatacggaatttccaagatccaaacgcttttgcagtagaaaaacaaatggttattgaaaatgcacgagaaaaaatactaagcaacaaatctcttcaagaaaagctagcagaaaacataaataaatttttaactagtgataacaatattgcccaagtacctaagcaaacagataacaaccctacggagccagagacttcaattgatgaattcctaggacttccgagtgaaattcacatgtctgaagaagctatacaggacatattggaacagacagaatcagacccagcatttcaggcactctttgatctctttgactatggcaaaacaaagaataataaaaatatatcacaaagtatttccagtcaacctatggaatccaatcccagtatagtcttagcagatgaaactaatctagcagttaaaggttcttttgaaacagaagaatctgatggtcagtctggtcagcccgctttttgtacatcctatcagaatgatgacccattaaatgctttgaagaatagcaacaaccatgatgtgcttagacaagaagaccaggaaaatttttcccaaataagtaccagcatacagaaaaaggcctttaaaacagctgtacccactgaacagaagtgtgacattgacattacctttgagtccgtgcctaatttgaatgactttaaccaaagagggaattctaatgctgaatgtaatccacattgtgctgaattatacaccaatcagatgtccactgaaactgaaatggctatagggattgaaaagaactctttgtcttcaaatgtaccgagtgaatctcagttacagcctgatcagcctgatataccaataacttcatttgtttcacttggttgtgaagctaacaatgaaaacttaattctctctgggaagagttctcaacttttatcccaagatacttcattaactggaaagccatctaaaaaaagtcaattttgtgaaaattctaatgatacagtaaaacttaaaattaattttcatggttccaagtcatcagattctagtgaagttcacaagagtaaaatagaaattaatgtgttagaaccagttatgtcacagctatcaaattgccaagataattcttgtcttcaaagtgaaatactacctgtgtctgttgaaagttcacatttaaatgtatctggacaagtagaaattcatcttggagattcgctgtcttctactaaacaaccatctaatgattcagcatctgttgagttaaatcatacagaaaatgaagctcaggcatccaagtctgagaattcacaggagccttcatcttctgtaaaagaagagaatactatttttctctctttaggtggaaatgctaactgtgagaaagttgcactgacgcctccagaaggcactcctgtagaaaacagtcactctcttcctccagaatctgtgtgttcttcagtgggagattctcaccctgagtcccaaaatactgatgataaaccttctagcaacaactcagcagagatagatgcatcaaatatcgtctctctcaaagttatcattagtgatgatccatttgtttcctcagatactgaacttaccagtgctgtttctagtattaatggagaaaacctgccaactataatcttgtcttctcctactaaatcacctactaaaaatgcagaactagttaaatgcctatcttcagaagaaactgtaggtgctgttgtatatgccgaagtaggggattcagcctcaatggaacagagtcttttaacattcaaatctgaagactctgcagtaaacaatactcagaatgaagatggcattgctttttcagctaatgttacaccatgtgtttccaaggatggaggatatatacagttgatgccagccacaagcacagcttttggcaattcaaataacattctgatagctacctgtgtgactgatccaacagcgttaggaacatctgtaagtcagtctaatgtagtggtgttgcctggaaattctgcacctatgactgctcaacctctaccacctcagttacagacaccaccaaggtcaaacagtgtatttgctgtcaaccaagctgtgtcaccaaacttttcacaaggatctgccataataattgcctctccagtccagcctgtactccaaggaatggtagggatgatcccagtatctgtggttggacagaatggaaataacttttctactcctcctcggcaggttcttcatatgcctttgacagcacctgtatgcaatagaagtatccctcaattccccgtccctccaaaatctcagaaggctcagggactaagaaacaagccttgtataggaaaacaagtaaataatttggtggattcgtcaggtcattcagttggatgtcatgcacaaaaaactgaagtttctgacaaaagtattgccacagatcttgggaaaaaatcagaagaaaccacagttcccttcccagaagagagtatagttccagctgctaaaccatgccacagacgtgtactctgtttcgacagcactactgctcctgtggcaaatacgcaggggccaaaccataagatggtgtcccaaaacaaagaaaggaatgcagtctcttttcctaatcttgactcacccaatgtgtcctccaccttaaaacccccttctaataatgctatcaaaagagagaaagagaagcctcctctgcctaagattttatctaaatcggaaagtgccattagccggcataccaccataagagaaactcaatcagaaaagaaagtttcaccaacagaaattgtgcttgaatctttccataaagcaacagctaataaggagaatgaattatgcagcgatgtagaaagacagaaaaatccagaaaattcaaaactatctattgggcagcaaaatgggggtttgcgaagtgagaaatctatagcttcactgcaagaaatgaccaaaaaacaaggcacatcttcaaacaataaaaatgtactttcagtaggtacagctgtgaaggatctaaaacaagaacaaactaaatccgccagttctttgattaccacagaaatgttacaggatatacagaggcacagctcagtaagtaggcttgctgatagtagtgatttacctgtgccccggacacctggctcaggggcaggggaaaaacataaagaagaacctatagatattatcaaggccccctctagtaggcgtttcagtgaagacagtagtacatcaaaagtaatggtccctcctgtcaccccagacttgcctgcctgcagccctgccagtgaaacaggaagtgaaaacagtgtaaatatggctgcccacacattaatgattctctccagggcagccatttctaggactacttcagcaactcctctgaaagataacacacaacagtttagagcatcttcaaggagcaccacaaaaaagcggaaaattgaggaattagatgaacgtgagcgaaactctcgtccttctagtaaaaatcttacaaattcatcaataccaatgaaaaagaagaaaattaagaaaaagaagcttcccagttcatttccagcaggaatggatgtagacaaatttttgttatcattgcattatgatgagtaaacattctggacacataagaacagtaggtgttaaaaactcatatcccttaaactgagtgtagggaatgggatattgacagaatctgaaagcatgacctgcactttcattgtactgaaacttcactttatatctaaatcatgctgtttctgaaacagcttcctagtttgtaaatagacttacttggtatatttttattttgggaaaaacgtttgcagaaatgtaagtaaagccaatctgcaaaactgtatagctttgacaattccatattgtaaatactgtgtaaatcttgttgaaatagaggttaaatcaacctaatgttcttacactgtgttttttgacttcttatgatccctaattctgagacttactcatctggaatagtttctcacttgttttggaggaaaatgatgcttattcttataaattaccttcagtaactattcaataagacatttaaatacacaatcactaagtactacaaaataataaccacctcaactgatagcaaaatatctaattagaaatcaacagtttgatgagtttttttcctagagtgaatactacccctttcttataattgctgtaagtattatatttctggaatttcacactttacctactctgatcactctgttctctttgttttaaagagagaattttgtaaaccatttattgaatgttctgatctttcatttataacttaagattttttacagaactttaagtggttagactattgagccataaaattttggtttgtagtagagatttctcggtatgtacttttcccctaaatgctggggatttaaagaattgcactaattcatagaactctttacattgtagtgaccaatgcacatataatttaaatcttgtgttctatgtgagagtttatgtggaggattatcttctggtgttgtgtccatcataagatgtaaaaagagaaatcatagttttatattttagtttctcctacaatgggtatgttaaataactatatctatacttagatatagtgcattgtctgtgtcccttaaagtgttacaaagagtttctctcaaaaggtccttaaggagagtgagagatgagagaggtgccttctctgtattagactcacacacatcagtccagttgaagaattggtttaaacttttaaatgagaacagaaattataattagtacctgaccaattgtgcctagatattaaagtatgttctctttagtactttccgttcaattaaatatcagtatattagggatttttttctacaggtgtatattttgttgaagagtcactttcctcaaccatttttttgtactgggcctttaaaaaaataaatccatccaactttaacacaacatttctcagtgtagaaatcatgtcttcttaattgctgaaccttactgcaaaaacttgtgatgtaagaaatttgtatggtgtggcagtggtctattcctaaggaactaaatatcatatagttaatgtttatttaactcagcttgagactgtactacagttaggtttgaataaatattttcattaacttcaaaagtttgaattactttacattggcagtcttgtttagaaactgattaaattcctttgcaagtcagttctttttgggagtttgtacaatgctgaaaatcacagttttcttcttattcaattcatagttgtatgtactaagcactgaaaattcatatacaaataaaataagtttactttc

SEQ ID NO: 160716 - DNA, 575 bp, Homo sapiens
  Payload ID: 11406
  Gene Symbol: NPAT
  Gene Name: nuclear protein, ataxia-telangiectasia locus
  ENST ID: ENST00000531384
  CDS Start-End: 81-263
gatgcggcgcaggagctgtcgctgtgtttgctttaacctgagtcttgttccttattgtggttcctgctgtggttttgatcatgttgttaccctcggacgtagcccggcttgtattggacagggtctcaccctgttgcccaggctcgagtgcagtggtgcagtcatggttcgctgcagcctcgacctcctgggctcaagctatcctcccacctccacctccagagcagctggaactacaggtgcacaccaccaagcccagctaatttctaaaaaccatagaggttacttacagcaagaaaacctcatttctacctgccagacttttattttggaaagttcagatttaaaagaatatgcagaacattgtacagatgaagggtttattccagcctgcttactgtccttatttggaaaaaacttgacaacaattttaaatgagtatgtagctatgaaaacaaaagaaacatcaaataatgtcccagcaataatgtcatctctatggaagaaattggaccatacactttctcagatcaggagcatgcaaagttccccaaggtttgctggcagtcagagag

SEQ ID NO: 160717 - DNA, 898 bp, Homo sapiens
  Payload ID: 11406
  Gene Symbol: NPAT
  Gene Name: nuclear protein, ataxia-telangiectasia locus
  ENST ID: ENST00000527296
  CDS Start-End: 1-898
atttggtggattcgtcaggtcattcagttggatgtcatgcacaaaattttgttttgttttgttttagaactgaagtttctgacaaaagtattgccacagatcttgggaaaaaatcagaagaaaccacagttcccttcccagaagagagtatagttccagctgctaaaccatgccacagacgtgtactctgtttcgacagcactactgctcctgtggcaaatacgcaggggccaaaccataagatggtgtcccaaaacaaagaaaggaatgcagtctcttttcctaatcttgactcacccaatgtgtcctccaccttaaaacccccttctaataatgctatcaaaagagagaaagagaagcctcctctgcctaagattttatctaaatcggaaagtgccattagccggcataccaccataagagaaactcaatcagaaaagaaagtttcaccaacagaaattgtgcttgaatctttccataaagcaacagctaataaggagaatgaattatgcagcgatgtagaaagacagaaaaatccagaaaattcaaaactatctattgggcagcaaaatgggggtttgcgaagtgagaaatctatagcttcactgcaagaaatgaccaaaaaacaaggcacatcttcaaacaataaaaatgtactttcagtaggtacagctgtgaaggatctaaaacaagaacaaactaaatccgccagttctttgattaccacagaaatgttacaggatatacagaggcacagctcagtaagtaggcttgctgatagtagtgatttacctgtgccccggacacctggctcaggggcaggggaaaaacataaagaagaacctatagatattatcaaggccccctctagtaggcgtttcagtgaagacagtagtac

SEQ ID NO: 160718 - DNA, 5491 bp, Homo sapiens
  Payload ID: 11407
  Gene Symbol: NUPR1
  Gene Name: nuclear protein, transcriptional regulator, 1
  Uniprot ID: O60356
  ENST ID: ENST00000324873
  CDS Start-End: 268-516
ccagctgggtgagcctgggagggaggaggtgagttgggctggactcagggaccgactcttcccgtctcatgactgtgtttactgggctggattttgggaaggggccagattgcatcagacagggcctgatgggctggagccagactgtggtctgaggaggagacacagccttataagctgagggagtggagaggcccggggccaggaaagcagagacagacaaagcgttaggagaagaagagaggcagggaagacaagccaggcacgatggccaccttcccaccagcaaccagcgccccccagcagcccccaggcccggaggacgaggactccagcctggatgaatctgacctctatagcctggcccattcctacctcggaggtggaggccggaaaggtcgcaccaagagagaagctgctgccaacaccaaccgccccagccctggcgggcacgagaggaaactggtgaccaagctgcagaattcagagaggaagaagcgaggggcacggcgctgagacagagctggagatgaggccagaccatggacactacacccagcaatagagacgggactgcggaggaaggaggacccaggacaggatccaggccggcttgccacaccccccacccctaggacttattcccgctgactgagtctctgaggggctaccaggaaagcgcctccaaccctagcaaaagtgcaagatggggagtgagaggctgggaatggaggggcagagccaggaagatcccccagaaaagaaagctacagaagaaactggggctcctccagggtggcagcaacaataaatagacacgcacggcagccacagcttgggtgtgtgttcatccttgttctttgtgtgtttttgttcgggcatgtgtgtgcttgcctgtgcctgcacattcatgagcctgagagagcatctttgatgtgtatttgtgtttggtgtatgtatctggggcagggagtgttcctgctcttgcagggtctacgctgtgaatgcagcttttggtttgtttgcttttgcttgcatatattttagtgcatacatttctgtgggctcctacgtagtggaaaggaatttcttctgcttttttgcgatactgcccatgaaacacggccctccccagcacctgtttttgttgattgtgtcctgttcatagacgggaacgctacttatgagtgccatctaaaagtcagagaaaactgagatttaaaatattaaaagccagggccgggggcagtggctcacgcctgtaatcccagcactttgggaggccgaggtgggtggatcacaaagtcaggagttcaagaccagcctgaccaacatggtgaaaccccatctccactaaaaataccaaaaattagccaagcatggtggcaggtgcctgtaatcccagctgctcaggaggctgaggcagtagaatcgcttgaacccaggaggtagaggttgcagtgagccgacatcgtgccattgcactccagcctgggtgacagagggagactctgtctcaaaacaaacaaacaaacaaaaactaaagtctgggagcagtggctcatgcctgtaatcacagcagtttaggaggccgaagtgggaggattacttgagcctaggagtttgagaccagcctgagcatcatagtaagaccccatctctacaattttttttttgagacagagtctcactctgttgctcaggttagagtgcagtggcaccatcttggctcactgcaacctctgcctcccgggttcaagcaattctcgtgcctacgccccctgagtagctgggattacaggtgagcaccaccacgcctggctaatttttgtttttttgtttttttgatacagagtctcactctgttgctcaggctggagtgcagtggcatgatcgcagctcactgcaacctccgcctcctgggttcaagctattctcctgcttcagcctcctgagtagctgggactacaggcacctgccaccatgcctggctaatttttgtatttttagtagaaacagagtttcaccatgttggccaggatggtctcaatctcttgacctcatgatccacccaccttggcctcccaaagtgctgggattacaggcgtcagccaccacgcctggccaatttttgtatttttagtagagatggggtttcatcatgttggccaggctggtctcaaactcctggcctcaaatgatctgcccacctcagccttccagcctttgggaggccaaggagggaggatcgcttgaggccaggagttcgagaccagcctaggcaacataccaaggccctgtctctacaaaaatttaaaaattagcaaagcatggtggctcatgcctgtagtcctagttgctcagaggctgaagttggaggatcccttgaacccagttggaggctacagtaagccatgatggtgccactgcactgcagcctgagcaatagagtgaaaccatgtattgaaaaagaaagaaagaaagaaagagaaaaagaaggaaggaaggaaaagaaaggaaggaagaaagaaaagaaagagagaaaggagagaaaaagaagaaagagagagaaagagaagaaagaaagaaagaaagaaagaaagaaagaaagaaagaaagaaagaaaggaaggaaggaaagaaagaaagaaagaaggaaagaaagaaagaaagaaagaaagaaagaaagaaagaaaagagcgagccccggcacagtggctcacacctgtaatcccagcactttgggaggccaaggcaggcggatcacctgaggtcagtagttcgagttcgaggcagaagttgtggtgagccaagatcacgccattgcactccagcctgggcaacaagagcaaaactccatctcaaaaaaagaaaaagagagagaaagaaagagagaaggagggaaagaaagaggaaggaaaggagggagggaaggagggaaggaggaaaggagggaaggaaatattaagggatttgccctagctcactcagggctcatattcagggatcttattgtcttcagatatgaggtgggtccccaggccaagggggctgtgggacagggttctgggaagtgagatgggggagggagattcttattcagtgctatgtctcaggaccagagttgaagaaaaatatggggcaaacaggaagtgtggttggagctgagattatttgttgattgagatacaggtttgggttgctattatgaagaatcaaaacaggatacaaagttactcctctcttacttagccccaagtcctcctgggttcaaatggcagctccattgtgttgaggattccagctatttttactcactgttctgccacacccaaaacatggcttccactttgaggcccaaaatagctactccaatacctgccatcacgtttgcatctcagcctgtggaaagagtgtggaagagacagaggaggccacacctcttcaattttagggcataatctaaaagtagaacacatcacatctgctccgaatgtggctacatggccacacccaactacgagagaggttgggaaatgtagcattgagctgcttagccacgtggtagccaaaacttgggcaacagcagggttttatgatgaaagggaaccagagagagtgaatacacgaagaagctagcaagaaacattgcccacatgcagactcaacagatgtcgggggagaaaactctgagattgggccccgggcagagcctgtttccttttcccctgtccctttcacataagccccacactgcagaacttggagtcagtggttcatggggacccaaggacatccacagaagaccgaagtacctgatagagcaggaacagatgcacgtcagactacgaccagcttgaacccttggggacctgtatccatccccttcccttgagtccagcctaatcacagccacagaatgaatccatgacccggaaggacatttaaggacctctggcccaactctccccacgcaacagtgggattgcctctgcttgtttgaataccactatggagggggaacttgctacatttaaaggttgctgaatttttttgttttgttttgggagatggagtctctctctgtcgcccaggctggagtgcagtggtgtgatctcgacccactgcaacctccgcttcctgggttcaagcgattttcatgcctcagcctccctagtagctgggactacaggtgtgggccaccacacctggctaatttttgtatttttagtagagacggggtttcaccatgttgcccaggctggtctcaaactcccgacctcaggtgatctgcctgccttggcctcccaaagtgttgggattacaggcttgagccacaccacccggcaaaggttgcctaattctatctcagggcaagtctgttcatgtgggctgaaatctgtctctcatacctgcccttaaataagcttctgtttttctggtcctttctgtctgagatgactttaattcctcccccgaccccatctcatgaggctcagcttagatgtttccttctcttcctccctgatggctgcgtgcagaagctcatacctgcaatcccagcactttgggaggccgaggtgggaggattgcttgggcccaggagttctaggccagcctagcaacacagcaagaccctctctctacaaaaaattaaaaattagccaggtgtggtggcttgtgcctgtgggcccacctactcaggaggctgaggtgagaggatctcttgagtctgggaggtggaggctgcagtgagccatgatctcactccagcctgggcgtcagagtgagacctgtctcaaaaaaacaaaaaccaaagttttccttaacttgcaatcctccacccatctcctgacctccaccccaggccgaccctcctctgggatcacacggaagcctgggcccagaatcttacagtctaccttggaaatccttcagattttgcctccaactcctctttccatacaagttacatattaactcaatcaatgcttattggatgccttctgagttaccaggatgctgctggaggcctgtgctgctgagagggacaaatagaatcctgatatgactggaaccaggaatagggccaccatcagctctagaacccagggagcaaatggcaggagcaacaccaggcagtcggccctcagcccagcacagacctggtgtgttggcttcagaaaatcctggaaacatctctgctgtgtttggagctcctattctgtgagaagtgttttataggctttgctccatttaatccttacgataacccaataggacatactattaatgatcccctttttttcagaccggaaaactgaggttcggagacattaagtaatttgcctaaagtcacacagccacatcctgtaggacttggaattatgaactcaggtctatctgaattttaaagcctggatttttccccctttgctacatgcctgggaagaaccatgtattgacaatgaagaatcctaaactctcgttaa

SEQ ID NO: 160719 - DNA, 550 bp, Homo sapiens
  Payload ID: 11407
  Gene Symbol: NUPR1
  Gene Name: nuclear protein, transcriptional regulator, 1
  Uniprot ID: O60356
  ENST ID: ENST00000395641
  CDS Start-End: 102-404
agccttataagctgagggagtggagaggcccggggccaggaaagcagagacagacaaagcgttaggagaagaagagaggcagggaagacaagccaggcacgatggccaccttcccaccagcaaccagcgccccccagcagcccccaggcccggaggacgaggactccagcctggatgaatctgacctctatagcctggcccattcctacctcgggcctctcatcatgcctatgcccacttcacctctgactcctgccttggttacaggaggtggaggccggaaaggtcgcaccaagagagaagctgctgccaacaccaaccgccccagccctggcgggcacgagaggaaactggtgaccaagctgcagaattcagagaggaagaagcgaggggcacggcgctgagacagagctggagatgaggccagaccatggacactacacccagcaatagagacgggactgcggaggaaggaggacccaggacaggatccaggccggcttgccacaccccccacccctaggacttattcccgctgactgagtctctg

SEQ ID NO: 160720 - DNA, 598 bp, Homo sapiens
  Payload ID: 11407
  Gene Symbol: NUPR1
  Gene Name: nuclear protein, transcriptional regulator, 1
  ENST ID: ENST00000567646
  CDS Start-End: 45-176
agcgttaggagaagaagagaggcagggaagacaagccaggcacgatggccaccttcccaccagcaaccagcgccccccagcagcccccaggcccggaggacgaggactccagcctggatgaatctgacctctatagcctggcccattcctacctcggctggagtgcagtagtgtgatcacaacaactcaaacaactcaccgcagcctcgaactcctgggctcaagtgatcctcctgcttcagcctcctgagtggctggaacttcaggtgtacaccacctgcagtggaggtggaggccggaaaggtcgcaccaagagagaagctgctgccaacaccaaccgccccagccctggcgggcacgagaggaaactggtgaccaagctgcagaattcagagaggaagaagcgaggggcacggcgctgagacagagctggagatgaggccagaccatggacactacacccagcaatagagacgggactgcggaggaaggaggacccaggacaggatccaggccggcttgccacaccccccacccctaggacttattcccgctgactgagtctctgaggggctaccaggaaagcgcctccaaccct

SEQ ID NO: 160721 - DNA, 603 bp, Homo sapiens
  Payload ID: 11408
  Gene Symbol: NUPR1L
  Gene Name: nuclear protein, transcriptional regulator, 1-like
  Uniprot ID: A6NF83
  ENST ID: ENST00000329309
  CDS Start-End: 87-380
atcggaactcgaggcggggctgctgggtcttccaggagcgcccagacgcgggcaggtggccgccggtggccacaggcctgggcaggatggaagcgcccgcagagcgggcgcttccacgtctgcaggctctggctcggccgccgccacccataagctacgaggaggagctttacgactgcctggactactactacctgcgcgacttcccggcctgcggggcagggcgcagcaagggccggactcggcgcgagcaggcgctgcgcaccaactggcctgcacctggcgggcacgagcgcaaggtcgcgcagaagctcctcaatggccagcgcaagcgccgccagcgccagctgcatcccaagatgcgcactcgcctcacctgagcctgggataccgaaggacctgttcgaagtatttactgtaactccaactgtaacttggttctgaggaggagagaatccatgtttggtcaacagaacttttcgctgtcacttaagtttactgcttcgatatcttttccttactaattgattgttaattaagtagtgcccaagtggattagcctttttagagtttattaattaaaagagagcagcaagaatggca

SEQ ID NO: 160722 - DNA, 1293 bp, Homo sapiens
  Payload ID: 11409
  Gene Symbol: NR2C2AP
  Gene Name: nuclear receptor 2C2-associated protein
  Uniprot ID: Q86WQ0
  ENST ID: ENST00000331552
  CDS Start-End: 365-784
ccaagcccacgcggttccgggtcccaagatttggctccaagagctattcgcagagaaacagcctcgcacaaaaagccaccgcccccgaaacccgcgggaaatctgtttcctgtgaaaggcctggcctccgggcattggcggtttccctgatcctctctcccaaattttccggcaggggattgatcgaggcgacatttaggactggggtgggcgagggagtggcggttctcgtcccaagttacaggtgaggacgttcaggccaaggcgtagccaagatcgcgccgccctgtagcttgaggaggcgccgggattcgaaccaaggctgtgcccaatcctaagccctgcgaggtcttgtggaaccgacatgacccactctttggtttgtccagagacagtgagcagggtgagttcagtgctgaatcgcaacactcggcagtttggaaaaaaacatcttttcgaccaggatgaggagacatgttggaactcagaccagggcccctcccagtgggtgacgctggagtttccccagctcatccgtgtctcccagctgcagatccagtttcagggtggcttctccagtcgccggggctgcctggaaggttcacagggcactcaggctctccacaagattgtagatttctaccctgaggacaacaactcgcttcagactttccccataccagctgctgaagtggaccggctgaaggtgacgtttgaggatgccactgacttttttggccgtgtggtcatctaccacctgcgggtgcttggggagaaggtgtgagacctctaggggctgtctcctccaggaagccctccgggaagcacagcaaagtccctcattctgcacagaaggtttattggttcctcttgggaagggtcccctcccaccacctgtccagaagctgcctttgaagtcagttctgggtttccccagctctggctgaccattttgttccctgagtgtctgagtccccggcaggcggccttcactcagggtcagcgggcaccaggttgctctggaagagcttgaggatgtggttctcgatcacctgttgcactgagatggggcagggaaaaggtgggctgtgagcttgaatcgggagtggggtggaggcacaggccaacctgcgctctccccttaggggacaaacagggacccttgcagagacctgcattacagagcaaagctgggagaaccgaggactcaccccaggaacctcaacttcccctaagtttgtaaaaatgcacttttgtagcttttcagaattaatataaaaatatttcctacca

SEQ ID NO: 160723 - DNA, 859 bp, Homo sapiens
  Payload ID: 11409
  Gene Symbol: NR2C2AP
  Gene Name: nuclear receptor 2C2-associated protein
  Uniprot ID: Q86WQ0
  ENST ID: ENST00000420605
  CDS Start-End: 298-801
acaaaaagccaccgcccccgaaacccgcgggaaatctgtttcctgtgaaaggcctggcctccgggcattggcggtttccctgatcctctctcccaaattttccggcaggggattgatcgaggcgacatttaggactggggtgggcgagggagtggcggttctcgtcccaagttacaggtgaggacgttcaggccaaggcgtagccaagatcgcgccgccctgtagcttgaggaggcgccgggattcgaaccaaggctgtgcccaatcctaagccctgcgaggtcttgtggaaccgacatgacccactctttggtttgtccagagacagtgagcagggtgagttcagtgctgaatcgcaacactcggcagtttggaaaaaaacatcttttcgaccaggatgaggagacatgttggaactcagaccagggcccctcccagtgggtgacgctggagtttccccagctcatccgtgtctcccagctgcagatccagtttcagggtggcttctccagtcgccggggctgcctggaaggttcacagggcactcaggctctccacaagattgtagatttctaccctgaggacaacaactcgcttcagactttccccataccagctgctgaagtggaccggctgaaggtgacgtttgaggatgccactgacttttttggccgtgtggtcatctaccacctgcgggtgcttggggagaaggggacaaacagggacccttgcagagacctgcattacagagcaaagctgggagaaccgaggactcaccccaggaacctcaacttcccctaagtttgtaaaaatgcacttttgtagcttttcagaattaatataaaaatatttcctacca

SEQ ID NO: 160724 - DNA, 899 bp, Homo sapiens
  Payload ID: 11409
  Gene Symbol: NR2C2AP
  Gene Name: nuclear receptor 2C2-associated protein
  ENST ID: ENST00000544883
  CDS Start-End: 300-464
gcacaaaaagccaccgcccccgaaacccgcgggaaatctgtttcctgtgaaaggcctggcctccgggcattggcggtttccctgatcctctctcccaaattttccggcaggggattgatcgaggcgacatttaggactggggtgggcgagggagtggcggttctcgtcccaagttacaggtgaggacgttcaggccaaggcgtagccaagatcgcgccgccctgtagcttgaggaggcgccgggattcgaaccaaggctgtgcccaatcctaagccctgcgaggtcttgtggaaccgacatgacccactctttggtttgtccagagacagtgagcagggtgagttcagtgctgaatcgcaacactcggcagtttggaaaaaaacatcttttcgaccaggatgaggagacatgttggaactcagaccaggttcacagggcactcaggctctccacaagattgtagatttctaccctgaggacaacaactcgcttcagactttccccataccagctgctgaagtggaccggctgaaggtgacgtttgaggatgccactgacttttttggccgtgtggtcatctaccacctgcgggtgcttggggagaaggtgtgagacctctaggggctgtctcctccaggaagccctccgggaagcacagcaaagtccctcattctgcacagaaggtttattggttcctcttgggaagggtcccctcccaccacctgtccagaagctgcctttgaagtcagttctgggtttccccagctctggctgaccattttgttccctgagtgtctgagtccccggcaggcggccttcactcagggtcagcgggcaccaggttgctctggaagagcttgaggatgtggttctcgatcacctgttgcactgagatggg

SEQ ID NO: 160725 - DNA, 891 bp, Homo sapiens
  Payload ID: 11409
  Gene Symbol: NR2C2AP
  Gene Name: nuclear receptor 2C2-associated protein
  ENST ID: ENST00000538165
  CDS Start-End: 316-699
gcagagaaacagcctcgcacaaaaagccaccgcccccgaaacccgcgggaaatctgtttcctgtgaaaggcctggcctccgggcattggcggtttccctgatcctctctcccaaattttccggcaggggattgatcgaggcgacatttaggactggggtgggcgagggagtggcggttctcgtcccaagttacaggtgaggacgttcaggccaaggcgtagccaagatcgcgccgccctgtagcttgaggaggcgccgggattcgaaccaaggctgtgcccaatcctaagccctgcgaggtcttgtggaaccgacatgacccactctttggtttgtccagagacagtgagcagggtgagttcagtgctgaatcgcaacactcggcagtttggaaaaaaacatcttttcgaccaggatgaggagacatgttggaactcagaccagggcccctcccagtgggtgacgctggagtttccccagctcatccgtgtctcccagctgcagatccagtttcagggtggcttctccagtcgccggggctgcctggaaggttcacagggcactcaggctctccacaagattgtagatttctaccctgaggacaacaactcgcttcagatatcctgcccctgcttctggggtgggtggtctgtgcctctggaagctttggactcacccaaacccgaatgggaaccctgatgtgtgatcttgaacacgtgacctctaggactccactttttctgtaaaatggtgctgatgaccacctgttctgtgtgagaggcttagagggacctgcagcttccccaggttgcccacatcggtggagtgtgagctgggtctggaaggggtgggggcctgcgggtgggaaaccagaaatcaccagtttccctt

SEQ ID NO: 160726 - DNA, 375 bp, Homo sapiens
  Payload ID: 11409
  Gene Symbol: NR2C2AP
  Gene Name: nuclear receptor 2C2-associated protein
  ENST ID: ENST00000539678
  CDS Start-End: 1-90
ggaaaaaaacatcttttcgaccaggatgaggagacatgttggaactcagaccaggttcacagggcactcaggctctccacaagattgtagatttctaccctgaggacaacaactcgcttcagatatcctgcccctgcttctggggtgggtggtctgtgcctctggaagctttggactcacccaaacccgaatgggaaccctgatgtgtgatcttgaacacgtgacctctaggactccactttttctgtaaaatggtgctgatgaccacctgttctgtgtgagaggcttagagggacctgcagcttccccaggttgcccacatcggtggagtgtgagctgggtctggaaggggtgggggcctgcgggtgggaaacc

SEQ ID NO: 160727 - DNA, 1853 bp, Homo sapiens
  Payload ID: 11410
  Gene Symbol: NRBF2
  Gene Name: nuclear receptor binding factor 2
  Uniprot ID: Q96F24
  ENST ID: ENST00000277746
  CDS Start-End: 182-1045
cgcggcgcggcgccggaggaggaagtggtgaggttgttgctccttcagcgcctatcgctggctcttggggcgcagagaggggccgcagtctccgcggctgcgtcgagctcccttgcagtcccctccatgttccccggcgccactactccccttcctaaggccgccgcttaccccggggtctatggaagtaatggaaggacccctcaacctggctcatcaacagagcagacgagcagaccgtttattagctgcaggcaaatacgaagaggctatttcttgtcacaaaaaggctgcagcatatctttctgaagccatgaagctgacacagtcagagcaggctcatctttcactggaattgcaaagggatagccatatgaaacagctcctcctcatccaagagagatggaaaagggcccagcgtgaagaaagattgaaagcccagcagaacacagacaaggatgcagctgcccatcttcagacatctcacaaaccctctgcagaggatgcagagggccagagtcccctttctcagaagtacagcccttccacagagaaatgcctgcctgagattcaggggatctttgacagggatccagacacactactttatttacttcagcaaaagagtgagccagcagagccatgtattggaagcaaagccccaaaagatgataaaacaattatagaggagcaggcaaccaaaattgcagatttgaagaggcatgtggaattccttgtggctgagaatgaaagattaaggaaagaaaataaacaactaaaggctgaaaaggccagacttctaaaaggtccaatagaaaaggagctggatgtagatgctgattttgtagaaacgtcagagttatggagcttgccaccacatgcagaaactgctacagcctcctcaacctggcagaagttcgcagcaaatactgggaaagccaaggacattccaatccccaatcttcctcccttggattttccatctccagaacttcctcttatggagctctctgaggatattctgaaaggatttatgaataattaaaatggaaggccacagaaaaggggaaaagaggaaataatacagtaatcgttaatccagcaaaaagaaatgaaaagggaaaaccacatagaagggtaatcccggaaatgcttcatctggtggactgtgggagcagaggcattgccaggacttgggaaacagtcactgtgaaatgcgctgcgtatctcattcactcacttcagctaatgattccgacttggcagacgctaaactcatggaggttcggtttctcctgatacaaaccaaatggctacctggaagaatttctttcaagcaacagttatttttcttatcttcagggttaaaatgtataaaagttatgtgtaattaatctataatgccataaatgataatgcaaaacctaaataatatggtggccggaggggctgccttatatttgaaacatgctttctatcatgcattgactgtatgcattttgttaatgcacattctgtttgtttaaggtgtgtaagatacacacccttctagatgaaactatatgtgccacactttgcactactcataatgataacctcaagactatcagaagaaatatttaaatttccattttatgaagaaaggaaccaaattattatgctttttaaaacaaattaccagtttacataattaatcagggtgcattttaagttctaacttcgtttattgtataatgcatcatttgaaaataccaaggaggaaataccctttgtttttaatgatgcaagagtggacgtaatgctagttggcagtattttattgtaagaaatcaataaagtaattgtgttttata

SEQ ID NO: 160728 - DNA, 1816 bp, Homo sapiens
  Payload ID: 11410
  Gene Symbol: NRBF2
  Gene Name: nuclear receptor binding factor 2
  Uniprot ID: Q96F24
  ENST ID: ENST00000435510
  CDS Start-End: 170-1003
atggcgccgtgcgtggcctcggcggtggcgcagggggcgggcccgcggcgcggcgccggaggaggaagtggtgaggttgttgctccttcagcgcctatcgctggctcttggggcgcagagaggggccgcagtctccgcggctgcgtcgagctcccttgcagtcccctccatgttccccggcgccactactccccttcctaaggccgccgcttaccccggggtctatggaagtaatggaaggacccctcaacctgcatatctttctgaagccatgaagctgacacagtcagagcaggctcatctttcactggaattgcaaagggatagccatatgaaacagctcctcctcatccaagagagatggaaaagggcccagcgtgaagaaagattgaaagcccagcagaacacagacaaggatgcagctgcccatcttcagacatctcacaaaccctctgcagaggatgcagagggccagagtcccctttctcagaagtacagcccttccacagagaaatgcctgcctgagattcaggggatctttgacagggatccagacacactactttatttacttcagcaaaagagtgagccagcagagccatgtattggaagcaaagccccaaaagatgataaaacaattatagaggagcaggcaaccaaaattgcagatttgaagaggcatgtggaattccttgtggctgagaatgaaagattaaggaaagaaaataaacaactaaaggctgaaaaggccagacttctaaaaggtccaatagaaaaggagctggatgtagatgctgattttgtagaaacgtcagagttatggagcttgccaccacatgcagaaactgctacagcctcctcaacctggcagaagttcgcagcaaatactgggaaagccaaggacattccaatccccaatcttcctcccttggattttccatctccagaacttcctcttatggagctctctgaggatattctgaaaggatttatgaataattaaaatggaaggccacagaaaaggggaaaagaggaaataatacagtaatcgttaatccagcaaaaagaaatgaaaagggaaaaccacatagaagggtaatcccggaaatgcttcatctggtggactgtgggagcagaggcattgccaggacttgggaaacagtcactgtgaaatgcgctgcgtatctcattcactcacttcagctaatgattccgacttggcagacgctaaactcatggaggttcggtttctcctgatacaaaccaaatggctacctggaagaatttctttcaagcaacagttatttttcttatcttcagggttaaaatgtataaaagttatgtgtaattaatctataatgccataaatgataatgcaaaacctaaataatatggtggccggaggggctgccttatatttgaaacatgctttctatcatgcattgactgtatgcattttgttaatgcacattctgtttgtttaaggtgtgtaagatacacacccttctagatgaaactatatgtgccacactttgcactactcataatgataacctcaagactatcagaagaaatatttaaatttccattttatgaagaaaggaaccaaattattatgctttttaaaacaaattaccagtttacataattaatcagggtgcattttaagttctaacttcgtttattgtataatgcatcatttgaaaataccaaggaggaaataccctttgtttttaatgatgcaagagtggacgtaatgctagttggcagtattttattgtaagaaatcaataaagtaattgtgttttataccttt

SEQ ID NO: 160729 - DNA, 1228 bp, Homo sapiens
  Payload ID: 11410
  Gene Symbol: NRBF2
  Gene Name: nuclear receptor binding factor 2
  ENST ID: ENST00000611479
  CDS Start-End: 167-988
gaggaggaagtggtgaggttgttgctccttcagcgcctatcgctggctcttggggcgcagagaggggccgcagtctccgcggctgcgtcgagctcccttgcagtcccctccatgttccccggcgccactactccccttcctaaggccgccgcttaccccggggtctatggaagtaatggaaggacccctcaacctggctcatcaacagagcagacgagcagaccgtttattagctgcaggcaaatacgaagaggctatttcttgtcacaaaaaggctgcagcatatctttctgaagccatgaagctgacacagtcagagcaggctcatctttcactggaattgcaaagggatagccatatgaaacagctcctcctcatccaagagagatggaaaagggcccagcgtgaagaaagattgaaagcccagcagaacacagacaaggatgcagctgcccatcttcagacatctcacaaaccctctgcagaggatgcagagggccagagtcccctttctcagaagtacagcccttccacagagaaatgcctgcctgagattcaggggatctttgacagggatccagacacactactttatttacttcagcaaaagagtgagccagcagagccatgtattggaagcaaagccccaaaagatgataaaacaattatagaggagcaggcaaccaaaattgcagatttgaagaggcatgtggaattccttgtggctgagaatgaaagattaaggaaagaaaataaacaactaaaggctgaaaaggccagacttctaaaaggtccaatagaaaaggagctggatgtagatgctgattttgtagaaacgtcagagttatggagcttgccaccaagaaactgctacagcctcctcaacctggcagaagttcgcagcaaatactgggaaaggacattccaatccccaatcttcctcccttggattttccatctccagaacttcctcttatggagctcttgaggatattctgaaaggatttatgaataattaaaatggaaggccacagaaaaggggaaaagaggaaataatacagtaatcgttaatccagcaaaaagaaatgaaaagggaaaaccacatagaagggtaatcccggaaatgcttcatctggtggactgtgggagcagaggcattgccaggacttgggaaacagtcactgtgaaatgcgctgcgtatctcattcactcacttcagctaatgatt

SEQ ID NO: 160730 - DNA, 2887 bp, Homo sapiens
  Payload ID: 11411
  Gene Symbol: NRBP1
  Gene Name: nuclear receptor binding protein 1
  Uniprot ID: Q9UHY1
  ENST ID: ENST00000233557
  CDS Start-End: 833-2440
atcatacacgtctaagggcagagtgaacttccatcctgaaggctccgcgcttagttttcgcagattaatagctcaccaagaatttatcatcttttctttccactaactcgaaaccaatctaaattctttccaaacatcttctcaacgtagtctcctttgatgaaatttactgtttcggattctagacttggctcttaccaacttaactttcggttaatagcttaatacctctgattcaggtttttgcatttgtcaactaccattgaatgataatttcaatgagttcgttcttatgaggatcaaatgaaataacatctgtgaaaacctcttacaaagtttaagcaaatagtgctaagcaatcaccaagcgttaactactaattttcagtgttaggcattagaactgtcatggcgccttcaagaagaggtaggaggccctctctgcgtccagcagaaccatctggggcacctggaccgggcggtggggtggacagagagacgagccccagctgggaccgaaaacatcgacccctccgagaggtctcggccggaccggcgcaaggggaggagagcgggtggaagcccaccccagcgaacgcccgagggccgggccccgcccacccagaacgtcacccaatggaaacctgccggcggtgcggcaccgcccatcgttggtccgggcgccgcgagggcggggcccgcagttcggttgcgctgcggagcgcagctgtgagggagtcgctgtgatccggggccccggaacccgagctggagctgaagcgcaggctgcggggcgcggagtcgggagtgcaggcctgagtgttccttccagcatgtcggagggggagtcccagacagtacttagcagtggctcagacccaaaggtagaatcctcatcttcagctcctggcctgacatcagtgtcacctcctgtgacctccacaacctcagctgcttccccagaggaagaagaagaaagtgaagatgagtctgagattttggaagagtcgccctgtgggcgctggcagaagaggcgagaagaggtgaatcaacggaatgtaccaggtattgacagtgcatacctggccatggatacagaggaaggtgtagaggttgtgtggaatgaggtacagttctctgaacgcaagaactacaagctgcaggaggaaaaggttcgtgctgtgtttgataatctgattcaattggagcatcttaacattgttaagtttcacaaatattgggctgacattaaagagaacaaggccagggtcatttttatcacagaatacatgtcatctgggagtctgaagcaatttctgaagaagaccaaaaagaaccacaagacgatgaatgaaaaggcatggaagcgttggtgcacacaaatcctctctgccctaagctacctgcactcctgtgacccccccatcatccatgggaacctgacctgtgacaccatcttcatccagcacaacggactcatcaagattggctctgtggctcctgacactatcaacaatcatgtgaagacttgtcgagaagagcagaagaatctacacttctttgcaccagagtatggagaagtcactaatgtgacaacagcagtggacatctactcctttggcatgtgtgcactggagatggcagtgctggagattcagggcaatggagagtcctcatatgtgccacaggaagccatcagcagtgccatccagcttctagaagacccattacagagggagttcattcaaaagtgcctgcagtctgagcctgctcgcagaccaacagccagagaacttctgttccacccagcattgtttgaagtgccctcgctcaaactccttgcggcccactgcattgtgggacaccaacacatgatcccagagaacgctctagaggagatcaccaaaaacatggatactagtgccgtactggctgaaatccctgcaggaccaggaagagaaccagttcagactttgtactctcagtcaccagctctggaattagataaattccttgaagatgtcaggaatgggatctatcctctgacagcctttgggctgcctcggccccagcagccacagcaggaggaggtgacatcacctgtcgtgcccccctctgtcaagactccgacacctgaaccagctgaggtggagactcgcaaggtggtgctgatgcagtgcaacattgagtcggtggaggagggagtcaaacaccacctgacacttctgctgaagttggaggacaaactgaaccggcacctgagctgtgacctgatgccaaatgagaatatccccgagttggcggctgagctggtgcagctgggcttcattagtgaggctgaccagagccggttgacttctctgctagaagagaccttgaacaagttcaattttgccaggaacagtaccctcaactcagccgctgtcaccgtctcctcttagagctcactcgggccaggccctgatctgcgctgtggctgtccctggacgtgctgcagccctcctgtcccttccccccagtcagtattaccctgtgaagccccttccctcctttattattcaggagggctgggggggctccctggttctgagcatcatcctttcccctcccctctcttcctcccctctgcactttgtttacttgttttgcacagacgtgggcctgggccttctcagcagccgccttctagttgggggctagtcgctgatctgccggctcccgcccagcctgtgtggaaaggaggcccacgggcactaggggagccgaattctacaatcccgctggggcggccggggcgggagagaaaggtggtgctgcagtggtggccctggggggccattcgattcgcctcagttgctgctgtaataaaagtctactttttgctaaaa

SEQ ID NO: 160731 - DNA, 2163 bp, Homo sapiens
  Payload ID: 11411
  Gene Symbol: NRBP1
  Gene Name: nuclear receptor binding protein 1
  Uniprot ID: Q9UHY1
  ENST ID: ENST00000379852
  CDS Start-End: 113-1720
gcggagcgcagctgtgagggagtcgctgtgatccggggccccggaacccgagctggagctgaagcgcaggctgcggggcgcggagtcgggaggcctgagtgttccttccagcatgtcggagggggagtcccagacagtacttagcagtggctcagacccaaaggtagaatcctcatcttcagctcctggcctgacatcagtgtcacctcctgtgacctccacaacctcagctgcttccccagaggaagaagaagaaagtgaagatgagtctgagattttggaagagtcgccctgtgggcgctggcagaagaggcgagaagaggtgaatcaacggaatgtaccaggtattgacagtgcatacctggccatggatacagaggaaggtgtagaggttgtgtggaatgaggtacagttctctgaacgcaagaactacaagctgcaggaggaaaaggttcgtgctgtgtttgataatctgattcaattggagcatcttaacattgttaagtttcacaaatattgggctgacattaaagagaacaaggccagggtcatttttatcacagaatacatgtcatctgggagtctgaagcaatttctgaagaagaccaaaaagaaccacaagacgatgaatgaaaaggcatggaagcgttggtgcacacaaatcctctctgccctaagctacctgcactcctgtgacccccccatcatccatgggaacctgacctgtgacaccatcttcatccagcacaacggactcatcaagattggctctgtggctcctgacactatcaacaatcatgtgaagacttgtcgagaagagcagaagaatctacacttctttgcaccagagtatggagaagtcactaatgtgacaacagcagtggacatctactcctttggcatgtgtgcactggagatggcagtgctggagattcagggcaatggagagtcctcatatgtgccacaggaagccatcagcagtgccatccagcttctagaagacccattacagagggagttcattcaaaagtgcctgcagtctgagcctgctcgcagaccaacagccagagaacttctgttccacccagcattgtttgaagtgccctcgctcaaactccttgcggcccactgcattgtgggacaccaacacatgatcccagagaacgctctagaggagatcaccaaaaacatggatactagtgccgtactggctgaaatccctgcaggaccaggaagagaaccagttcagactttgtactctcagtcaccagctctggaattagataaattccttgaagatgtcaggaatgggatctatcctctgacagcctttgggctgcctcggccccagcagccacagcaggaggaggtgacatcacctgtcgtgcccccctctgtcaagactccgacacctgaaccagctgaggtggagactcgcaaggtggtgctgatgcagtgcaacattgagtcggtggaggagggagtcaaacaccacctgacacttctgctgaagttggaggacaaactgaaccggcacctgagctgtgacctgatgccaaatgagaatatccccgagttggcggctgagctggtgcagctgggcttcattagtgaggctgaccagagccggttgacttctctgctagaagagaccttgaacaagttcaattttgccaggaacagtaccctcaactcagccgctgtcaccgtctcctcttagagctcactcgggccaggccctgatctgcgctgtggctgtccctggacgtgctgcagccctcctgtcccttccccccagtcagtattaccctgtgaagccccttccctcctttattattcaggagggctgggggggctccctggttctgagcatcatcctttcccctcccctctcttcctcccctctgcactttgtttacttgttttgcacagacgtgggcctgggccttctcagcagccgccttctagttgggggctagtcgctgatctgccggctcccgcccagcctgtgtggaaaggaggcccacgggcactaggggagccgaattctacaatcccgctggggcggccggggcgggagagaaaggtggtgctgcagtggtggccctggggggccattcgattcgcctcagttgctgctgtaataaaagtctactttttgct

SEQ ID NO: 160732 - DNA, 2174 bp, Homo sapiens
  Payload ID: 11411
  Gene Symbol: NRBP1
  Gene Name: nuclear receptor binding protein 1
  ENST ID: ENST00000379863
  CDS Start-End: 100-1731
gtgagggagtcgctgtgatccggggccccggaacccgagctggagctgaagcgcaggctgcggggcgcggagtcgggaggcctgagtgttccttccagcatgtcggagggggagtcccagacagtacttagcagtggctcagacccaaaggtagaatcctcatcttcagctcctggcctgacatcagtgtcacctcctgtgacctccacaacctcagctgcttccccagaggaagaagaagaaagtgaagatgagtctgagattttggaagagtcgccctgtgggcgctggcagaagaggcgagaagaggtgaatcaacggaatgtaccaggtattgacagtgcatacctggccatggatacagaggaaggtgtagaggttgtgtggaatgaggtacagttctctgaacgcaagaactacaagctgcaggaggaaaaggttcgtgctgtgtttgataatctgattcaattggagcatcttaacattgttaagtttcacaaatattgggctgacattaaagagaacaaggccagggtcatttttatcacagaatacatgtcatctgggagtctgaagcaatttctgaagaagaccaaaaagaaccacaagacgatgaatgaaaaggcatggaagcgttggtgcacacaaatcctctctgccctaagctacctgcactcctgtgacccccccatcatccatgggaacctgacctgtgacaccatcttcatccagcacaacggactcatcaagattggctctgtctttcataggatttttgctaatgtggctcctgacactatcaacaatcatgtgaagacttgtcgagaagagcagaagaatctacacttctttgcaccagagtatggagaagtcactaatgtgacaacagcagtggacatctactcctttggcatgtgtgcactggagatggcagtgctggagattcagggcaatggagagtcctcatatgtgccacaggaagccatcagcagtgccatccagcttctagaagacccattacagagggagttcattcaaaagtgcctgcagtctgagcctgctcgcagaccaacagccagagaacttctgttccacccagcattgtttgaagtgccctcgctcaaactccttgcggcccactgcattgtgggacaccaacacatgatcccagagaacgctctagaggagatcaccaaaaacatggatactagtgccgtactggctgaaatccctgcaggaccaggaagagaaccagttcagactttgtactctcagtcaccagctctggaattagataaattccttgaagatgtcaggaatgggatctatcctctgacagcctttgggctgcctcggccccagcagccacagcaggaggaggtgacatcacctgtcgtgcccccctctgtcaagactccgacacctgaaccagctgaggtggagactcgcaaggtggtgctgatgcagtgcaacattgagtcggtggaggagggagtcaaacaccacctgacacttctgctgaagttggaggacaaactgaaccggcacctgagctgtgacctgatgccaaatgagaatatccccgagttggcggctgagctggtgcagctgggcttcattagtgaggctgaccagagccggttgacttctctgctagaagagaccttgaacaagttcaattttgccaggaacagtaccctcaactcagccgctgtcaccgtctcctcttagagctcactcgggccaggccctgatctgcgctgtggctgtccctggacgtgctgcagccctcctgtcccttccccccagtcagtattaccctgtgaagccccttccctcctttattattcaggagggctgggggggctccctggttctgagcatcatcctttcccctcccctctcttcctcccctctgcactttgtttacttgttttgcacagacgtgggcctgggccttctcagcagccgccttctagttgggggctagtcgctgatctgccggctcccgcccagcctgtgtggaaaggaggcccacgggcactaggggagccgaattctacaatcccgctggggcggccggggcgggagagaaaggtggtgctgcagtggtggccctggggggccattcgattcgcctcagttgctgctgtaataaaagtctactttttgct

SEQ ID NO: 160733 - DNA, 674 bp, Homo sapiens
  Payload ID: 11411
  Gene Symbol: NRBP1
  Gene Name: nuclear receptor binding protein 1
  ENST ID: ENST00000419281
  CDS Start-End: 210-674
gaggtggccgccgctggctccctgggccccagcctggttcccgcgcgggccgcggctgccttccagacgcagggcatgcgacctgttggagtgtgaaattctaggggccgggttcctccccagagcggttttatttccgactggactgtgctgcgggtctcagaggccctctggtccgttcaggtgcaggcctgagtgttccttccagcatgtcggagggggagtcccagacagtacttagcagtggctcagacccaaaggtagaatcctcatcttcagctcctggcctgacatcagtgtcacctcctgtgacctccacaacctcagctgcttccccagaggaagaagaagaaagtgaagatgagtctgagattttggaagagtcgccctgtgggcgctggcagaagaggcgagaagaggtgaatcaacggaatgtaccaggtattgacagtgcatacctggccatggatacagaggaaggtgtagaggttgtgtggaatgaggtacagttctctgaacgcaagaactacaagctgcaggaggaaaaggttcgtgctgtgtttgataatctgattcaattggagcatcttaacattgttaagtttcacaaatattgggctgacattaaagagaacaaggccagggtcatttttatcacagaatacatgtcatct

SEQ ID NO: 160734 - DNA, 585 bp, Homo sapiens
  Payload ID: 11411
  Gene Symbol: NRBP1
  Gene Name: nuclear receptor binding protein 1
  ENST ID: ENST00000356442
  CDS Start-End: 341-585
gtgtagagaagggatggatagtgaatgccaaggttagttctagctggataaattagccaagggtttcagctggataagttggctgagggtgctacaggtctagccttaaggctgtctcactgaaacattttggagtctggagtcatctgttctgaatagcgcccacatagtttatatttttttattttttgagacagagtctcactctgttgcccaagctggagtgcagtggcacgatctcagctcactgcaacctctgcctcccgggttcaagtgattctcctgcctcagcctcctgagtagctgggactacagtgcaggcctgagtgttccttccagcatgtcggagggggagtcccagacagtacttagcagtggctcagacccaaaggtagaatcctcatcttcagctcctggcctgacatcagtgtcacctcctgtgacctccacaacctcagctgcttccccagaggaagaagaagaaagtgaagatgagtctgagattttggaagagtcgccctgtgggcgctggcagaagaggcgagaagaggtgaatcaacggaatgtaccaggtattgacagtgc

SEQ ID NO: 160735 - DNA, 3587 bp, Homo sapiens
  Payload ID: 11412
  Gene Symbol: NRBP2
  Gene Name: nuclear receptor binding protein 2
  Uniprot ID: Q9NSY0
  ENST ID: ENST00000442628
  CDS Start-End: 141-1646
aattcccagagccggggctggggctctaggctgccgcggcggctctaggctgggctgctgggcgcgaggccagggcgggccgggagaggctgcgccggcggcggatcgcgcagagggcggtggcctgggctggccgaaccatggcggccccggagccggcgccgaggcgggcccgggaacgggagcgggagcgggaggacgagagcgaggacgagagcgacatcctggaggaaagcccgtgtggtcgctggcaaaagcgacgggagcaggtaaaccaagggaacatgccagggcttcagagcaccttcctagccatggacacggaggagggggtagaggtggtgtggaacgagctccacttcggagacaggaaggccttcgcggcgcacgaggagaagatccagaccgtgttcgagcagctggtgctggtggaccacccgaacatcgtgaagttgcacaagtactggctggatacctctgaggcctgcgcgagggtcatcttcatcacagagtacgtgtcatcaggcagcctcaagcaattcctcaaaaagaccaagaagaaccacaaggccatgaacgcccgggcctggaagcgctggtgcacgcagatcctgtctgcgctcagcttcctgcacgcctgcagccccccaatcatccacgggaacctgaccagcgacaccatcttcattcagcacaacggcctcatcaagatcggctccgtgtggcaccgaatcttctccaatgcacttccagatgatctccgaagccccatccgcgctgagcgagaggaacttcggaacctgcacttcttccccccagagtatggagaggtggccgatgggaccgctgtggacatcttctcctttgggatgtgtgcgctggagatggctgtactggaaatccagaccaatggggacacccgggtcacagaggaggccattgctcgcgccaggcactcgctgagtgaccccaacatgcgggagttcatcctttgctgcctggcccgggaccctgcccgccggccctctgcccacagcctcctcttccaccgcgtgctcttcgaggtgcactcgctgaagctcctggcagcccactgcttcatccagcaccagtacctcatgcctgagaatgtggtggaggagaagaccaaggccatggacctgcacgcggtcttggcggagcttccccggccccgcaggcccccgctgcagtggcggtactcggaagtctccttcatggagctggacaaattcctggaggatgtcaggaatggaatctacccactgatgaactttgcagccactcgacccctggggctgccccgtgtgctggccccacccccggaggaggtccaaaaggccaagaccccgacgccagagccctttgactctgagaccagaaaggtcatccagatgcagtgcaacctggagagaagcgaggacaaggcgcgctggcatctcactctgcttctggtgctggaagaccggctgcaccggcagctgacctacgacctgctcccaacggacagcgcccaggacctcgcctcggagctcgtgcactatggcttcctccacgaggacgaccggatgaagctggccgccttcctggagagcaccttcctcaagtaccgtgggacccaggcctgacccggagccccagccccaggggaccatgccggggtgctgcctgggcaggccatgttggggagactccagcaccgtggggctgccctcctccatgcgcctgggagcacaaaggccccggtagtgaaggaaccccccgtctcctgagagtggggctgaccctgccttgggcgccgaggggttggggggtgggtgtgggggagccgttaggcctcccaggtccttaggatcagggttgcccccagaaccccttcccatatcctccattctccgccctgagttcctacccaggctgcctggccggggccactgcctcctcagcatgcaggaggctgccctgtagggaaccccagctctggggcttgggggtgagggtcagccctggacagacctctgcccagggaactgctccatggggtctgggagagcagccatcccctgctggcaccatagacccacacaaggagcctgcacagcaagccagcggtgacacacctgcaggtgtcaggcatggcactgggcacaacagggacctggcaggagaaacagaccacagagaggtctggagttgaggctgttgtcagcaaagcccctggtcccacacagctctgccctagagccacctctttgaccctttacccaccctgagaccagaacttgcagcccctctgcagatctcctctggccactgcagcccctccaatgggctttttctctcatgcattccctggcctggaggcgtcagggaccccacatcctccctgctcctcagactcacagcccctccatgttacctcccgcacctcctccctggggcagctgctccctgggcctctgaggatgtcagctcctggctccctgcctctctcccactccactcctggctcagtcttagagatttctatgccctcatggattctacccctgccttcctggcctcttgattcttggcttgcctctcctccaattccaaacttagtgaaatggccttaagcattttaaactgtatgtatacattagcgcattcatgcctttctaaacgcatttcaaatgtcaaccaggaaggcacaccactgtattagttttatactgccgctgtaaaatttaccacaaacttagtgacttaacacaaatttattgcaattctgtaggctggaagtctgactatgggtctcactggactagaatcaaggctggcaggctgccttccttcctggaggttctaggggagactctgtctcctgctccttcaggctgctggcagaatccacatcctttcggtggcagggccaaggtccccactttcttgctgactgtaaactaaggccacttccagcttgtagaggctgcctacattccttggctcttggccccctcctccatcttcagagctagcaggttcagtctgtgtcacgaaccatttctctggttccctgcagacaggaaaggttgtccctaaggactcatgagattaggttgggcccagccagataatacatgataatctccctcctcaaggtttttaatattaaacacatctgcaggacacattttgccatgtaaactaacattcactggttccagggattaaggaatgaacctcttttgttggggaagggtggcattctgctgaccacagcactccaaccaaaagccaaaaaccaaagcaagacttactaacgcatatcaaataaattaaaggtacaaaatcgtgaatctcagttatcttaaatattccaatactatttacaaaattattcaaattctcacgccttccaactcaaaattagcaatctaaagtaatttccatatcctagatggaaaccctcatgctaaactgtctgattatgcatggttctaaatggtttcagtggcaaatacataacattgtactactgattaaactgaacttaaaagcatcaataccaccattgctgcacttaa

SEQ ID NO: 160736 - DNA, 925 bp, Homo sapiens
  Payload ID: 11412
  Gene Symbol: NRBP2
  Gene Name: nuclear receptor binding protein 2
  ENST ID: ENST00000530123
  CDS Start-End: 1-505
cctggggctgccccgtgtgctggccccacccccggaggaggtccaaaaggccaagaccccgacgccagagccctttgactctgagaccagaaaggtcatccagatgcagtgcaacctggagagaagcgaggacaaggcgcgctggcatctcactctgcttctggtgctggaagaccggctgcaccggcagctgacctacgacctgctcccaagacgaccggatgaagctggccgccttcctggagagcaccttcctcaagtaccgtgggacccaggcctgacccggagccccagccccaggggaccatgccggggtgctgcctgggcaggccatgttggggagactccagcaccgtggggctgccctcctccatgcgcctgggagcacaaaggccccggtagtgaaggaaccccccgtctcctgagagtggggctgaccctgccttgggcgccgaggggttggggggtgggtgtgggggagccgttaggcctcccaggtccttaggatcagggttgcccccagaaccccttcccatatcctccattctccgccctgagttcctacccaggctgcctggccggggccactgcctcctcagcatgcaggaggctgccctgtagggaaccccagctctggggcttgggggtgagggtcagccctggacagacctctgcccagggaactgctccatggggtctgggagagcagccatcccctgctggcaccatagacccacacaaggagcctgcacagcaagccagcggtgacacacctgcaggtgtcaggcatggcactgggcacaacagggacctggcaggagaaacagaccacagagaggtctggagttgaggctgttgtcagcaaagcccctggtcccacacagctctgccctagagccacctctttgaccctttacccaccctg

SEQ ID NO: 160737 - DNA, 1037 bp, Homo sapiens
  Payload ID: 11412
  Gene Symbol: NRBP2
  Gene Name: nuclear receptor binding protein 2
  ENST ID: ENST00000530347
  CDS Start-End: 341-1037
gggggcgctgggagagcgcggcggctggaaacctctccgcggcccctcgcggcccgcgaatcagccacccctggacccctttggcctggcgctcgccctgggactccctgagggccagtctcctcccaggaccacctccccatgcctctggactcagccgctagcttcctggggatccccctcgaccccctgaaacctgctccaaatccccttagcccagcccttggataggagcccttggctcctgggggcagctaccctccaagccccaccttcccgcagagtggctcagggcctgcagcccacgcttgggcccactggaaaggtaaaccaagggaacatgccagggcttcagagcaccttcctagccatggacacggaggagggggtagaggtggtgtggaacgagctccacttcggagacaggaaggccttcgcggcgcacgaggagaagatccagaccgtgttcgagcagctggtgctggtggaccacccgaacatcgtgaagttgcacaagtactggctggatacctctgaggcctgcgcgagggtcatcttcatcacagagtacgtgtcatcaggcagcctcaagcaattcctcaaaaagaccaagaagaaccacaaggccatgaacgcccgggcctggaagcgctggtgcacgcagatcctgtctgcgctcagcttcctgcacgcctgcagccccccaatcatccacgggaacctgaccagcgacaccatcttcattcagcacaacggcctcatcaagatcggctccgtgtggcaccgaatcttctccaatgcacttccagatgatctccgaagccccatccgcgctgagcgagaggaacttcggaacctgcacttcttccccccagagtatggagaggtggccgatgggaccgctgtggacatcttctcctttgggatgtgtgcgctggagatggctgtactggaaatccagaccaatggggacacccgggtcacagaggaggccattgctcgcgccaggcactcgctgagtgaccccaacatgcggg

SEQ ID NO: 160738 - DNA, 7688 bp, Homo sapiens
  Payload ID: 11413
  Gene Symbol: NSD1
  Gene Name: nuclear receptor binding SET domain protein 1
  Uniprot ID: Q96L73
  ENST ID: ENST00000347982
  CDS Start-End: 102-7385
cctccgcctcccctcaggttgatgccggcccaggatggatcagacctgtgaactacccagaagaaattgtctgctgcccttttccaatccagtgaatttagatgcccctgaagacaaggacagccctttcggatgatccagattccagtaccagtacattaggaaacatgctagaattacctggaacttcatcatcatctacttcacaggaattgccattttgtcaacctaagaaaaagtctacgccactgaagtatgaagttggagatctcatctgggcaaaattcaagagacgcccatggtggccctgcaggatttgttctgatccgttgattaacacacattcaaaaatgaaagtttccaaccggaggccctatcggcagtactacgtggaggcttttggagatccttctgagagagcctgggtggctggaaaagcaatcgtcatgtttgaaggcagacatcaattcgaagagctacctgtccttaggagaagagggaaacagaaagaaaaaggatataggcataaggttcctcagaaaattttgagtaaatgggaagccagtgttggacttgcagaacagtatgatgttcccaaggggtcaaagaaccgaaaatgtattcctggttcaatcaagttggacagtgaagaagatatgccatttgaagactgcacaaatgatcctgagtcagaacatgacctgttgcttaatggctgtttgaaatcactggcttttgattctgaacattctgcagatgagaaggaaaagccttgcgctaaatctcgagccagaaagagctctgataatccaaaaaggactagtgtgaaaaagggccacatacaatttgaagcacataaagatgaacggaggggaaagattccagagaaccttggcctaaactttatctctggggatatatctgatacgcaggcctctaatgaactttccaggatagcaaatagcctcacagggtccaacactgccccaggaagttttctgttttcttcctgtggaaaaaacactgcaaagaaagaatttgagacttcaaatggtgactctttattgggcttgcctgagggtgctttgatctcaaagtgttctcgagagaagaataaaccccaacgaagcctggtgtgtggttcaaaagtgaagctctgctatattggagcaggtgatgaggaaaagcgaagtgattccattagtatctgtaccacttctgatgatggaagcagtgacctggatcccatagaacacagctcagagtctgataacagtgtccttgaaattccagatgctttcgatagaacagagaacatgttatctatgcagaaaaatgaaaagataaagtattctaggtttgctgccacaaacactagggtaaaagcaaaacagaagcctctcattagtaactcacatacagaccacttaatgggttgtactaagagtgcagagcctggaaccgagacgtctcaggttaatctctctgatctgaaggcatctactcttgttcacaaaccccagtcagattttacaaatgatgctctctctccaaaattcaacctgtcatcaagcatatccagtgagaactcgttaataaagggtggggcagcaaatcaagctctattacattcgaaaagcaaacagcccaagttccgaagtataaagtgcaaacacaaagaaaatccagttatggcagaacccccagttataaatgaggagtgcagtttgaaatgctgctcttctgataccaaaggctctcctttggccagcatttctaaaagtgggaaagtggatggtctaaaactactgaacaatatgcatgagaaaaccagggattcaagtgacatagaaacagcagtggtgaaacatgttttatccgagttgaaggaactctcttacagatccttaggtgaggatgtcagtgactctggaacatcaaagccatcaaaaccattacttttctcttctgcttctagtcagaatcacatacctattgaaccagactacaaattcagtacattgctaatgatgttgaaagatatgcatgatagtaagacgaaggagcagcggttgatgactgctcaaaacctggtctcttaccggagtcctggtcgtggggactgttctactaatagtcctgtaggagtctctaaggttttggtttcaggaggctccacacacaattcagagaaaaagggagatggcactcagaactccgccaatcctagccctagtgggggtgactctgcattatctggcgagttgtctgcttccctacctggcttactgtccgacaagagagacctccctgcttctggtaaaagtcgttcagactgtgttactaggcgcaactgtggacgatcaaagccttcatccaaattgcgagatgctttttcagcccaaatggtaaagaacacagtgaaccgtaaagccttaaagaccgagcgcaaaagaaaactgaatcagcttccaagtgtgactcttgatgctgtactgcagggagaccgagaacgtggaggttcattgagaggtggggcagaagatcctagtaaagaggatccccttcagataatgggccacttaacaagtgaagatggtgaccatttttctgatgtgcatttcgatagcaaggttaagcaatctgatcctggtaaaatttctgaaaaaggactctcttttgaaaacggaaaaggcccagagctggactctgtaatgaacagtgagaatgatgaactcaatggtgtaaatcaagtggtgcctaaaaagcggtggcagcgtttaaaccaaaggcgcactaaacctcgtaagcgcatgaacagatttaaagagaaagaaaactctgagtgtgcctttagggtcttacttcctagtgaccctgtgcaggaggggcgggatgagtttccagagcatagaactccttcagcaagcatacttgaggaaccactgacagagcaaaatcatgctgactgcttagattcagctgggccacggttaaatgtttgtgataaatccagtgccagcattggtgacatggaaaaggagccaggaattcccagtttgacaccacaggctgagctccctgaaccagctgtgcggtcagagaagaaacgccttaggaagccaagcaagtggcttttggaatatacagaagaatatgatcagatatttgctcctaagaaaaaacaaaagaaggtacaggagcaggtgcacaaggtaagttcccgctgtgaagaggaaagccttctagcccgaggtcgatctagtgctcagaacaagcaggtggacgagaattctttgatttcaaccaaagaagagcctccagttcttgaaagggaggctccgtttttggagggccccttggctcagtcagaacttggaggtggacatgctgagttgccgcagctgaccttgtctgtgcctgtggctccggaagtctctccacggcctgcccttgagtctgaggaattgctagttaaaacgccaggaaattatgaaagtaaacgtcaaagaaaaccaactaagaaacttcttgaatccaatgatttagaccctggatttatgcccaagaagggggaccttggcctttctaaaaagtgctatgaagctggtcacctggagaatggcataactgaatcttgtgccacatcttattcaaaagattttggtggaggcactaccaagatatttgacaagccaaggaagcgaaaacgacagaggcatgctgcagccaagatgcagtgtaaaaaagtgaaaaatgatgactcgtcaaaagagattccaggctcagagggagaactaatgcctcacaggacggccacaagccccaaggagactgttgaggaaggtgtagaacacgatcccgggatgcctgcctctaaaaaaatgcagggtgaacgcggtggaggagctgcactcaaggagaatgtctgtcagaattgtgaaaaattgggtgagctgctgttatgtgaggctcagtgctgtggggctttccacctggagtgccttggattgactgagatgccaagaggaaaatttatctgcaatgaatgtcgcacaggaatccatacctgttttgtatgtaagcagagtggggaagatgttaaaaggtgccttctacccttgtgtggaaagttttaccatgaagagtgtgtccagaagtacccacccactgttatgcagaacaagggcttccggtgctccctccacatctgtataacctgtcatgctgctaatccagccaatgtttctgcatctaaaggtcggttgatgcgctgtgtccgctgtcctgtggcataccacgccaatgacttttgcctggctgctgggtcaaagatccttgcatctaatagtatcatctgccctaatcactttacccctaggcggggctgccgaaatcatgagcatgttaatgttagctggtgctttgtgtgctcagaaggaggcagccttctgtgctgtgattcttgccctgctgcttttcatcgtgaatgcctgaacattgatatccctgaaggaaactggtattgcaatgactgtaaagcaggcaaaaagccacactacagggagattgtctgggtaaaagttggacgatacaggtggtggccagctgagatctgccatcctcgagctgttccttccaacattgataagatgagacatgatgtgggagagttcccagtcctcttttttggatctaatgactatttgtggactcaccaggcccgagtcttcccttacatggagggtgacgtgagcagcaaggataagatgggcaaaggagtggatgggacatataaaaaagctcttcaggaagctgcagcaaggtttgaggaattaaaggcccaaaaagagctaagacagctgcaggaagaccgaaagaatgacaagaagccaccaccttataaacatataaaggtaaaccgtcctattggcagggtacagatcttcactgcagacttatctgaaataccccgttgcaactgtaaagctactgatgagaacccctgtgggatagactctgaatgcatcaaccgcatgctgctctatgagtgccaccccacagtgtgtcctgccggagggcgctgtcaaaaccagtgcttttccaagcgccaatatccagaggttgaaattttccgcacattacagcggggttggggtctacggacaaaaacagatattaaaaagggtgaatttgtgaatgagtatgtgggtgagcttatagatgaagaagaatgcagagctcgaattcgctatgctcaagaacatgatatcactaatttctatatgctcaccctagacaaagaccgaatcattgatgctggtcccaaaggaaactatgctcggttcatgaatcattgctgccagcccaactgtgaaacacagaagtggtctgtgaatggagatacccgtgtaggcctttttgcactaagtgacattaaagcaggcactgaacttaccttcaactacaacctagaatgtcttgggaatggaaagactgtttgcaaatgtggagccccgaactgcagtggcttcttgggtgtaaggccaaagaatcaacccattgccacggaagaaaagtcaaagaaattcaagaagaagcaacagggaaagcgcaggacccagggtgaaatcacaaaggagcgagaagatgagtgttttagttgtggggatgctggccagctcgtctcctgcaagaaaccaggctgcccaaaagtttaccacgcagactgtctcaatctgaccaagcgaccagcagggaaatgggaatgtccgtggcatcagtgtgacatctgcgggaaggaagcagcctccttctgtgagatgtgccccagctccttttgtaagcagcatcgagaagggatgcttttcatttccaaactggatgggcgtctgtcttgtactgagcatgacccctgtgggcccaatcctctggaacctggggagatccgtgagtatgtgcctcccccagtaccgctgcctccagggccaagcactcacctggcagagcaatcaacaggaatggctgctcaggcacccaaaatgtcagataaacctcctgctgacaccaaccagatgctgtcgctctccaaaaaagctctggcagggacttgtcagaggccattgctacctgaaagacctcttgagagaactgactccaggccccagcctttagataaggtcagagacctcgctgggtcagggaccaaatcccaatccttggtttccagccagaggccactggacaggccaccagcagtggcaggaccaagaccccagctaagcgacaaaccctctccagtgaccagcccaagctcctcaccctcagtcaggtcccaaccactggaaagacctctggggacggctgacccaaggctggataaatccataggtgctgccagcccaaggccccagtcactggagaaaacctcagttcccactggcctgagacttccgccgccagacagactgctcattactagcagtcccaaaccccagacttcagacaggcctactgacaaaccccatgcctctttgtcccagagactcccacctcctgagaaagtactatcagctgtggtccagacccttgtagctaaagaaaaagcactgaggcctgtggaccagaatactcagtcaaaaaatagagctgctttggtgatggatctcatagacctaactcctcgccagaaggagcgggcagcttcacctcatcaggtcacaccacaggctgatgagaagatgccagtgttggagtcaagttcatggcctgccagcaaaggtctggggcatatgccgagagctgttgagaaaggctgtgtgtcagatcctcttcagacatctgggaaagcagcagccccttcagaggacccctggcaagctgttaaatcactcacccaggccagacttctttctcagcctcctgccaaggcctttttatatgagccaacaactcaggcctcaggaagagcttctgcaggggctgagcagaccccagggcctcttagccaatccccgggcctggtgaagcaggcgaagcagatggtcggaggccagcaactacctgcacttgccgccaagagtgggcaatcttttaggtctctcgggaaggccccagcctccctccccactgaagaaaagaagttggtaaccacagagcaaagtccctgggccctgggaaaagcctcatcacgggcagggctctggcccatagtggctggacagacactggcacagtcttgctggtctgctgggagcacacagacattggcacagacttgctggtctcttggaagagggcaagaccccaaaccagagcaaaatacacttccagctcttaaccaggctccttccagtcacaagtgtgcagaatcagaacagaagtagtaccaatcaatgtcacatgaacaaacaagctgcccccagggtaccatttggggaggggaaatcttttctttctttcccccttaaaaaaaaacacatctgccccgaacactttcccactgttattctttcctcatatcccaacactcagaactcttgtgacattagccagtgggggcttatggttgtgtgaaccatgtatgaaaatccagtgggccccaaccaaggagacagacagacttgggtctctttcccccaacttttccacatggtcatcgtgaaataaaaagtccactctggagtcaa

SEQ ID NO: 160739 - DNA, 12195 bp, Homo sapiens
  Payload ID: 11413
  Gene Symbol: NSD1
  Gene Name: nuclear receptor binding SET domain protein 1
  Uniprot ID: Q96L73
  ENST ID: ENST00000354179
  CDS Start-End: 161-7444
ggccgggtagggggttcgcctgcggccgcgtctgctcggggcctgaggcctcgaagaccccagcccaagcccccaggttgatgccggcccaggatggatcagacctgtgaactacccagaagaaattgtctgctgcccttttccaatccagtgaatttagatgcccctgaagacaaggacagccctttcggatgatccagattccagtaccagtacattaggaaacatgctagaattacctggaacttcatcatcatctacttcacaggaattgccattttgtcaacctaagaaaaagtctacgccactgaagtatgaagttggagatctcatctgggcaaaattcaagagacgcccatggtggccctgcaggatttgttctgatccgttgattaacacacattcaaaaatgaaagtttccaaccggaggccctatcggcagtactacgtggaggcttttggagatccttctgagagagcctgggtggctggaaaagcaatcgtcatgtttgaaggcagacatcaattcgaagagctacctgtccttaggagaagagggaaacagaaagaaaaaggatataggcataaggttcctcagaaaattttgagtaaatgggaagccagtgttggacttgcagaacagtatgatgttcccaaggggtcaaagaaccgaaaatgtattcctggttcaatcaagttggacagtgaagaagatatgccatttgaagactgcacaaatgatcctgagtcagaacatgacctgttgcttaatggctgtttgaaatcactggcttttgattctgaacattctgcagatgagaaggaaaagccttgcgctaaatctcgagccagaaagagctctgataatccaaaaaggactagtgtgaaaaagggccacatacaatttgaagcacataaagatgaacggaggggaaagattccagagaaccttggcctaaactttatctctggggatatatctgatacgcaggcctctaatgaactttccaggatagcaaatagcctcacagggtccaacactgccccaggaagttttctgttttcttcctgtggaaaaaacactgcaaagaaagaatttgagacttcaaatggtgactctttattgggcttgcctgagggtgctttgatctcaaagtgttctcgagagaagaataaaccccaacgaagcctggtgtgtggttcaaaagtgaagctctgctatattggagcaggtgatgaggaaaagcgaagtgattccattagtatctgtaccacttctgatgatggaagcagtgacctggatcccatagaacacagctcagagtctgataacagtgtccttgaaattccagatgctttcgatagaacagagaacatgttatctatgcagaaaaatgaaaagataaagtattctaggtttgctgccacaaacactagggtaaaagcaaaacagaagcctctcattagtaactcacatacagaccacttaatgggttgtactaagagtgcagagcctggaaccgagacgtctcaggttaatctctctgatctgaaggcatctactcttgttcacaaaccccagtcagattttacaaatgatgctctctctccaaaattcaacctgtcatcaagcatatccagtgagaactcgttaataaagggtggggcagcaaatcaagctctattacattcgaaaagcaaacagcccaagttccgaagtataaagtgcaaacacaaagaaaatccagttatggcagaacccccagttataaatgaggagtgcagtttgaaatgctgctcttctgataccaaaggctctcctttggccagcatttctaaaagtgggaaagtggatggtctaaaactactgaacaatatgcatgagaaaaccagggattcaagtgacatagaaacagcagtggtgaaacatgttttatccgagttgaaggaactctcttacagatccttaggtgaggatgtcagtgactctggaacatcaaagccatcaaaaccattacttttctcttctgcttctagtcagaatcacatacctattgaaccagactacaaattcagtacattgctaatgatgttgaaagatatgcatgatagtaagacgaaggagcagcggttgatgactgctcaaaacctggtctcttaccggagtcctggtcgtggggactgttctactaatagtcctgtaggagtctctaaggttttggtttcaggaggctccacacacaattcagagaaaaagggagatggcactcagaactccgccaatcctagccctagtgggggtgactctgcattatctggcgagttgtctgcttccctacctggcttactgtccgacaagagagacctccctgcttctggtaaaagtcgttcagactgtgttactaggcgcaactgtggacgatcaaagccttcatccaaattgcgagatgctttttcagcccaaatggtaaagaacacagtgaaccgtaaagccttaaagaccgagcgcaaaagaaaactgaatcagcttccaagtgtgactcttgatgctgtactgcagggagaccgagaacgtggaggttcattgagaggtggggcagaagatcctagtaaagaggatccccttcagataatgggccacttaacaagtgaagatggtgaccatttttctgatgtgcatttcgatagcaaggttaagcaatctgatcctggtaaaatttctgaaaaaggactctcttttgaaaacggaaaaggcccagagctggactctgtaatgaacagtgagaatgatgaactcaatggtgtaaatcaagtggtgcctaaaaagcggtggcagcgtttaaaccaaaggcgcactaaacctcgtaagcgcatgaacagatttaaagagaaagaaaactctgagtgtgcctttagggtcttacttcctagtgaccctgtgcaggaggggcgggatgagtttccagagcatagaactccttcagcaagcatacttgaggaaccactgacagagcaaaatcatgctgactgcttagattcagctgggccacggttaaatgtttgtgataaatccagtgccagcattggtgacatggaaaaggagccaggaattcccagtttgacaccacaggctgagctccctgaaccagctgtgcggtcagagaagaaacgccttaggaagccaagcaagtggcttttggaatatacagaagaatatgatcagatatttgctcctaagaaaaaacaaaagaaggtacaggagcaggtgcacaaggtaagttcccgctgtgaagaggaaagccttctagcccgaggtcgatctagtgctcagaacaagcaggtggacgagaattctttgatttcaaccaaagaagagcctccagttcttgaaagggaggctccgtttttggagggccccttggctcagtcagaacttggaggtggacatgctgagttgccgcagctgaccttgtctgtgcctgtggctccggaagtctctccacggcctgcccttgagtctgaggaattgctagttaaaacgccaggaaattatgaaagtaaacgtcaaagaaaaccaactaagaaacttcttgaatccaatgatttagaccctggatttatgcccaagaagggggaccttggcctttctaaaaagtgctatgaagctggtcacctggagaatggcataactgaatcttgtgccacatcttattcaaaagattttggtggaggcactaccaagatatttgacaagccaaggaagcgaaaacgacagaggcatgctgcagccaagatgcagtgtaaaaaagtgaaaaatgatgactcgtcaaaagagattccaggctcagagggagaactaatgcctcacaggacggccacaagccccaaggagactgttgaggaaggtgtagaacacgatcccgggatgcctgcctctaaaaaaatgcagggtgaacgcggtggaggagctgcactcaaggagaatgtctgtcagaattgtgaaaaattgggtgagctgctgttatgtgaggctcagtgctgtggggctttccacctggagtgccttggattgactgagatgccaagaggaaaatttatctgcaatgaatgtcgcacaggaatccatacctgttttgtatgtaagcagagtggggaagatgttaaaaggtgccttctacccttgtgtggaaagttttaccatgaagagtgtgtccagaagtacccacccactgttatgcagaacaagggcttccggtgctccctccacatctgtataacctgtcatgctgctaatccagccaatgtttctgcatctaaaggtcggttgatgcgctgtgtccgctgtcctgtggcataccacgccaatgacttttgcctggctgctgggtcaaagatccttgcatctaatagtatcatctgccctaatcactttacccctaggcggggctgccgaaatcatgagcatgttaatgttagctggtgctttgtgtgctcagaaggaggcagccttctgtgctgtgattcttgccctgctgcttttcatcgtgaatgcctgaacattgatatccctgaaggaaactggtattgcaatgactgtaaagcaggcaaaaagccacactacagggagattgtctgggtaaaagttggacgatacaggtggtggccagctgagatctgccatcctcgagctgttccttccaacattgataagatgagacatgatgtgggagagttcccagtcctcttttttggatctaatgactatttgtggactcaccaggcccgagtcttcccttacatggagggtgacgtgagcagcaaggataagatgggcaaaggagtggatgggacatataaaaaagctcttcaggaagctgcagcaaggtttgaggaattaaaggcccaaaaagagctaagacagctgcaggaagaccgaaagaatgacaagaagccaccaccttataaacatataaaggtaaaccgtcctattggcagggtacagatcttcactgcagacttatctgaaataccccgttgcaactgtaaagctactgatgagaacccctgtgggatagactctgaatgcatcaaccgcatgctgctctatgagtgccaccccacagtgtgtcctgccggagggcgctgtcaaaaccagtgcttttccaagcgccaatatccagaggttgaaattttccgcacattacagcggggttggggtctacggacaaaaacagatattaaaaagggtgaatttgtgaatgagtatgtgggtgagcttatagatgaagaagaatgcagagctcgaattcgctatgctcaagaacatgatatcactaatttctatatgctcaccctagacaaagaccgaatcattgatgctggtcccaaaggaaactatgctcggttcatgaatcattgctgccagcccaactgtgaaacacagaagtggtctgtgaatggagatacccgtgtaggcctttttgcactaagtgacattaaagcaggcactgaacttaccttcaactacaacctagaatgtcttgggaatggaaagactgtttgcaaatgtggagccccgaactgcagtggcttcttgggtgtaaggccaaagaatcaacccattgccacggaagaaaagtcaaagaaattcaagaagaagcaacagggaaagcgcaggacccagggtgaaatcacaaaggagcgagaagatgagtgttttagttgtggggatgctggccagctcgtctcctgcaagaaaccaggctgcccaaaagtttaccacgcagactgtctcaatctgaccaagcgaccagcagggaaatgggaatgtccgtggcatcagtgtgacatctgcgggaaggaagcagcctccttctgtgagatgtgccccagctccttttgtaagcagcatcgagaagggatgcttttcatttccaaactggatgggcgtctgtcttgtactgagcatgacccctgtgggcccaatcctctggaacctggggagatccgtgagtatgtgcctcccccagtaccgctgcctccagggccaagcactcacctggcagagcaatcaacaggaatggctgctcaggcacccaaaatgtcagataaacctcctgctgacaccaaccagatgctgtcgctctccaaaaaagctctggcagggacttgtcagaggccattgctacctgaaagacctcttgagagaactgactccaggccccagcctttagataaggtcagagacctcgctgggtcagggaccaaatcccaatccttggtttccagccagaggccactggacaggccaccagcagtggcaggaccaagaccccagctaagcgacaaaccctctccagtgaccagcccaagctcctcaccctcagtcaggtcccaaccactggaaagacctctggggacggctgacccaaggctggataaatccataggtgctgccagcccaaggccccagtcactggagaaaacctcagttcccactggcctgagacttccgccgccagacagactgctcattactagcagtcccaaaccccagacttcagacaggcctactgacaaaccccatgcctctttgtcccagagactcccacctcctgagaaagtactatcagctgtggtccagacccttgtagctaaagaaaaagcactgaggcctgtggaccagaatactcagtcaaaaaatagagctgctttggtgatggatctcatagacctaactcctcgccagaaggagcgggcagcttcacctcatcaggtcacaccacaggctgatgagaagatgccagtgttggagtcaagttcatggcctgccagcaaaggtctggggcatatgccgagagctgttgagaaaggctgtgtgtcagatcctcttcagacatctgggaaagcagcagccccttcagaggacccctggcaagctgttaaatcactcacccaggccagacttctttctcagcctcctgccaaggcctttttatatgagccaacaactcaggcctcaggaagagcttctgcaggggctgagcagaccccagggcctcttagccaatccccgggcctggtgaagcaggcgaagcagatggtcggaggccagcaactacctgcacttgccgccaagagtgggcaatcttttaggtctctcgggaaggccccagcctccctccccactgaagaaaagaagttggtaaccacagagcaaagtccctgggccctgggaaaagcctcatcacgggcagggctctggcccatagtggctggacagacactggcacagtcttgctggtctgctgggagcacacagacattggcacagacttgctggtctcttggaagagggcaagaccccaaaccagagcaaaatacacttccagctcttaaccaggctccttccagtcacaagtgtgcagaatcagaacagaagtagtaccaatcaatgtcacatgaacaaacaagctgcccccagggtaccatttggggaggggaaatcttttctttctttcccccttaaaaaaaaacacatctgccccgaacactttcccactgttattctttcctcatatcccaacactcagaactcttgtgacattagccagtgggggcttatggttgtgtgaaccatgtatgaaaatccagtgggccccaaccaaggagacagacagacttgggtctctttcccccaacttttccacatggtcatcgtgaaataaaaagtccactctggagtcaagtatggaattcaattccgctggtcaggttggaaggtataggggctctcaaagcgatttccccaaccagacagagccccattgagggcacctaggaacccttgggaggaaatggtgttctttcaaatcagtggcgatttcctgagcattcacgtgttctaggccgggtgctagtcactgatgagagatacaggcctcatccctgtgagcctggattccaaggctttcaggaacctttgaccaggaagtaacaggaagttctgaggggccctggggctttagactcattttgaaatgtcctttgtggcaccagaagtggttgtgttgaggaagtgtctcttggctgcggtgtgcatgggtgcgtgtgcatgcgcgcacactcacagaggtctcctctatagatgcaagggtgctgcattgaggccagcaaggctgttggctgtggggtcgccgctgctgcttttgtctgggctgtgcagagtctcaagatcagtccttggaggagcaggtggtcaggggcagtcgggctctgtgcgaatgtagatttccagcagtggaagaaggcatttggcaagcttctctttctttgcttttgtttctacctatttttctctttgtacatgaatccaccccatccctatttccctaaaacactcaggtgctttcagatttcagagcctcgggcagtggacatagggaatctctggcaagctctgagctagacacaccagcttcaggaagagtaccagatcctgatgggaaatttcttttccccattccttttccctcctgagtggagggagtcctcttcttcgcctccctgagaattgctgtgctctgtattgagagcacctgcctgctgacttagctcaaaggcaagccagaacccttccctgaagactggcaagaggtggtgtttagagcaacgtccaggctaagagatgactcctattaactgctgattatctgttactgctgccctgagctggggcccaagggctgggaaatctgttggtgctaccctgccctaccattcacccagctcacagactgccaacaggaagtgctgtttggctagtttcctcccacttgtctacccctcctttgtccttagaccaacatgtttacctctctgctttgccaacttagccagcaggccatccccggccctaacgtctcctggccattatctcttagttatggctttcacgctctcaataggattctgtatttggtcccaatttcctcaagttcttattgaggttactcccatcaattccacggagggaacagtagttattatagaagcatttgcgctttatctaaagattaaaaatagaatctgcttttatttcccaaagtctgtctctgaggttgagacacttgaactcaggcagagggacgaggctgggcagggctgtcctgagtttaggggcctatccctgcatttcactgagacctcggaatctcctctgtgaattccacctgcctagttctcccctttcatcctctctctcttcccacatcatcaaagaggaaaagctctttgttcaaaaggaagagaaaacgtaaagcatcttattttcttttaaaagaattttaaaccatgaaaaagatatttttaaagaaattcaccgagaacattaaagttcattatattaagtatttatcatgtgtgagaataataaatatataactgcagctagtaggtccctttccctaatcttttaggtcatatgagtagggtttgcttggtgccagtcctgtgcccttttctctccagtcatctgtagttgtgatcagaaaaaggtatctgcactgcactgtcagagtctcctttcactatgttgtgtgttaaattaccgtagctctttgtttcatgaaataaactgtgaatttggggggggcggggggagggcgtgcaggccatgtaaaaattttccgtggagaagtttgattctaaagtagcttctctaaagtaggctttggtaggtaatcaacttgacagcagtctagatgtctcacaggacaggagggagtgagggaaaggggccatgattggctgctttgtggttttattttggttctttccattctccgccattcattggaggcttcgttccagacctgcctgggaaaacagcttctgagccattttggggagcagttcttcatctgaatggatggacatctgggcttccttcaagggccattgaatgggaactagaaaaccactggaaactagaaatttgagctattgggcccaccagtagcagcatgtgatactagatggttaaaatcatgaaagcagtcactatccaattagaagcagagtcacaacaactgttgggaaatgtgactcttggaggaaggtggggagggagtggccttgccagccctgtgggacgtcccctgaagtttgtaataagaccccttttccaaagggatgtgaattggagtgaaaaggaaatctttcatcttagaaaacttctggtccttaacgcagggtggtatttgggtatgtgcttggaaattgagatctcaagagtgtttgccttggagccagctccccaggaggccttttccagggacaaggcaaaagttgaaattctccatgggtagctagaaagccaatacatctagccctgctaagtcagaaaaagattatgaaaaatgttgaaatttacattcaaagcctcatttgcttatcttgctggagccaacccagtctaatagcaaaatagctgtcattgatacagaaacatcctcatttttaaatgtctgctttaccctgttactgagtttgagatgacttaaatcactgtgttgaccctcttctgaaccaaatctttagcattgatgaaaatagttattttattctttacatccttcaccccacactatggtcagggcatgaaacaccctgttgatcccttcccaggctcggcactgtctgctcactggagccggactcccaggttgtaattctaatgttgcctcatgagaacagaatggcagaaagtttagtcctgacagattcccccatagggagtaatgaggacagcatgaaacttggataggttttacccttagtccctataaggtggattttactaaggttttttaaatgatactgtcatcctcttggggtttatcagccaggttagaggagcccagtgtcctaacctctctcagatcatggcagagaaggagctgcctccagcccctttcttgctgagtttcatttgagcagttccatgtgtagacattccaagtcactgcttggtagttgctgtgggagcctgtcattggctatggccagttagttctcagctgagcttcctagggccagtgcaacagggccagaggctgctatagtgtaaattgaaataagaatagatcattgttttgtacacacacacaataaaatgtaatgatggtgctaatttcacggtataaataagcactgccaagggttgagggactggcagctcaagaaacccgggttcctgtttgggaggagattttatgtagaaaagtttgaggctttgttaaaagtggggagaaggaagatcctcagtgaagcctgcacccaaccctggagtggcccagtgcaatccagaggtggaagagatcctatatccaggtgaaggtggccattgagtttctcagggctggggccaccttgtccatagcctccgtccacgctgcctggagcaggttgttagagagctctggttgttgggtcttcctcagctcccttctgcccctctctacctcttccactcatggaagcccctctactgcttatgaagattaagggtagtattttctaaggaagtggaaagaattaaactagaaatccacaacctcggaagaagtgtttcgagtttaacatgcgctgtttctgcttatgtggttccttctctagagctgctttcccatggctttcaaaacatcaggttattgtggggcttcaggtgtaaggtcctggaagttcagcaaagtttcgtggacaagacatgggcacagagagtagaagcagaaataaatggttctatgttttcaacttccagggttggggcaggccagagcaaggcggtctcatcgaggtgggtgctacctgtgtgtgtgtagatgagtgtgctgaaggtggggagggcagcacacagcagctcatggcagagccgcctcctaggtcttggcaaagaggcaagctgacgatagacatctacctatattgttaagaaaggggtcggggggatcagccaaggtccatcattgcttttttgccgcgcccccccccccccgcccccatagattgtcagctgtaagtgaaactcctagtgaaaaagaggggagccctgtgttaggagtccccataaacatgtactgtaattctttgtatatagaaaaaaaatttactgtaaagtaaagtttaactttactc

SEQ ID NO: 160740 - DNA, 442 bp, Homo sapiens
  Payload ID: 11413
  Gene Symbol: NSD1
  Gene Name: nuclear receptor binding SET domain protein 1
  ENST ID: ENST00000375350
  CDS Start-End: 1-195
gataaatccagtgccagcattggtgacatggaaaaggagccaggaattcccagtttgacaccacaggctgagctccctgaaccaggtggagtcttgctctgtcacccaggctggagtgcagtggcacgatctaggctcactgcaacctccgcctcccaggttcaagtgattctcctgtctcaccctcctgagtagctgcaactacagctgtgcggtcagagaagaaacgccttaggaagccaagcaagtggcttttggaatatacagaagaatatgatcagatatttgctcctaagaaaaaacaaaagaaggtacaggagcaggtgcacaaggaaattatgaaagtaaacgtcaaagaaaaccaactaagaaacttcttgaatccaatgatttagaccctggatttatgcccaagaagggggaccttggcctttctaaaaag

SEQ ID NO: 160741 - DNA, 12892 bp, Homo sapiens
  Payload ID: 11413
  Gene Symbol: NSD1
  Gene Name: nuclear receptor binding SET domain protein 1
  Uniprot ID: Q96L73
  ENST ID: ENST00000439151
  CDS Start-End: 46-8136
gctggcccgggagggggcgcggggcacggttgatgccggcccaggatggatcagacctgtgaactacccagaagaaattgtctgctgcccttttccaatccagtgaatttagatgcccctgaagacaaggacagccctttcggtaatggtcaatccaatttttctgagccacttaatgggtgtactatgcagttatcgactgtcagtggaacatcccaaaatgcttatggacaagattctccatcttgttacattccactgcggagactacaggatttggcctccatgatcaatgtagagtatttaaatgggtctgctgatggatcagaatcctttcaagaccctgaaaaaagtgattcaagagctcagacgccaattgtttgcacttccttgagtcctggtggtcctacagcacttgctatgaaacaggaaccctcttgtaataactcccctgaactccaggtaaaagtaacaaagactatcaagaatggctttctgcactttgagaattttacttgtgtggacgatgcagatgtagattctgaaatggacccagaacagccagtcacagaggatgagagtatagaggagatctttgaggaaactcagaccaatgccacctgcaattatgagactaaatcagagaatggtgtaaaagtggccatgggaagtgaacaagacagcacaccagagagtagacacggtgcagtcaaatcgccattcttgccattagctcctcagactgaaacacagaaaaataagcaaagaaatgaagtggacggcagcaatgaaaaagcagcccttctcccagcccccttttcactaggagacacaaacattacaatagaagagcaattaaactcaataaatttatcttttcaggatgatccagattccagtaccagtacattaggaaacatgctagaattacctggaacttcatcatcatctacttcacaggaattgccattttgtcaacctaagaaaaagtctacgccactgaagtatgaagttggagatctcatctgggcaaaattcaagagacgcccatggtggccctgcaggatttgttctgatccgttgattaacacacattcaaaaatgaaagtttccaaccggaggccctatcggcagtactacgtggaggcttttggagatccttctgagagagcctgggtggctggaaaagcaatcgtcatgtttgaaggcagacatcaattcgaagagctacctgtccttaggagaagagggaaacagaaagaaaaaggatataggcataaggttcctcagaaaattttgagtaaatgggaagccagtgttggacttgcagaacagtatgatgttcccaaggggtcaaagaaccgaaaatgtattcctggttcaatcaagttggacagtgaagaagatatgccatttgaagactgcacaaatgatcctgagtcagaacatgacctgttgcttaatggctgtttgaaatcactggcttttgattctgaacattctgcagatgagaaggaaaagccttgcgctaaatctcgagccagaaagagctctgataatccaaaaaggactagtgtgaaaaagggccacatacaatttgaagcacataaagatgaacggaggggaaagattccagagaaccttggcctaaactttatctctggggatatatctgatacgcaggcctctaatgaactttccaggatagcaaatagcctcacagggtccaacactgccccaggaagttttctgttttcttcctgtggaaaaaacactgcaaagaaagaatttgagacttcaaatggtgactctttattgggcttgcctgagggtgctttgatctcaaagtgttctcgagagaagaataaaccccaacgaagcctggtgtgtggttcaaaagtgaagctctgctatattggagcaggtgatgaggaaaagcgaagtgattccattagtatctgtaccacttctgatgatggaagcagtgacctggatcccatagaacacagctcagagtctgataacagtgtccttgaaattccagatgctttcgatagaacagagaacatgttatctatgcagaaaaatgaaaagataaagtattctaggtttgctgccacaaacactagggtaaaagcaaaacagaagcctctcattagtaactcacatacagaccacttaatgggttgtactaagagtgcagagcctggaaccgagacgtctcaggttaatctctctgatctgaaggcatctactcttgttcacaaaccccagtcagattttacaaatgatgctctctctccaaaattcaacctgtcatcaagcatatccagtgagaactcgttaataaagggtggggcagcaaatcaagctctattacattcgaaaagcaaacagcccaagttccgaagtataaagtgcaaacacaaagaaaatccagttatggcagaacccccagttataaatgaggagtgcagtttgaaatgctgctcttctgataccaaaggctctcctttggccagcatttctaaaagtgggaaagtggatggtctaaaactactgaacaatatgcatgagaaaaccagggattcaagtgacatagaaacagcagtggtgaaacatgttttatccgagttgaaggaactctcttacagatccttaggtgaggatgtcagtgactctggaacatcaaagccatcaaaaccattacttttctcttctgcttctagtcagaatcacatacctattgaaccagactacaaattcagtacattgctaatgatgttgaaagatatgcatgatagtaagacgaaggagcagcggttgatgactgctcaaaacctggtctcttaccggagtcctggtcgtggggactgttctactaatagtcctgtaggagtctctaaggttttggtttcaggaggctccacacacaattcagagaaaaagggagatggcactcagaactccgccaatcctagccctagtgggggtgactctgcattatctggcgagttgtctgcttccctacctggcttactgtccgacaagagagacctccctgcttctggtaaaagtcgttcagactgtgttactaggcgcaactgtggacgatcaaagccttcatccaaattgcgagatgctttttcagcccaaatggtaaagaacacagtgaaccgtaaagccttaaagaccgagcgcaaaagaaaactgaatcagcttccaagtgtgactcttgatgctgtactgcagggagaccgagaacgtggaggttcattgagaggtggggcagaagatcctagtaaagaggatccccttcagataatgggccacttaacaagtgaagatggtgaccatttttctgatgtgcatttcgatagcaaggttaagcaatctgatcctggtaaaatttctgaaaaaggactctcttttgaaaacggaaaaggcccagagctggactctgtaatgaacagtgagaatgatgaactcaatggtgtaaatcaagtggtgcctaaaaagcggtggcagcgtttaaaccaaaggcgcactaaacctcgtaagcgcatgaacagatttaaagagaaagaaaactctgagtgtgcctttagggtcttacttcctagtgaccctgtgcaggaggggcgggatgagtttccagagcatagaactccttcagcaagcatacttgaggaaccactgacagagcaaaatcatgctgactgcttagattcagctgggccacggttaaatgtttgtgataaatccagtgccagcattggtgacatggaaaaggagccaggaattcccagtttgacaccacaggctgagctccctgaaccagctgtgcggtcagagaagaaacgccttaggaagccaagcaagtggcttttggaatatacagaagaatatgatcagatatttgctcctaagaaaaaacaaaagaaggtacaggagcaggtgcacaaggtaagttcccgctgtgaagaggaaagccttctagcccgaggtcgatctagtgctcagaacaagcaggtggacgagaattctttgatttcaaccaaagaagagcctccagttcttgaaagggaggctccgtttttggagggccccttggctcagtcagaacttggaggtggacatgctgagttgccgcagctgaccttgtctgtgcctgtggctccggaagtctctccacggcctgcccttgagtctgaggaattgctagttaaaacgccaggaaattatgaaagtaaacgtcaaagaaaaccaactaagaaacttcttgaatccaatgatttagaccctggatttatgcccaagaagggggaccttggcctttctaaaaagtgctatgaagctggtcacctggagaatggcataactgaatcttgtgccacatcttattcaaaagattttggtggaggcactaccaagatatttgacaagccaaggaagcgaaaacgacagaggcatgctgcagccaagatgcagtgtaaaaaagtgaaaaatgatgactcgtcaaaagagattccaggctcagagggagaactaatgcctcacaggacggccacaagccccaaggagactgttgaggaaggtgtagaacacgatcccgggatgcctgcctctaaaaaaatgcagggtgaacgcggtggaggagctgcactcaaggagaatgtctgtcagaattgtgaaaaattgggtgagctgctgttatgtgaggctcagtgctgtggggctttccacctggagtgccttggattgactgagatgccaagaggaaaatttatctgcaatgaatgtcgcacaggaatccatacctgttttgtatgtaagcagagtggggaagatgttaaaaggtgccttctacccttgtgtggaaagttttaccatgaagagtgtgtccagaagtacccacccactgttatgcagaacaagggcttccggtgctccctccacatctgtataacctgtcatgctgctaatccagccaatgtttctgcatctaaaggtcggttgatgcgctgtgtccgctgtcctgtggcataccacgccaatgacttttgcctggctgctgggtcaaagatccttgcatctaatagtatcatctgccctaatcactttacccctaggcggggctgccgaaatcatgagcatgttaatgttagctggtgctttgtgtgctcagaaggaggcagccttctgtgctgtgattcttgccctgctgcttttcatcgtgaatgcctgaacattgatatccctgaaggaaactggtattgcaatgactgtaaagcaggcaaaaagccacactacagggagattgtctgggtaaaagttggacgatacaggtggtggccagctgagatctgccatcctcgagctgttccttccaacattgataagatgagacatgatgtgggagagttcccagtcctcttttttggatctaatgactatttgtggactcaccaggcccgagtcttcccttacatggagggtgacgtgagcagcaaggataagatgggcaaaggagtggatgggacatataaaaaagctcttcaggaagctgcagcaaggtttgaggaattaaaggcccaaaaagagctaagacagctgcaggaagaccgaaagaatgacaagaagccaccaccttataaacatataaaggtaaaccgtcctattggcagggtacagatcttcactgcagacttatctgaaataccccgttgcaactgtaaagctactgatgagaacccctgtgggatagactctgaatgcatcaaccgcatgctgctctatgagtgccaccccacagtgtgtcctgccggagggcgctgtcaaaaccagtgcttttccaagcgccaatatccagaggttgaaattttccgcacattacagcggggttggggtctacggacaaaaacagatattaaaaagggtgaatttgtgaatgagtatgtgggtgagcttatagatgaagaagaatgcagagctcgaattcgctatgctcaagaacatgatatcactaatttctatatgctcaccctagacaaagaccgaatcattgatgctggtcccaaaggaaactatgctcggttcatgaatcattgctgccagcccaactgtgaaacacagaagtggtctgtgaatggagatacccgtgtaggcctttttgcactaagtgacattaaagcaggcactgaacttaccttcaactacaacctagaatgtcttgggaatggaaagactgtttgcaaatgtggagccccgaactgcagtggcttcttgggtgtaaggccaaagaatcaacccattgccacggaagaaaagtcaaagaaattcaagaagaagcaacagggaaagcgcaggacccagggtgaaatcacaaaggagcgagaagatgagtgttttagttgtggggatgctggccagctcgtctcctgcaagaaaccaggctgcccaaaagtttaccacgcagactgtctcaatctgaccaagcgaccagcagggaaatgggaatgtccgtggcatcagtgtgacatctgcgggaaggaagcagcctccttctgtgagatgtgccccagctccttttgtaagcagcatcgagaagggatgcttttcatttccaaactggatgggcgtctgtcttgtactgagcatgacccctgtgggcccaatcctctggaacctggggagatccgtgagtatgtgcctcccccagtaccgctgcctccagggccaagcactcacctggcagagcaatcaacaggaatggctgctcaggcacccaaaatgtcagataaacctcctgctgacaccaaccagatgctgtcgctctccaaaaaagctctggcagggacttgtcagaggccattgctacctgaaagacctcttgagagaactgactccaggccccagcctttagataaggtcagagacctcgctgggtcagggaccaaatcccaatccttggtttccagccagaggccactggacaggccaccagcagtggcaggaccaagaccccagctaagcgacaaaccctctccagtgaccagcccaagctcctcaccctcagtcaggtcccaaccactggaaagacctctggggacggctgacccaaggctggataaatccataggtgctgccagcccaaggccccagtcactggagaaaacctcagttcccactggcctgagacttccgccgccagacagactgctcattactagcagtcccaaaccccagacttcagacaggcctactgacaaaccccatgcctctttgtcccagagactcccacctcctgagaaagtactatcagctgtggtccagacccttgtagctaaagaaaaagcactgaggcctgtggaccagaatactcagtcaaaaaatagagctgctttggtgatggatctcatagacctaactcctcgccagaaggagcgggcagcttcacctcatcaggtcacaccacaggctgatgagaagatgccagtgttggagtcaagttcatggcctgccagcaaaggtctggggcatatgccgagagctgttgagaaaggctgtgtgtcagatcctcttcagacatctgggaaagcagcagccccttcagaggacccctggcaagctgttaaatcactcacccaggccagacttctttctcagcctcctgccaaggcctttttatatgagccaacaactcaggcctcaggaagagcttctgcaggggctgagcagaccccagggcctcttagccaatccccgggcctggtgaagcaggcgaagcagatggtcggaggccagcaactacctgcacttgccgccaagagtgggcaatcttttaggtctctcgggaaggccccagcctccctccccactgaagaaaagaagttggtaaccacagagcaaagtccctgggccctgggaaaagcctcatcacgggcagggctctggcccatagtggctggacagacactggcacagtcttgctggtctgctgggagcacacagacattggcacagacttgctggtctcttggaagagggcaagaccccaaaccagagcaaaatacacttccagctcttaaccaggctccttccagtcacaagtgtgcagaatcagaacagaagtagtaccaatcaatgtcacatgaacaaacaagctgcccccagggtaccatttggggaggggaaatcttttctttctttcccccttaaaaaaaaacacatctgccccgaacactttcccactgttattctttcctcatatcccaacactcagaactcttgtgacattagccagtgggggcttatggttgtgtgaaccatgtatgaaaatccagtgggccccaaccaaggagacagacagacttgggtctctttcccccaacttttccacatggtcatcgtgaaataaaaagtccactctggagtcaagtatggaattcaattccgctggtcaggttggaaggtataggggctctcaaagcgatttccccaaccagacagagccccattgagggcacctaggaacccttgggaggaaatggtgttctttcaaatcagtggcgatttcctgagcattcacgtgttctaggccgggtgctagtcactgatgagagatacaggcctcatccctgtgagcctggattccaaggctttcaggaacctttgaccaggaagtaacaggaagttctgaggggccctggggctttagactcattttgaaatgtcctttgtggcaccagaagtggttgtgttgaggaagtgtctcttggctgcggtgtgcatgggtgcgtgtgcatgcgcgcacactcacagaggtctcctctatagatgcaagggtgctgcattgaggccagcaaggctgttggctgtggggtcgccgctgctgcttttgtctgggctgtgcagagtctcaagatcagtccttggaggagcaggtggtcaggggcagtcgggctctgtgcgaatgtagatttccagcagtggaagaaggcatttggcaagcttctctttctttgcttttgtttctacctatttttctctttgtacatgaatccaccccatccctatttccctaaaacactcaggtgctttcagatttcagagcctcgggcagtggacatagggaatctctggcaagctctgagctagacacaccagcttcaggaagagtaccagatcctgatgggaaatttcttttccccattccttttccctcctgagtggagggagtcctcttcttcgcctccctgagaattgctgtgctctgtattgagagcacctgcctgctgacttagctcaaaggcaagccagaacccttccctgaagactggcaagaggtggtgtttagagcaacgtccaggctaagagatgactcctattaactgctgattatctgttactgctgccctgagctggggcccaagggctgggaaatctgttggtgctaccctgccctaccattcacccagctcacagactgccaacaggaagtgctgtttggctagtttcctcccacttgtctacccctcctttgtccttagaccaacatgtttacctctctgctttgccaacttagccagcaggccatccccggccctaacgtctcctggccattatctcttagttatggctttcacgctctcaataggattctgtatttggtcccaatttcctcaagttcttattgaggttactcccatcaattccacggagggaacagtagttattatagaagcatttgcgctttatctaaagattaaaaatagaatctgcttttatttcccaaagtctgtctctgaggttgagacacttgaactcaggcagagggacgaggctgggcagggctgtcctgagtttaggggcctatccctgcatttcactgagacctcggaatctcctctgtgaattccacctgcctagttctcccctttcatcctctctctcttcccacatcatcaaagaggaaaagctctttgttcaaaaggaagagaaaacgtaaagcatcttattttcttttaaaagaattttaaaccatgaaaaagatatttttaaagaaattcaccgagaacattaaagttcattatattaagtatttatcatgtgtgagaataataaatatataactgcagctagtaggtccctttccctaatcttttaggtcatatgagtagggtttgcttggtgccagtcctgtgcccttttctctccagtcatctgtagttgtgatcagaaaaaggtatctgcactgcactgtcagagtctcctttcactatgttgtgtgttaaattaccgtagctctttgtttcatgaaataaactgtgaatttggggggggcggggggagggcgtgcaggccatgtaaaaattttccgtggagaagtttgattctaaagtagcttctctaaagtaggctttggtaggtaatcaacttgacagcagtctagatgtctcacaggacaggagggagtgagggaaaggggccatgattggctgctttgtggttttattttggttctttccattctccgccattcattggaggcttcgttccagacctgcctgggaaaacagcttctgagccattttggggagcagttcttcatctgaatggatggacatctgggcttccttcaagggccattgaatgggaactagaaaaccactggaaactagaaatttgagctattgggcccaccagtagcagcatgtgatactagatggttaaaatcatgaaagcagtcactatccaattagaagcagagtcacaacaactgttgggaaatgtgactcttggaggaaggtggggagggagtggccttgccagccctgtgggacgtcccctgaagtttgtaataagaccccttttccaaagggatgtgaattggagtgaaaaggaaatctttcatcttagaaaacttctggtccttaacgcagggtggtatttgggtatgtgcttggaaattgagatctcaagagtgtttgccttggagccagctccccaggaggccttttccagggacaaggcaaaagttgaaattctccatgggtagctagaaagccaatacatctagccctgctaagtcagaaaaagattatgaaaaatgttgaaatttacattcaaagcctcatttgcttatcttgctggagccaacccagtctaatagcaaaatagctgtcattgatacagaaacatcctcatttttaaatgtctgctttaccctgttactgagtttgagatgacttaaatcactgtgttgaccctcttctgaaccaaatctttagcattgatgaaaatagttattttattctttacatccttcaccccacactatggtcagggcatgaaacaccctgttgatcccttcccaggctcggcactgtctgctcactggagccggactcccaggttgtaattctaatgttgcctcatgagaacagaatggcagaaagtttagtcctgacagattcccccatagggagtaatgaggacagcatgaaacttggataggttttacccttagtccctataaggtggattttactaaggttttttaaatgatactgtcatcctcttggggtttatcagccaggttagaggagcccagtgtcctaacctctctcagatcatggcagagaaggagctgcctccagcccctttcttgctgagtttcatttgagcagttccatgtgtagacattccaagtcactgcttggtagttgctgtgggagcctgtcattggctatggccagttagttctcagctgagcttcctagggccagtgcaacagggccagaggctgctatagtgtaaattgaaataagaatagatcattgttttgtacacacacacaataaaatgtaatgatggtgctaatttcacggtataaataagcactgccaagggttgagggactggcagctcaagaaacccgggttcctgtttgggaggagattttatgtagaaaagtttgaggctttgttaaaagtggggagaaggaagatcctcagtgaagcctgcacccaaccctggagtggcccagtgcaatccagaggtggaagagatcctatatccaggtgaaggtggccattgagtttctcagggctggggccaccttgtccatagcctccgtccacgctgcctggagcaggttgttagagagctctggttgttgggtcttcctcagctcccttctgcccctctctacctcttccactcatggaagcccctctactgcttatgaagattaagggtagtattttctaaggaagtggaaagaattaaactagaaatccacaacctcggaagaagtgtttcgagtttaacatgcgctgtttctgcttatgtggttccttctctagagctgctttcccatggctttcaaaacatcaggttattgtggggcttcaggtgtaaggtcctggaagttcagcaaagtttcgtggacaagacatgggcacagagagtagaagcagaaataaatggttctatgttttcaacttccagggttggggcaggccagagcaaggcggtctcatcgaggtgggtgctacctgtgtgtgtgtagatgagtgtgctgaaggtggggagggcagcacacagcagctcatggcagagccgcctcctaggtcttggcaaagaggcaagctgacgatagacatctacctatattgttaagaaaggggtcggggggatcagccaaggtccatcattgcttttttgccgcgcccccccccccccgcccccatagattgtcagctgtaagtgaaactcctagtgaaaaagaggggagccctgtgttaggagtccccataaacatgtactgtaattctttgtatatagaaaaaaaatttactgtaaagtaaagtttaactttactcatata

SEQ ID NO: 160742 - DNA, 561 bp, Homo sapiens
  Payload ID: 11413
  Gene Symbol: NSD1
  Gene Name: nuclear receptor binding SET domain protein 1
  ENST ID: ENST00000504457
  CDS Start-End: 534-561
actcgatgccgatgaccttgcgggcccggccttggcggcgaacatgcagaggatgcttgtgtccgagcccacatccagcaccaccttgtctttaaagaggtggcggttgtgaaacatggagttgccgaagtgggcgtaggagtcaaagtagtaatctttggacgtcatgccctcgacgttcggcttctcgctgctttccgcctggccacaggacacctccatgatgcagttcacgacctcggcggccgccatcttcacccgcacctactcctcttccggccgccaagacccccgcctttttctatagtaggattttaagaggaggcagccttctgtgctgtgattcttgccctgctgcttttcatcgtgaatgcctgaacattgatatccctgaaggaaactggtattgcaatgactgtaaagcaggcaaaaagccacactacagggagattgtctgggtaaaagttggacgatacaggtggtggccagctgagatctgccatcctcgagctgttccttccaacattgataagatgagacatgatgtgggagagttcccag

SEQ ID NO: 160743 - DNA, 513 bp, Homo sapiens
  Payload ID: 11413
  Gene Symbol: NSD1
  Gene Name: nuclear receptor binding SET domain protein 1
  ENST ID: ENST00000515735
  CDS Start-End: 356-513
atcttcacccgcacctactcctcttccggccgccaagacccccgcctttttctatagtaggattttaagaggtgaaagaagcacagtgagaacaagattaactcggatatattctttgctaaggctttactccccacttcagggaggcagccttctgtgctgtgattcttgccctgctgcttttcatcgtgaatgcctgaacattgatatccctgaaggaaactggtattgcaatgactgtaaagcaggcaaaaagccacactacagggagattgtctgggtaaaagttggacgatacaggtggtggccagctgagatctgccatcctcgagctgttccttccaacattgataagatgagacatgatgtgggagagttcccagtcctcttttttggatctaatgactatttgtggactcaccaggcccgagtcttcccttacatggagggtgacgtgagcagcaaggataagatgggcaaaggagtggatgggacatataaaaaagctcttca

SEQ ID NO: 160744 - DNA, 585 bp, Homo sapiens
  Payload ID: 11413
  Gene Symbol: NSD1
  Gene Name: nuclear receptor binding SET domain protein 1
  ENST ID: ENST00000508896
  CDS Start-End: 120-585
acaagcccgacttcacccgccctgaaccccgaagagttgatgccggcccaggatggatcagacctgtgaactacccagaagaaattgtctgctgcccttttccaatccagtgaatttagatgcccctgaagacaaggacagccctttcggatgatccagattccagtaccagtacattaggaaacatgctagaattacctggaacttcatcatcatctacttcacaggaattgccattttgtcaacctaagaaaaagtctacgccactgaagtatgaagttggagatctcatctgggcaaaattcaagagacgcccatggtggccctgcaggatttgttctgatccgttgattaacacacattcaaaaatgaaagtttccaaccggaggccctatcggcagtactacgtggaggcttttggagatccttctgagagagcctgggtggctggaaaagcaatcgtcatgtttgaaggcagacatcaattcgaagagctacctgtccttaggagaagagggaaacagaaagaaaaaggatataggcataaggttcctcagaaaattttgagtaaatgggaagccagtg

SEQ ID NO: 160745 - DNA, 533 bp, Homo sapiens
  Payload ID: 11413
  Gene Symbol: NSD1
  Gene Name: nuclear receptor binding SET domain protein 1
  ENST ID: ENST00000510954
  CDS Start-End: 161-533
ggccgggtagggggttcgcctgcggccgcgtctgctcggggcctgaggcctcgaagaccccagcccaagcccccaggttgatgccggcccaggatggatcagacctgtgaactacccagaagaaattgtctgctgcccttttccaatccagtgaatttagatgcccctgaagacaaggacagccctttcggatgatccagattccagtaccagtacattaggaaacatgctagaattacctggaacttcatcatcatctacttcacaggaattgccattttgtcaacctaagaaaaagtctacgccactgaagtatgaagttggagatctcatctgggcaaaattcaagagacgcccatggtggccctgcaggatttgttctgatccgttgattaacacacattcaaaaatgaaagtttccaaccggaggccctatcggcagtactacgtggaggcttttggagatccttctgagagagcctgggtggctggaaaagcaatcgtcatgtttgaaggcagacatcaattcgaag

SEQ ID NO: 160746 - DNA, 578 bp, Homo sapiens
  Payload ID: 11413
  Gene Symbol: NSD1
  Gene Name: nuclear receptor binding SET domain protein 1
  ENST ID: ENST00000503056
  CDS Start-End: 296-578
atgtagaacaccgtctgcttccagtgcgtgtacagggactcgggtatggtggagaagccggtccctccggtcctcttgtggcagaggcagccttctgtgctgtgattcttgccctgctgcttttcatcgtgaatgcctgaacattgatatccctgaaggaaactggtattgcaatgactgtaaagcaggcaaaaagccacactacagggagattgtctgggtaaaagttggacgatacaggtggtggccagctgagatctgccatcctcgagctgttccttccaacattgataagatgagacatgatgtgggagagttcccagtcctcttttttggatctaatgactatttgtggactcaccaggcccgagtcttcccttacatggagggtgacgtgagcagcaaggataagatgggcaaaggagtggatgggacatataaaaaagctcttcaggaagctgcagcaaggtttgaggaattaaaggcccaaaaagagctaagacagctgcaggaagaccgaaagaatgacaagaagccaccaccttataaacatataaaggtaaaccgtcctattggca

SEQ ID NO: 160747 - DNA, 519 bp, Homo sapiens
  Payload ID: 11413
  Gene Symbol: NSD1
  Gene Name: nuclear receptor binding SET domain protein 1
  ENST ID: ENST00000505395
  CDS Start-End: 505-519
atgcagaggatgcttgtgtccgagcccacatccagcaccaccttgtctttaaagaggtggcggttgtgaaacatggagttgccgaagtgggcgtaggagtcaaagtagtaatctttggacgtcatgccctcgacgttcggcttctcgctgctttccgcctggccacaggacacctccatgatgcagttcacgacctcggcggccgccatcttcacccgcacctactcctcttccggccgccaagacccccgcctttttctatagtaggattttaagaggtgaaagaagcacagaggcagccttctgtgctgtgattcttgccctgctgcttttcatcgtgaatgcctgaacattgatatccctgaaggaaactggtattgcaatgactgtaaagcaggcaaaaagccacactacagggagattgtctgggtaaaagttggacgatacaggtggtggccagctgagatctgccatcctcgagctgttccttccaacattgataagatgagacatgatgtg

SEQ ID NO: 160748 - DNA, 561 bp, Homo sapiens
  Payload ID: 11413
  Gene Symbol: NSD1
  Gene Name: nuclear receptor binding SET domain protein 1
  ENST ID: ENST00000508029
  CDS Start-End: 460-561
aaaacctcctctgggggagggagggagagagagaggaagggggagccccacaaccgtctaggaatgctcagcccctgggcccgtgcagggcgggagagccgggcctcagcacatcctgtagtctgtggagcaggacaggtcgcacagatggcccctgaaatctaggttgatggtgaagtcccggtcccagttcttggcgttgggccgcatgccgatggtgccgaagatctcctcgcccgtcttcaaggaggcagccttctgtgctgtgattcttgccctgctgcttttcatcgtgaatgcctgaacattgatatccctgaaggaaactggtattgcaatgactgtaaagcaggcaaaaagccacactacagggagattgtctgggtaaaagttggacgatacaggtggtggccagctgagatctgccatcctcgagctgttccttccaacattgataagatgagacatgatgtgggagagttcccagtcctcttttttggatctaatgactatttgtggactcaccaggcccgagtcttcccttacatggagggtgacgtg

SEQ ID NO: 160749 - DNA, 809 bp, Homo sapiens
  Payload ID: 11413
  Gene Symbol: NSD1
  Gene Name: nuclear receptor binding SET domain protein 1
  ENST ID: ENST00000511258
  CDS Start-End: 158-361
cgcgaacttcctcccggcgcggcccgtgccccgccggccgcctgcgaacacctcggcctccgcctcccctcaggttgatgccggcccaggatggatcagacctgtgaactacccagaagaaattgtctgctgcccttttccaatccagtgaatttagatgcccctgaagacaaggacagccctttcggatgatccagattccagtaccagtacattaggaaacatgctagaattacctggaacttcatcatcatctacttcacaggaattgccatttagactggccttgtcatgttgcccaggctggcgtcgggactcctgggctcattcgatcctcctgcatcagctagaactacagtagtttcagattttgaagtgtgtatgtgtatgtgtgatatgtatatattccgtgtgtatagaaatggagagtatcttatttgagttgttgttttcagtaatgctgtcaagtattgttagagggtgataaatgataacatttgtttttatttgagcttatgaagaatttcttgactttctagctaaatgatcagttcacttctcttagcctcaattttattgcgtctaaattccagaagttcttgattgctataagattccttcagctttaaatattaatatttgatattgattttgtttctgcccaaacacattgtttggtcaccgccggtaatgttagcaaagagaattttttttggccaacaaatgtctcataccacattcagtttttataagaaaaacttttatggtatgttgttattctgagttcattaaacattcgctttacctta

SEQ ID NO: 160750 - DNA, 6952 bp, Homo sapiens
  Payload ID: 11414
  Gene Symbol: NCOA1
  Gene Name: nuclear receptor coactivator 1
  Uniprot ID: Q15788
  ENST ID: ENST00000288599
  CDS Start-End: 259-4458
ttccagttacagctatatcagagaatgagttaatctcctcagaaatcactaaatactactctgaggggcttagaaattaacaggttgtttatataattggccttaaatgaggtgagagtgaagagactagagccatctctggaaaacatcattatcccattccccgggaagctaccctctggaactcaagatttgaccatatctgttttgaggattcattatgaacaaagaagtctcccaggtgtgaagtttttcaacatgagtggcctcggggacagttcatccgaccctgctaacccagactcacataagaggaaaggatcgccatgtgacacactggcatcaagcacggaaaagaggcgcagggagcaagaaaataaatatttagaagaactagctgagttactgtctgccaacattagtgacattgacagcttgagtgtaaaaccagacaaatgcaagattttgaagaaaacagtcgatcagatacagctaatgaagagaatggaacaagagaaatcaacaactgatgacgatgtacagaaatcagacatctcatcaagtagtcaaggagtgatagaaaaggaatccttgggacctcttcttttggaggctttggatggatttttctttgttgtgaactgtgaagggagaattgtatttgtgtcagagaatgtaaccagctacttaggttacaatcaggaggaattaatgaatacgagcgtctacagcatactgcacgtgggggatcatgcagaatttgtgaagaatctgctaccaaaatcactagtaaatggagttccttggcctcaagaggcaacacgacgaaatagccatacctttaactgcaggatgctaattcaccctccagatgagccagggaccgagaaccaagaagcttgccagcgttatgaagtaatgcagtgtttcactgtgtcacagccaaaatcaattcaagaggatggagaagatttccagtcatgtctgatttgtattgcacggcgattacctcggcctccagctattacgggtgtagaatcctttatgaccaagcaagatactacaggtaaaatcatctctattgatactagttccctgagagctgctggcagaactggttgggaagatttagtgaggaagtgcatttatgcttttttccaacctcagggcagagaaccatcttatgccagacagctgttccaagaagtgatgactcgtggcactgcctccagcccctcctatagattcatattgaatgatgggacaatgcttagcgcccacaccaagtgtaaactttgctaccctcaaagtccagacatgcaacctttcatcatgggaattcatatcatcgacagggagcacagtgggctttctcctcaagatgacactaattctggaatgtcaattccccgagtaaatccctcggtcaatcctagtatctctccagctcatggtgtggctcgttcatccacattgccaccatccaacagcaacatggtatccaccagaataaaccgccagcagagctcagaccttcatagcagcagtcatagtaattctagcaacagccaaggaagtttcggatgctcacccggaagtcagattgtagccaatgttgccttaaaccaaggacaggccagttcacagagcagtaatccctctttaaacctcaataattctcctatggaaggtacaggaatatccctagcacagttcatgtctccaaggagacaggttacttctggattggcaacaaggcccaggatgccaaacaattcctttcctcctaatatttcgacattaagctctcccgttggcatgacaagtagtgcctgtaataataataaccgatcttattcaaacatcccagtaacatctttacagggtatgaatgaaggacccaataactccgttggcttctctgccagttctccagtcctcaggcagatgagctcacagaattcacctagcagattaaatatacaaccagcaaaagctgagtccaaagataacaaagagattgcctcaattttaaatgaaatgattcaatctgacaacagctctagtgatggcaaacctctggattcagggcttctgcataacaatgacagactttcagatggagacagtaaatactctcaaaccagtcacaaactagtgcagcttttgacaacaactgccgaacagcagttacggcatgctgatatagacacaagctgcaaagatgtcctgtcttgcacaggcacttccaactctgcctctgctaactcttcaggaggttcttgtccctcttctcatagctcattgacagaacggcataaaattctacaccggctcttacaggagggtagcccctcagatatcaccactttgtctgtcgagcctgataaaaaggacagtgcatctacttctgtgtcagtgactggacaggtacaaggaaactccagtataaaactagaactggatgcttcaaagaaaaaagaatcaaaagaccatcagctcctacgctatcttttagataaagatgagaaagatttaagatcaactccaaacctgagcctggatgatgtaaaggtgaaagtggaaaagaaagaacagatggatccatgtaatacaaacccaaccccaatgaccaaacccactcctgaggaaataaaactggaggcccagagccagtttacagctgaccttgaccagtttgatcagttactgcccacgctggagaaggcagcacagttgccaggcttatgtgagacagacaggatggatggtgcggtcaccagtgtaaccatcaaatcggagatcctgccagcttcacttcagtccgccactgccagacccacttccaggctaaatagattacctgagctggaattggaagcaattgataaccaatttggacaaccaggaacaggcgatcagattccatggacaaataatacagtgacagctataaatcagagtaaatcagaagaccagtgtattagctcacaattagatgagcttctctgtccacccacaacagtagaagggagaaatgatgagaaggctcttcttgaacagctggtatccttccttagtggcaaagatgaaactgagctagctgaactagacagagctctgggaattgacaaacttgttcaggggggtggattagatgtattatcagagagatttccaccacaacaagcaacgccacctttgatcatggaagaaagacccaacctttattcccagccttactcttctccttctcctactgccaatctccctagccctttccaaggcatggtcaggcaaaaaccttcactggggacgatgcctgttcaagtaacacctccccgaggtgctttttcacctggcatgggcatgcagcccaggcaaactctaaacagacctccggctgcacctaaccagcttcgacttcaactacagcagcgattacagggacaacagcagttgatacaccaaaatcggcaagctatcttaaaccagtttgcagcaactgctcctgttggcatcaatatgagatcaggcatgcaacagcaaattacacctcagccacccctgaatgctcaaatgttggcacaacgtcagcgggaactgtacagtcaacagcaccgacagaggcagctaatacagcagcaaagagccatgcttatgaggcagcaaagctttgggaacaacctccctccctcatctggactaccagttcaaatggggaacccccgtcttcctcagggtgctccacagcaattcccctatccaccaaactatggtacaaatccaggaaccccacctgcttctaccagcccgttttcacaactagcagcaaatcctgaagcatccttggccaaccgcaacagcatggtgagcagaggcatgacaggaaacataggaggacagtttggcactggaatcaatcctcagatgcagcagaatgtcttccagtatccaggagcaggaatggttccccaaggtgaggccaactttgctccatctctaagccctgggagctccatggtgccgatgccaatccctcctcctcagagttctcttctccagcaaactccacctgcctccgggtatcagtcaccagacatgaaggcctggcagcaaggagcgataggaaacaacaatgtgttcagtcaagctgtccagaaccagcccacgcctgcacagccaggagtatacaacaacatgagcatcaccgtttccatggcaggtggaaatacgaatgttcagaacatgaacccaatgatggcccagatgcagatgagctctttgcagatgccaggaatgaacactgtgtgccctgagcagataaatgatcccgcactgagacacacaggcctctactgcaaccagctctcatccactgaccttctcaaaacagaagcagatggaacccaggacaagaagacagaagagttcttctctgtggtgactacagactagaggaatgctctacaggtgcaacaggttcaggtgtttgctgacgtccagtgtacagtgaatctggtaggcggggacccttacctgaaccagcctggtccactgggaactcaaaagcccacgtcaggaccacagaccccccaggcccagcagaagagcctccttcagcagctactgactgaataaccacttttaaaggaatgtgaaatttaaataatagacatacagagatatacaaatatattatatatttttctgagatttttgatatctcaatctgcagccattcttcaggtcgtagcatttggagcaaaaaaaaaaaaaaaaaaaaaaaaaggagtttgcttttgtcgggagattgaaagatgtttttgtttctttctttgtaaaggccttggatattgaaaaaataccaaggcagaacagttggacaatctatttcttgagccaaatttaattattcttatttttgtaatcagtcattggcttcttatctggatgaaggcttttggaggagaaccaaaacgacaagttccaagaagaagatgaagctccgcctccgccgcttagtcccaaccctgcccaggaagaagggcccgtggggctttgcctgtgcccgtccaccaaaggctgtcatgtgtctcgaaatcagcagccctccccatcccaatcccaggcagcttgtgtgtacaatcagcttctctagcaactctgtatctgttggcttcaagagaatattttgcctccacatatgtaccccttctcctttttttaaagatggatttaaaccaagatgcctccaggaaagaggacgaaatgagtatattcacagaggaatccaaaaaatacagtttgggggaaaatgcaataatttttgatgagatgggtgaaggacaagaagtgagttgtgtcaattattgtagatacaattttctgattaaatctggaaaaataaaaggcagcctgttttttctgcttttattgtattaacagctgaggtagctaaagttatttaaaataaaattaaatttatgatccaagtagcttatttttccctttaaatctcattgtaaatatatttgatttcttgtagaaattgatttccttctgtttaattttatgcttttattatactcttgatttttctaaatttgtgtgtgaaatataacattgattgaattgcagttacatttggttagtaatatttcattattttaataactgtgatgtcatgtatggatttactttggggttcaaatcaaaatgtcactgccagaaagagctgttccagctgatctagagcatactgccctagagtgtccctgggatcatctgaacagaagtgcacaggctacttgtacagagaaaaaattaatactcaaaggaaatcttcattttttagattgactttgggaatttgaattttcatcagtgcaaatataaatttctctatcctgctctgaggctaattggtaccatattttccctttgtgtcttgtgactctgccacatcccatctcatcctggcctctgagtcaagaacccagtgaactgactttctagttctagaagttccgctgcaaggccaggaaagcttgagaaaggtattgtggaagaagcaaaggtagacccccatcactcacctttgtctgcatccctgggcctgtgaatgatgacagcacctgacattctgcaccagctacctctgcctccatggcagagaaaaggccataagaacagtggaagaggagcatggactcagacttcaaggaagaagccatttccccaggtccttccttctgcatctcaccacccctagttacaaataactccattgaacagcatctattcagaaactatgccgaataaaaagattggtggaagggctcatgtggttagcaactatgaaacagaaataggacactcagttacaaacattatctcctttagtttttcagaaaatgcatccctgatttcattcatttccagcttgaaagccagccatattactctagtccctaccaaactgctctagaaggtcatttccattttgtttgtgatatttagacgcgcagacttcaggaagttcacctttaacttcagcattccagatgaagtttcctgactcagtgcttttgcataaggaactagaaaaaaaaagtaaggaaaattggagatgctaacatcctcccccatcccaactgcaccttaaaatatgcatgtcaccttcaaggttttataattgcactgtttgttttatgtatgtacagattaaaattattgctacatttgaggaaaataaaattgcttgcttctatgtaattcctgtcattccacaggaaattcacttttccagctactgaatagaatttgtttaacaacctcatgggttgcctcttcatttacagggaagaaatgaaatgtacatctgcagaaattgccaaagcccaaattaacgagtattataaaaggataataaagcatccctgaagccaaa

SEQ ID NO: 160751 - DNA, 6895 bp, Homo sapiens
  Payload ID: 11414
  Gene Symbol: NCOA1
  Gene Name: nuclear receptor coactivator 1
  Uniprot ID: Q15788
  ENST ID: ENST00000348332
  CDS Start-End: 259-4584
ttccagttacagctatatcagagaatgagttaatctcctcagaaatcactaaatactactctgaggggcttagaaattaacaggttgtttatataattggccttaaatgaggtgagagtgaagagactagagccatctctggaaaacatcattatcccattccccgggaagctaccctctggaactcaagatttgaccatatctgttttgaggattcattatgaacaaagaagtctcccaggtgtgaagtttttcaacatgagtggcctcggggacagttcatccgaccctgctaacccagactcacataagaggaaaggatcgccatgtgacacactggcatcaagcacggaaaagaggcgcagggagcaagaaaataaatatttagaagaactagctgagttactgtctgccaacattagtgacattgacagcttgagtgtaaaaccagacaaatgcaagattttgaagaaaacagtcgatcagatacagctaatgaagagaatggaacaagagaaatcaacaactgatgacgatgtacagaaatcagacatctcatcaagtagtcaaggagtgatagaaaaggaatccttgggacctcttcttttggaggctttggatggatttttctttgttgtgaactgtgaagggagaattgtatttgtgtcagagaatgtaaccagctacttaggttacaatcaggaggaattaatgaatacgagcgtctacagcatactgcacgtgggggatcatgcagaatttgtgaagaatctgctaccaaaatcactagtaaatggagttccttggcctcaagaggcaacacgacgaaatagccatacctttaactgcaggatgctaattcaccctccagatgagccagggaccgagaaccaagaagcttgccagcgttatgaagtaatgcagtgtttcactgtgtcacagccaaaatcaattcaagaggatggagaagatttccagtcatgtctgatttgtattgcacggcgattacctcggcctccagctattacgggtgtagaatcctttatgaccaagcaagatactacaggtaaaatcatctctattgatactagttccctgagagctgctggcagaactggttgggaagatttagtgaggaagtgcatttatgcttttttccaacctcagggcagagaaccatcttatgccagacagctgttccaagaagtgatgactcgtggcactgcctccagcccctcctatagattcatattgaatgatgggacaatgcttagcgcccacaccaagtgtaaactttgctaccctcaaagtccagacatgcaacctttcatcatgggaattcatatcatcgacagggagcacagtgggctttctcctcaagatgacactaattctggaatgtcaattccccgagtaaatccctcggtcaatcctagtatctctccagctcatggtgtggctcgttcatccacattgccaccatccaacagcaacatggtatccaccagaataaaccgccagcagagctcagaccttcatagcagcagtcatagtaattctagcaacagccaaggaagtttcggatgctcacccggaagtcagattgtagccaatgttgccttaaaccaaggacaggccagttcacagagcagtaatccctctttaaacctcaataattctcctatggaaggtacaggaatatccctagcacagttcatgtctccaaggagacaggttacttctggattggcaacaaggcccaggatgccaaacaattcctttcctcctaatatttcgacattaagctctcccgttggcatgacaagtagtgcctgtaataataataaccgatcttattcaaacatcccagtaacatctttacagggtatgaatgaaggacccaataactccgttggcttctctgccagttctccagtcctcaggcagatgagctcacagaattcacctagcagattaaatatacaaccagcaaaagctgagtccaaagataacaaagagattgcctcaattttaaatgaaatgattcaatctgacaacagctctagtgatggcaaacctctggattcagggcttctgcataacaatgacagactttcagatggagacagtaaatactctcaaaccagtcacaaactagtgcagcttttgacaacaactgccgaacagcagttacggcatgctgatatagacacaagctgcaaagatgtcctgtcttgcacaggcacttccaactctgcctctgctaactcttcaggaggttcttgtccctcttctcatagctcattgacagaacggcataaaattctacaccggctcttacaggagggtagcccctcagatatcaccactttgtctgtcgagcctgataaaaaggacagtgcatctacttctgtgtcagtgactggacaggtacaaggaaactccagtataaaactagaactggatgcttcaaagaaaaaagaatcaaaagaccatcagctcctacgctatcttttagataaagatgagaaagatttaagatcaactccaaacctgagcctggatgatgtaaaggtgaaagtggaaaagaaagaacagatggatccatgtaatacaaacccaaccccaatgaccaaacccactcctgaggaaataaaactggaggcccagagccagtttacagctgaccttgaccagtttgatcagttactgcccacgctggagaaggcagcacagttgccaggcttatgtgagacagacaggatggatggtgcggtcaccagtgtaaccatcaaatcggagatcctgccagcttcacttcagtccgccactgccagacccacttccaggctaaatagattacctgagctggaattggaagcaattgataaccaatttggacaaccaggaacaggcgatcagattccatggacaaataatacagtgacagctataaatcagagtaaatcagaagaccagtgtattagctcacaattagatgagcttctctgtccacccacaacagtagaagggagaaatgatgagaaggctcttcttgaacagctggtatccttccttagtggcaaagatgaaactgagctagctgaactagacagagctctgggaattgacaaacttgttcaggggggtggattagatgtattatcagagagatttccaccacaacaagcaacgccacctttgatcatggaagaaagacccaacctttattcccagccttactcttctccttctcctactgccaatctccctagccctttccaaggcatggtcaggcaaaaaccttcactggggacgatgcctgttcaagtaacacctccccgaggtgctttttcacctggcatgggcatgcagcccaggcaaactctaaacagacctccggctgcacctaaccagcttcgacttcaactacagcagcgattacagggacaacagcagttgatacaccaaaatcggcaagctatcttaaaccagtttgcagcaactgctcctgttggcatcaatatgagatcaggcatgcaacagcaaattacacctcagccacccctgaatgctcaaatgttggcacaacgtcagcgggaactgtacagtcaacagcaccgacagaggcagctaatacagcagcaaagagccatgcttatgaggcagcaaagctttgggaacaacctccctccctcatctggactaccagttcaaatggggaacccccgtcttcctcagggtgctccacagcaattcccctatccaccaaactatggtacaaatccaggaaccccacctgcttctaccagcccgttttcacaactagcagcaaatcctgaagcatccttggccaaccgcaacagcatggtgagcagaggcatgacaggaaacataggaggacagtttggcactggaatcaatcctcagatgcagcagaatgtcttccagtatccaggagcaggaatggttccccaaggtgaggccaactttgctccatctctaagccctgggagctccatggtgccgatgccaatccctcctcctcagagttctcttctccagcaaactccacctgcctccgggtatcagtcaccagacatgaaggcctggcagcaaggagcgataggaaacaacaatgtgttcagtcaagctgtccagaaccagcccacgcctgcacagccaggagtatacaacaacatgagcatcaccgtttccatggcaggtggaaatacgaatgttcagaacatgaacccaatgatggcccagatgcagatgagctctttgcagatgccaggaatgaacactgtgtgccctgagcagataaatgatcccgcactgagacacacaggcctctactgcaaccagctctcatccactgaccttctcaaaacagaagcagatggaacccagcaggtgcaacaggttcaggtgtttgctgacgtccagtgtacagtgaatctggtaggcggggacccttacctgaaccagcctggtccactgggaactcaaaagcccacgtcaggaccacagaccccccaggcccagcagaagagcctccttcagcagctactgactgaataaccacttttaaaggaatgtgaaatttaaataatagacatacagagatatacaaatatattatatatttttctgagatttttgatatctcaatctgcagccattcttcaggtcgtagcatttggagcaaaaaaaaaaaaaaaaaaaaaaaaaggagtttgcttttgtcgggagattgaaagatgtttttgtttctttctttgtaaaggccttggatattgaaaaaataccaaggcagaacagttggacaatctatttcttgagccaaatttaattattcttatttttgtaatcagtcattggcttcttatctggatgaaggcttttggaggagaaccaaaacgacaagttccaagaagaagatgaagctccgcctccgccgcttagtcccaaccctgcccaggaagaagggcccgtggggctttgcctgtgcccgtccaccaaaggctgtcatgtgtctcgaaatcagcagccctccccatcccaatcccaggcagcttgtgtgtacaatcagcttctctagcaactctgtatctgttggcttcaagagaatattttgcctccacatatgtaccccttctcctttttttaaagatggatttaaaccaagatgcctccaggaaagaggacgaaatgagtatattcacagaggaatccaaaaaatacagtttgggggaaaatgcaataatttttgatgagatgggtgaaggacaagaagtgagttgtgtcaattattgtagatacaattttctgattaaatctggaaaaataaaaggcagcctgttttttctgcttttattgtattaacagctgaggtagctaaagttatttaaaataaaattaaatttatgatccaagtagcttatttttccctttaaatctcattgtaaatatatttgatttcttgtagaaattgatttccttctgtttaattttatgcttttattatactcttgatttttctaaatttgtgtgtgaaatataacattgattgaattgcagttacatttggttagtaatatttcattattttaataactgtgatgtcatgtatggatttactttggggttcaaatcaaaatgtcactgccagaaagagctgttccagctgatctagagcatactgccctagagtgtccctgggatcatctgaacagaagtgcacaggctacttgtacagagaaaaaattaatactcaaaggaaatcttcattttttagattgactttgggaatttgaattttcatcagtgcaaatataaatttctctatcctgctctgaggctaattggtaccatattttccctttgtgtcttgtgactctgccacatcccatctcatcctggcctctgagtcaagaacccagtgaactgactttctagttctagaagttccgctgcaaggccaggaaagcttgagaaaggtattgtggaagaagcaaaggtagacccccatcactcacctttgtctgcatccctgggcctgtgaatgatgacagcacctgacattctgcaccagctacctctgcctccatggcagagaaaaggccataagaacagtggaagaggagcatggactcagacttcaaggaagaagccatttccccaggtccttccttctgcatctcaccacccctagttacaaataactccattgaacagcatctattcagaaactatgccgaataaaaagattggtggaagggctcatgtggttagcaactatgaaacagaaataggacactcagttacaaacattatctcctttagtttttcagaaaatgcatccctgatttcattcatttccagcttgaaagccagccatattactctagtccctaccaaactgctctagaaggtcatttccattttgtttgtgatatttagacgcgcagacttcaggaagttcacctttaacttcagcattccagatgaagtttcctgactcagtgcttttgcataaggaactagaaaaaaaaagtaaggaaaattggagatgctaacatcctcccccatcccaactgcaccttaaaatatgcatgtcaccttcaaggttttataattgcactgtttgttttatgtatgtacagattaaaattattgctacatttgaggaaaataaaattgcttgcttctatgtaattcctgtcattccacaggaaattcacttttccagctactgaatagaatttgtttaacaacctcatgggttgcctcttcatttacagggaagaaatgaaatgtacatctgcagaaattgccaaagcccaaattaacgagtattataaaaggataataaagcatccctgaagccaaa

SEQ ID NO: 160752 - DNA, 6828 bp, Homo sapiens
  Payload ID: 11414
  Gene Symbol: NCOA1
  Gene Name: nuclear receptor coactivator 1
  Uniprot ID: Q15788
  ENST ID: ENST00000395856
  CDS Start-End: 195-4517
ggggcttagaaattaacaggttgtttatataattggccttaaatgaggtgagagtgaagagactagagccatctctggaaaacatcattatcccattccccgggaagctaccctctggaactcaagatttgaccatatctgttttgaggattcattatgaacaaagaagtctcccaggtgtgaagtttttcaacatgagtggcctcggggacagttcatccgaccctgctaacccagactcacataagaggaaaggatcgccatgtgacacactggcatcaagcacggaaaagaggcgcagggagcaagaaaataaatatttagaagaactagctgagttactgtctgccaacattagtgacattgacagcttgagtgtaaaaccagacaaatgcaagattttgaagaaaacagtcgatcagatacagctaatgaagagaatggaacaagagaaatcaacaactgatgacgatgtacagaaatcagacatctcatcaagtagtcaaggagtgatagaaaaggaatccttgggacctcttcttttggaggctttggatggatttttctttgttgtgaactgtgaagggagaattgtatttgtgtcagagaatgtaaccagctacttaggttacaatcaggaggaattaatgaatacgagcgtctacagcatactgcacgtgggggatcatgcagaatttgtgaagaatctgctaccaaaatcactagtaaatggagttccttggcctcaagaggcaacacgacgaaatagccatacctttaactgcaggatgctaattcaccctccagatgagccagggaccgagaaccaagaagcttgccagcgttatgaagtaatgcagtgtttcactgtgtcacagccaaaatcaattcaagaggatggagaagatttccagtcatgtctgatttgtattgcacggcgattacctcggcctccagctattacgggtgtagaatcctttatgaccaagcaagatactacaggtaaaatcatctctattgatactagttccctgagagctgctggcagaactggttgggaagatttagtgaggaagtgcatttatgcttttttccaacctcagggcagagaaccatcttatgccagacagctgttccaagaagtgatgactcgtggcactgcctccagcccctcctatagattcatattgaatgatgggacaatgcttagcgcccacaccaagtgtaaactttgctaccctcaaagtccagacatgcaacctttcatcatgggaattcatatcatcgacagggagcacagtgggctttctcctcaagatgacactaattctggaatgtcaattccccgagtaaatccctcggtcaatcctagtatctctccagctcatggtgtggctcgttcatccacattgccaccatccaacagcaacatggtatccaccagaataaaccgccagcagagctcagaccttcatagcagcagtcatagtaattctagcaacagccaaggaagtttcggatgctcacccggaagtcagattgtagccaatgttgccttaaaccaaggacaggccagttcacagagcagtaatccctctttaaacctcaataattctcctatggaaggtacaggaatatccctagcacagttcatgtctccaaggagacaggttacttctggattggcaacaaggcccaggatgccaaacaattcctttcctcctaatatttcgacattaagctctcccgttggcatgacaagtagtgcctgtaataataataaccgatcttattcaaacatcccagtaacatctttacagggtatgaatgaaggacccaataactccgttggcttctctgccagttctccagtcctcaggcagatgagctcacagaattcacctagcagattaaatatacaaccagcaaaagctgagtccaaagataacaaagagattgcctcaattttaaatgaaatgattcaatctgacaacagctctagtgatggcaaacctctggattcagggcttctgcataacaatgacagactttcagatggagacagtaaatactctcaaaccagtcacaaactagtgcagcttttgacaacaactgccgaacagcagttacggcatgctgatatagacacaagctgcaaagatgtcctgtcttgcacaggcacttccaactctgcctctgctaactcttcaggaggttcttgtccctcttctcatagctcattgacagaacggcataaaattctacaccggctcttacaggagggtagcccctcagatatcaccactttgtctgtcgagcctgataaaaaggacagtgcatctacttctgtgtcagtgactggacaggtacaaggaaactccagtataaaactagaactggatgcttcaaagaaaaaagaatcaaaagaccatcagctcctacgctatcttttagataaagatgagaaagatttaagatcaactccaaacctgagcctggatgatgtaaaggtgaaagtggaaaagaaagaacagatggatccatgtaatacaaacccaaccccaatgaccaaacccactcctgaggaaataaaactggaggcccagagccagtttacagctgaccttgaccagtttgatcagttactgcccacgctggagaaggcagcacagttgccaggcttatgtgagacagacaggatggatggtgcggtcaccagtgtaaccatcaaatcggagatcctgccagcttcacttcagtccgccactgccagacccacttccaggctaaatagattacctgagctggaattggaagcaattgataaccaatttggacaaccaggaacaggcgatcagattccatggacaaataatacagtgacagctataaatcagagtaaatcagaagaccagtgtattagctcacaattagatgagcttctctgtccacccacaacagtagaagggagaaatgatgagaaggctcttcttgaacagctggtatccttccttagtggcaaagatgaaactgagctagctgaactagacagagctctgggaattgacaaacttgttcaggggggtggattagatgtattatcagagagatttccaccacaacaagcaacgccacctttgatcatggaagaaagacccaacctttattcccagccttactcttctccttctcctactgccaatctccctagccctttccaaggcatggtcaggcaaaaaccttcactggggacgatgcctgttcaagtaacacctccccgaggtgctttttcacctggcatgggcatgcagcccaggcaaactctaaacagacctccggctgcacctaaccagcttcgacttcaactacagcagcgattacagggacaacagcagttgatacaccaaaatcggcaagctatcttaaaccagtttgcagcaactgctcctgttggcatcaatatgagatcaggcatgcaacagcaaattacacctcagccacccctgaatgctcaaatgttggcacaacgtcagcgggaactgtacagtcaacagcaccgacagaggcagctaatacagcagcaaagagccatgcttatgaggcagcaaagctttgggaacaacctccctccctcatctggactaccagttcaaatggggaacccccgtcttcctcagggtgctccacagcaattcccctatccaccaaactatggtacaaatccaggaaccccacctgcttctaccagcccgttttcacaactagcagcaaatcctgaagcatccttggccaaccgcaacagcatggtgagcagaggcatgacaggaaacataggaggacagtttggcactggaatcaatcctcagatgcagcagaatgtcttccagtatccaggagcaggaatggttccccaaggtgaggccaactttgctccatctctaagccctgggagctccatggtgccgatgccaatccctcctcctcagagttctcttctccagcaaactccacctgcctccgggtatcagtcaccagacatgaaggcctggcagcaaggagcgataggaaacaacaatgtgttcagtcaagctgtccagaaccagcccacgcctgcacagccaggagtatacaacaacatgagcatcaccgtttccatggcaggtggaaatacgaatgttcagaacatgaacccaatgatggcccagatgcagatgagctctttgcagatgccaggaatgaacactgtgtgccctgagcagataaatgatcccgcactgagacacacaggcctctactgcaaccagctctcatccactgaccttctcaaaacagaagcagatggaacccaggtgcaacaggttcaggtgtttgctgacgtccagtgtacagtgaatctggtaggcggggacccttacctgaaccagcctggtccactgggaactcaaaagcccacgtcaggaccacagaccccccaggcccagcagaagagcctccttcagcagctactgactgaataaccacttttaaaggaatgtgaaatttaaataatagacatacagagatatacaaatatattatatatttttctgagatttttgatatctcaatctgcagccattcttcaggtcgtagcatttggagcaaaaaaaaaaaaaaaaaaaaaaaaaggagtttgcttttgtcgggagattgaaagatgtttttgtttctttctttgtaaaggccttggatattgaaaaaataccaaggcagaacagttggacaatctatttcttgagccaaatttaattattcttatttttgtaatcagtcattggcttcttatctggatgaaggcttttggaggagaaccaaaacgacaagttccaagaagaagatgaagctccgcctccgccgcttagtcccaaccctgcccaggaagaagggcccgtggggctttgcctgtgcccgtccaccaaaggctgtcatgtgtctcgaaatcagcagccctccccatcccaatcccaggcagcttgtgtgtacaatcagcttctctagcaactctgtatctgttggcttcaagagaatattttgcctccacatatgtaccccttctcctttttttaaagatggatttaaaccaagatgcctccaggaaagaggacgaaatgagtatattcacagaggaatccaaaaaatacagtttgggggaaaatgcaataatttttgatgagatgggtgaaggacaagaagtgagttgtgtcaattattgtagatacaattttctgattaaatctggaaaaataaaaggcagcctgttttttctgcttttattgtattaacagctgaggtagctaaagttatttaaaataaaattaaatttatgatccaagtagcttatttttccctttaaatctcattgtaaatatatttgatttcttgtagaaattgatttccttctgtttaattttatgcttttattatactcttgatttttctaaatttgtgtgtgaaatataacattgattgaattgcagttacatttggttagtaatatttcattattttaataactgtgatgtcatgtatggatttactttggggttcaaatcaaaatgtcactgccagaaagagctgttccagctgatctagagcatactgccctagagtgtccctgggatcatctgaacagaagtgcacaggctacttgtacagagaaaaaattaatactcaaaggaaatcttcattttttagattgactttgggaatttgaattttcatcagtgcaaatataaatttctctatcctgctctgaggctaattggtaccatattttccctttgtgtcttgtgactctgccacatcccatctcatcctggcctctgagtcaagaacccagtgaactgactttctagttctagaagttccgctgcaaggccaggaaagcttgagaaaggtattgtggaagaagcaaaggtagacccccatcactcacctttgtctgcatccctgggcctgtgaatgatgacagcacctgacattctgcaccagctacctctgcctccatggcagagaaaaggccataagaacagtggaagaggagcatggactcagacttcaaggaagaagccatttccccaggtccttccttctgcatctcaccacccctagttacaaataactccattgaacagcatctattcagaaactatgccgaataaaaagattggtggaagggctcatgtggttagcaactatgaaacagaaataggacactcagttacaaacattatctcctttagtttttcagaaaatgcatccctgatttcattcatttccagcttgaaagccagccatattactctagtccctaccaaactgctctagaaggtcatttccattttgtttgtgatatttagacgcgcagacttcaggaagttcacctttaacttcagcattccagatgaagtttcctgactcagtgcttttgcataaggaactagaaaaaaaaagtaaggaaaattggagatgctaacatcctcccccatcccaactgcaccttaaaatatgcatgtcaccttcaaggttttataattgcactgtttgttttatgtatgtacagattaaaattattgctacatttgaggaaaataaaattgcttgcttctatgtaattcctgtcattccacaggaaattcacttttccagctactgaatagaatttgtttaacaacctcatgggttgcctcttcatttacagggaagaaatgaaatgtacatctgcagaaattgccaaagcccaaattaacgagtattataaaaggataataaagcatccctgaagccaaa

SEQ ID NO: 160753 - DNA, 7405 bp, Homo sapiens
  Payload ID: 11414
  Gene Symbol: NCOA1
  Gene Name: nuclear receptor coactivator 1
  Uniprot ID: Q15788
  ENST ID: ENST00000405141
  CDS Start-End: 712-4911
gaatctcgcctgccgggaccgcgaaatgggggcgaccgcggcgtccctctccgtcggcgcagccctcgacggcgcttgggtttgaccccggcgcgcttgctcgccccttctcccgagaaggggtttcggaggagcagaggtttaataggcaagagaaagagaaaggaaaacagctctctctctaatgagagagaggggacttcggagaggaaaagaggacaggagatacggcaatcgtggataggaaaggaggaaattacgatagaaaagttggagatccttttgctaacacccctttgggcagttggatgctgagatctatccatactaatggaaatgtaactggaactgactctgatgataaaatcaaggaccatcaagcaagatcatgcagtaggcaactttgcttccaaaagaagttaccaacatttagaatttctacttattctgaggttccagttacagctatatcagagaatgagttaatctcctcagaaatcactaaatactactctgaggggcttagaaattaacaggttgtttatataattggccttaaatgaggtgagagtgaagagactagagccatctctggaaaacatcattatcccattccccgggaagctaccctctggaactcaagatttgaccatatctgttttgaggattcattatgaacaaagaagtctcccaggtgtgaagtttttcaacatgagtggcctcggggacagttcatccgaccctgctaacccagactcacataagaggaaaggatcgccatgtgacacactggcatcaagcacggaaaagaggcgcagggagcaagaaaataaatatttagaagaactagctgagttactgtctgccaacattagtgacattgacagcttgagtgtaaaaccagacaaatgcaagattttgaagaaaacagtcgatcagatacagctaatgaagagaatggaacaagagaaatcaacaactgatgacgatgtacagaaatcagacatctcatcaagtagtcaaggagtgatagaaaaggaatccttgggacctcttcttttggaggctttggatggatttttctttgttgtgaactgtgaagggagaattgtatttgtgtcagagaatgtaaccagctacttaggttacaatcaggaggaattaatgaatacgagcgtctacagcatactgcacgtgggggatcatgcagaatttgtgaagaatctgctaccaaaatcactagtaaatggagttccttggcctcaagaggcaacacgacgaaatagccatacctttaactgcaggatgctaattcaccctccagatgagccagggaccgagaaccaagaagcttgccagcgttatgaagtaatgcagtgtttcactgtgtcacagccaaaatcaattcaagaggatggagaagatttccagtcatgtctgatttgtattgcacggcgattacctcggcctccagctattacgggtgtagaatcctttatgaccaagcaagatactacaggtaaaatcatctctattgatactagttccctgagagctgctggcagaactggttgggaagatttagtgaggaagtgcatttatgcttttttccaacctcagggcagagaaccatcttatgccagacagctgttccaagaagtgatgactcgtggcactgcctccagcccctcctatagattcatattgaatgatgggacaatgcttagcgcccacaccaagtgtaaactttgctaccctcaaagtccagacatgcaacctttcatcatgggaattcatatcatcgacagggagcacagtgggctttctcctcaagatgacactaattctggaatgtcaattccccgagtaaatccctcggtcaatcctagtatctctccagctcatggtgtggctcgttcatccacattgccaccatccaacagcaacatggtatccaccagaataaaccgccagcagagctcagaccttcatagcagcagtcatagtaattctagcaacagccaaggaagtttcggatgctcacccggaagtcagattgtagccaatgttgccttaaaccaaggacaggccagttcacagagcagtaatccctctttaaacctcaataattctcctatggaaggtacaggaatatccctagcacagttcatgtctccaaggagacaggttacttctggattggcaacaaggcccaggatgccaaacaattcctttcctcctaatatttcgacattaagctctcccgttggcatgacaagtagtgcctgtaataataataaccgatcttattcaaacatcccagtaacatctttacagggtatgaatgaaggacccaataactccgttggcttctctgccagttctccagtcctcaggcagatgagctcacagaattcacctagcagattaaatatacaaccagcaaaagctgagtccaaagataacaaagagattgcctcaattttaaatgaaatgattcaatctgacaacagctctagtgatggcaaacctctggattcagggcttctgcataacaatgacagactttcagatggagacagtaaatactctcaaaccagtcacaaactagtgcagcttttgacaacaactgccgaacagcagttacggcatgctgatatagacacaagctgcaaagatgtcctgtcttgcacaggcacttccaactctgcctctgctaactcttcaggaggttcttgtccctcttctcatagctcattgacagaacggcataaaattctacaccggctcttacaggagggtagcccctcagatatcaccactttgtctgtcgagcctgataaaaaggacagtgcatctacttctgtgtcagtgactggacaggtacaaggaaactccagtataaaactagaactggatgcttcaaagaaaaaagaatcaaaagaccatcagctcctacgctatcttttagataaagatgagaaagatttaagatcaactccaaacctgagcctggatgatgtaaaggtgaaagtggaaaagaaagaacagatggatccatgtaatacaaacccaaccccaatgaccaaacccactcctgaggaaataaaactggaggcccagagccagtttacagctgaccttgaccagtttgatcagttactgcccacgctggagaaggcagcacagttgccaggcttatgtgagacagacaggatggatggtgcggtcaccagtgtaaccatcaaatcggagatcctgccagcttcacttcagtccgccactgccagacccacttccaggctaaatagattacctgagctggaattggaagcaattgataaccaatttggacaaccaggaacaggcgatcagattccatggacaaataatacagtgacagctataaatcagagtaaatcagaagaccagtgtattagctcacaattagatgagcttctctgtccacccacaacagtagaagggagaaatgatgagaaggctcttcttgaacagctggtatccttccttagtggcaaagatgaaactgagctagctgaactagacagagctctgggaattgacaaacttgttcaggggggtggattagatgtattatcagagagatttccaccacaacaagcaacgccacctttgatcatggaagaaagacccaacctttattcccagccttactcttctccttctcctactgccaatctccctagccctttccaaggcatggtcaggcaaaaaccttcactggggacgatgcctgttcaagtaacacctccccgaggtgctttttcacctggcatgggcatgcagcccaggcaaactctaaacagacctccggctgcacctaaccagcttcgacttcaactacagcagcgattacagggacaacagcagttgatacaccaaaatcggcaagctatcttaaaccagtttgcagcaactgctcctgttggcatcaatatgagatcaggcatgcaacagcaaattacacctcagccacccctgaatgctcaaatgttggcacaacgtcagcgggaactgtacagtcaacagcaccgacagaggcagctaatacagcagcaaagagccatgcttatgaggcagcaaagctttgggaacaacctccctccctcatctggactaccagttcaaatggggaacccccgtcttcctcagggtgctccacagcaattcccctatccaccaaactatggtacaaatccaggaaccccacctgcttctaccagcccgttttcacaactagcagcaaatcctgaagcatccttggccaaccgcaacagcatggtgagcagaggcatgacaggaaacataggaggacagtttggcactggaatcaatcctcagatgcagcagaatgtcttccagtatccaggagcaggaatggttccccaaggtgaggccaactttgctccatctctaagccctgggagctccatggtgccgatgccaatccctcctcctcagagttctcttctccagcaaactccacctgcctccgggtatcagtcaccagacatgaaggcctggcagcaaggagcgataggaaacaacaatgtgttcagtcaagctgtccagaaccagcccacgcctgcacagccaggagtatacaacaacatgagcatcaccgtttccatggcaggtggaaatacgaatgttcagaacatgaacccaatgatggcccagatgcagatgagctctttgcagatgccaggaatgaacactgtgtgccctgagcagataaatgatcccgcactgagacacacaggcctctactgcaaccagctctcatccactgaccttctcaaaacagaagcagatggaacccaggacaagaagacagaagagttcttctctgtggtgactacagactagaggaatgctctacaggtgcaacaggttcaggtgtttgctgacgtccagtgtacagtgaatctggtaggcggggacccttacctgaaccagcctggtccactgggaactcaaaagcccacgtcaggaccacagaccccccaggcccagcagaagagcctccttcagcagctactgactgaataaccacttttaaaggaatgtgaaatttaaataatagacatacagagatatacaaatatattatatatttttctgagatttttgatatctcaatctgcagccattcttcaggtcgtagcatttggagcaaaaaaaaaaaaaaaaaaaaaaaaaggagtttgcttttgtcgggagattgaaagatgtttttgtttctttctttgtaaaggccttggatattgaaaaaataccaaggcagaacagttggacaatctatttcttgagccaaatttaattattcttatttttgtaatcagtcattggcttcttatctggatgaaggcttttggaggagaaccaaaacgacaagttccaagaagaagatgaagctccgcctccgccgcttagtcccaaccctgcccaggaagaagggcccgtggggctttgcctgtgcccgtccaccaaaggctgtcatgtgtctcgaaatcagcagccctccccatcccaatcccaggcagcttgtgtgtacaatcagcttctctagcaactctgtatctgttggcttcaagagaatattttgcctccacatatgtaccccttctcctttttttaaagatggatttaaaccaagatgcctccaggaaagaggacgaaatgagtatattcacagaggaatccaaaaaatacagtttgggggaaaatgcaataatttttgatgagatgggtgaaggacaagaagtgagttgtgtcaattattgtagatacaattttctgattaaatctggaaaaataaaaggcagcctgttttttctgcttttattgtattaacagctgaggtagctaaagttatttaaaataaaattaaatttatgatccaagtagcttatttttccctttaaatctcattgtaaatatatttgatttcttgtagaaattgatttccttctgtttaattttatgcttttattatactcttgatttttctaaatttgtgtgtgaaatataacattgattgaattgcagttacatttggttagtaatatttcattattttaataactgtgatgtcatgtatggatttactttggggttcaaatcaaaatgtcactgccagaaagagctgttccagctgatctagagcatactgccctagagtgtccctgggatcatctgaacagaagtgcacaggctacttgtacagagaaaaaattaatactcaaaggaaatcttcattttttagattgactttgggaatttgaattttcatcagtgcaaatataaatttctctatcctgctctgaggctaattggtaccatattttccctttgtgtcttgtgactctgccacatcccatctcatcctggcctctgagtcaagaacccagtgaactgactttctagttctagaagttccgctgcaaggccaggaaagcttgagaaaggtattgtggaagaagcaaaggtagacccccatcactcacctttgtctgcatccctgggcctgtgaatgatgacagcacctgacattctgcaccagctacctctgcctccatggcagagaaaaggccataagaacagtggaagaggagcatggactcagacttcaaggaagaagccatttccccaggtccttccttctgcatctcaccacccctagttacaaataactccattgaacagcatctattcagaaactatgccgaataaaaagattggtggaagggctcatgtggttagcaactatgaaacagaaataggacactcagttacaaacattatctcctttagtttttcagaaaatgcatccctgatttcattcatttccagcttgaaagccagccatattactctagtccctaccaaactgctctagaaggtcatttccattttgtttgtgatatttagacgcgcagacttcaggaagttcacctttaacttcagcattccagatgaagtttcctgactcagtgcttttgcataaggaactagaaaaaaaaagtaaggaaaattggagatgctaacatcctcccccatcccaactgcaccttaaaatatgcatgtcaccttcaaggttttataattgcactgtttgttttatgtatgtacagattaaaattattgctacatttgaggaaaataaaattgcttgcttctatgtaattcctgtcattccacaggaaattcacttttccagctactgaatagaatttgtttaacaacctcatgggttgcctcttcatttacagggaagaaatgaaatgtacatctgcagaaattgccaaagcccaaattaacgagtattataaaaggataataaagcatccctgaagccaaa

SEQ ID NO: 160754 - DNA, 4745 bp, Homo sapiens
  Payload ID: 11414
  Gene Symbol: NCOA1
  Gene Name: nuclear receptor coactivator 1
  ENST ID: ENST00000407230
  CDS Start-End: 667-4413
tggaaatgtaactggaactgactctgatgataaaatcaaggaccatcaagcaagatcatgcagtaggcaactttgcttccaaaagaagttaccaacatttagaatttctacttattctgaggttccagttacagctatatcagagaatgagttaatctcctcagaaatcactaaatactactctgaggggcttagaaattaacaggttgtttatataattggccttaaatgaggtgagagtgaagagactagagccatctctggaaaacatcattatcccattccccgggaagctaccctctggaactcaagatttgaccatatctgttttgaggattcattatgaacaaagaagtctcccaggtgtgaagtttttcaacatgagtggcctcggggacagttcatccgaccctgctaacccagactcacataagaggaaaggatcgccatgtgacacactggcatcaagagaaatcaacaactgatgacgatgtacagaaatcagacatctcatcaagtagtcaaggagtgatagaaaaggaatccttgggacctcttcttttggaggctttggatggatttttctttgttgtgaactgtgaagggagaattgtatttgtgtcagagaatgtaaccagctacttaggttacaatcaggaggaattaatgaatacgagcgtctacagcatactgcacgtgggggatcatgcagaatttgtgaagaatctgctaccaaaatcactagtaaatggagttccttggcctcaagaggcaacacgacgaaatagccatacctttaactgcaggatgctaattcaccctccagatgagccagggaccgagaaccaagaagcttgccagcgttatgaagtaatgcagtgtttcactgtgtcacagccaaaatcaattcaagaggatggagaagatttccagtcatgtctgatttgtattgcacggcgattacctcggcctccagctattacgggtgtagaatcctttatgaccaagcaagatactacaggtaaaatcatctctattgatactagttccctgagagctgctggcagaactggttgggaagatttagtgaggaagtgcatttatgcttttttccaacctcagggcagagaaccatcttatgccagacagctgttccaagaagtgatgactcgtggcactgcctccagcccctcctatagattcatattgaatgatgggacaatgcttagcgcccacaccaagtgtaaactttgctaccctcaaagtccagacatgcaacctttcatcatgggaattcatatcatcgacagggagcacagtgggctttctcctcaagatgacactaattctggaatgtcaattccccgagtaaatccctcggtcaatcctagtatctctccagctcatggtgtggctcgttcatccacattgccaccatccaacagcaacatggtatccaccagaataaaccgccagcagagctcagaccttcatagcagcagtcatagtaattctagcaacagccaaggaagtttcggatgctcacccggaagtcagattgtagccaatgttgccttaaaccaaggacaggccagttcacagagcagtaatccctctttaaacctcaataattctcctatggaaggtacaggaatatccctagcacagttcatgtctccaaggagacaggttacttctggattggcaacaaggcccaggatgccaaacaattcctttcctcctaatatttcgacattaagctctcccgttggcatgacaagtagtgcctgtaataataataaccgatcttattcaaacatcccagtaacatctttacagggtatgaatgaaggacccaataactccgttggcttctctgccagttctccagtcctcaggcagatgagctcacagaattcacctagcagattaaatatacaaccagcaaaagctgagtccaaagataacaaagagattgcctcaattttaaatgaaatgattcaatctgacaacagctctagtgatggcaaacctctggattcagggcttctgcataacaatgacagactttcagatggagacagtaaatactctcaaaccagtcacaaactagtgcagcttttgacaacaactgccgaacagcagttacggcatgctgatatagacacaagctgcaaagatgtcctgtcttgcacaggcacttccaactctgcctctgctaactcttcaggaggttcttgtccctcttctcatagctcattgacagaacggcataaaattctacaccggctcttacaggagggtagcccctcagatatcaccactttgtctgtcgagcctgataaaaaggacagtgcatctacttctgtgtcagtgactggacaggtacaaggaaactccagtataaaactagaactggatgcttcaaagaaaaaagaatcaaaagaccatcagctcctacgctatcttttagataaagatgagaaagatttaagatcaactccaaacctgagcctggatgatgtaaaggtgaaagtggaaaagaaagaacagatggatccatgtaatacaaacccaaccccaatgaccaaacccactcctgaggaaataaaactggaggcccagagccagtttacagctgaccttgaccagtttgatcagttactgcccacgctggagaaggcagcacagttgccaggcttatgtgagacagacaggatggatggtgcggtcaccagtgtaaccatcaaatcggagatcctgccagcttcacttcagtccgccactgccagacccacttccaggctaaatagattacctgagctggaattggaagcaattgataaccaatttggacaaccaggaacaggcgatcagattccatggacaaataatacagtgacagctataaatcagagtaaatcagaagaccagtgtattagctcacaattagatgagcttctctgtccacccacaacagtagaagggagaaatgatgagaaggctcttcttgaacagctggtatccttccttagtggcaaagatgaaactgagctagctgaactagacagagctctgggaattgacaaacttgttcaggggggtggattagatgtattatcagagagatttccaccacaacaagcaacgccacctttgatcatggaagaaagacccaacctttattcccagccttactcttctccttctcctactgccaatctccctagccctttccaaggcatggtcaggcaaaaaccttcactggggacgatgcctgttcaagtaacacctccccgaggtgctttttcacctggcatgggcatgcagcccaggcaaactctaaacagacctccggctgcacctaaccagcttcgacttcaactacagcagcgattacagggacaacagcagttgatacaccaaaatcggcaagctatcttaaaccagtttgcagcaactgctcctgttggcatcaatatgagatcaggcatgcaacagcaaattacacctcagccacccctgaatgctcaaatgttggcacaacgtcagcgggaactgtacagtcaacagcaccgacagaggcagctaatacagcagcaaagagccatgcttatgaggcagcaaagctttgggaacaacctccctccctcatctggactaccagttcaaatggggaacccccgtcttcctcagggtgctccacagcaattcccctatccaccaaactatggtacaaatccaggaaccccacctgcttctaccagcccgttttcacaactagcagcaaatcctgaagcatccttggccaaccgcaacagcatggtgagcagaggcatgacaggaaacataggaggacagtttggcactggaatcaatcctcagatgcagcagaatgtcttccagtatccaggagcaggaatggttccccaaggtgaggccaactttgctccatctctaagccctgggagctccatggtgccgatgccaatccctcctcctcagagttctcttctccagcaaactccacctgcctccgggtatcagtcaccagacatgaaggcctggcagcaaggagcgataggaaacaacaatgtgttcagtcaagctgtccagaaccagcccacgcctgcacagccaggagtatacaacaacatgagcatcaccgtttccatggcaggtggaaatacgaatgttcagaacatgaacccaatgatggcccagatgcagatgagctctttgcagatgccaggaatgaacactgtgtgccctgagcagataaatgatcccgcactgagacacacaggcctctactgcaaccagctctcatccactgaccttctcaaaacagaagcagatggaacccaggacaagaagacagaagagttcttctctgtggtgactacagactagaggaatgctctagtgcaacaggttcaggtgtttgctgacgtccagtgtacagtgaatctggtaggcggggacccttacctgaaccagcctggtccactgggaactcaaaagcccacgtcaggaccacagaccccccaggcccagcagaagagcctccttcagcagctactgactgaataaccacttttaaaggaatgtgaaatttaaataatagacatacagagatatacaaatatattatatatttttctgagatttttgatatctcaatctgcagccattcttcaggtcgtagcatttggagcaaaaaaaaaaaaaaaaaaaaaaaaagg

SEQ ID NO: 160755 - DNA, 7289 bp, Homo sapiens
  Payload ID: 11414
  Gene Symbol: NCOA1
  Gene Name: nuclear receptor coactivator 1
  Uniprot ID: Q15788
  ENST ID: ENST00000406961
  CDS Start-End: 653-4978
gcggccgcctgcccggcgtggggagcgggcgccccgggccgccgccgagagggggagccggaagtcggcgcgggcgcccctcggccccgacgacgccgtgaccttggccggcccgctcacctctcggaatctcgcctgccgggaccgcgaaatgggggcgaccgcggcgtccctctccgtcggcgcagccctcgacggcgcttgggtttgaccccggcgcgcttgctcgccccttctcccgagaaggggtttcggagatctatccatactaatggaaatgtaactggaactgactctgatgataaaatcaaggaccatcaagcaagatcatgcagtaggcaactttgcttccaaaagaagttaccaacatttagaatttctacttattctgaggttccagttacagctatatcagagaatgagttaatctcctcagaaatcactaaatactactctgaggggcttagaaattaacaggttgtttatataattggccttaaatgaggtgagagtgaagagactagagccatctctggaaaacatcattatcccattccccgggaagctaccctctggaactcaagatttgaccatatctgttttgaggattcattatgaacaaagaagtctcccaggtgtgaagtttttcaacatgagtggcctcggggacagttcatccgaccctgctaacccagactcacataagaggaaaggatcgccatgtgacacactggcatcaagcacggaaaagaggcgcagggagcaagaaaataaatatttagaagaactagctgagttactgtctgccaacattagtgacattgacagcttgagtgtaaaaccagacaaatgcaagattttgaagaaaacagtcgatcagatacagctaatgaagagaatggaacaagagaaatcaacaactgatgacgatgtacagaaatcagacatctcatcaagtagtcaaggagtgatagaaaaggaatccttgggacctcttcttttggaggctttggatggatttttctttgttgtgaactgtgaagggagaattgtatttgtgtcagagaatgtaaccagctacttaggttacaatcaggaggaattaatgaatacgagcgtctacagcatactgcacgtgggggatcatgcagaatttgtgaagaatctgctaccaaaatcactagtaaatggagttccttggcctcaagaggcaacacgacgaaatagccatacctttaactgcaggatgctaattcaccctccagatgagccagggaccgagaaccaagaagcttgccagcgttatgaagtaatgcagtgtttcactgtgtcacagccaaaatcaattcaagaggatggagaagatttccagtcatgtctgatttgtattgcacggcgattacctcggcctccagctattacgggtgtagaatcctttatgaccaagcaagatactacaggtaaaatcatctctattgatactagttccctgagagctgctggcagaactggttgggaagatttagtgaggaagtgcatttatgcttttttccaacctcagggcagagaaccatcttatgccagacagctgttccaagaagtgatgactcgtggcactgcctccagcccctcctatagattcatattgaatgatgggacaatgcttagcgcccacaccaagtgtaaactttgctaccctcaaagtccagacatgcaacctttcatcatgggaattcatatcatcgacagggagcacagtgggctttctcctcaagatgacactaattctggaatgtcaattccccgagtaaatccctcggtcaatcctagtatctctccagctcatggtgtggctcgttcatccacattgccaccatccaacagcaacatggtatccaccagaataaaccgccagcagagctcagaccttcatagcagcagtcatagtaattctagcaacagccaaggaagtttcggatgctcacccggaagtcagattgtagccaatgttgccttaaaccaaggacaggccagttcacagagcagtaatccctctttaaacctcaataattctcctatggaaggtacaggaatatccctagcacagttcatgtctccaaggagacaggttacttctggattggcaacaaggcccaggatgccaaacaattcctttcctcctaatatttcgacattaagctctcccgttggcatgacaagtagtgcctgtaataataataaccgatcttattcaaacatcccagtaacatctttacagggtatgaatgaaggacccaataactccgttggcttctctgccagttctccagtcctcaggcagatgagctcacagaattcacctagcagattaaatatacaaccagcaaaagctgagtccaaagataacaaagagattgcctcaattttaaatgaaatgattcaatctgacaacagctctagtgatggcaaacctctggattcagggcttctgcataacaatgacagactttcagatggagacagtaaatactctcaaaccagtcacaaactagtgcagcttttgacaacaactgccgaacagcagttacggcatgctgatatagacacaagctgcaaagatgtcctgtcttgcacaggcacttccaactctgcctctgctaactcttcaggaggttcttgtccctcttctcatagctcattgacagaacggcataaaattctacaccggctcttacaggagggtagcccctcagatatcaccactttgtctgtcgagcctgataaaaaggacagtgcatctacttctgtgtcagtgactggacaggtacaaggaaactccagtataaaactagaactggatgcttcaaagaaaaaagaatcaaaagaccatcagctcctacgctatcttttagataaagatgagaaagatttaagatcaactccaaacctgagcctggatgatgtaaaggtgaaagtggaaaagaaagaacagatggatccatgtaatacaaacccaaccccaatgaccaaacccactcctgaggaaataaaactggaggcccagagccagtttacagctgaccttgaccagtttgatcagttactgcccacgctggagaaggcagcacagttgccaggcttatgtgagacagacaggatggatggtgcggtcaccagtgtaaccatcaaatcggagatcctgccagcttcacttcagtccgccactgccagacccacttccaggctaaatagattacctgagctggaattggaagcaattgataaccaatttggacaaccaggaacaggcgatcagattccatggacaaataatacagtgacagctataaatcagagtaaatcagaagaccagtgtattagctcacaattagatgagcttctctgtccacccacaacagtagaagggagaaatgatgagaaggctcttcttgaacagctggtatccttccttagtggcaaagatgaaactgagctagctgaactagacagagctctgggaattgacaaacttgttcaggggggtggattagatgtattatcagagagatttccaccacaacaagcaacgccacctttgatcatggaagaaagacccaacctttattcccagccttactcttctccttctcctactgccaatctccctagccctttccaaggcatggtcaggcaaaaaccttcactggggacgatgcctgttcaagtaacacctccccgaggtgctttttcacctggcatgggcatgcagcccaggcaaactctaaacagacctccggctgcacctaaccagcttcgacttcaactacagcagcgattacagggacaacagcagttgatacaccaaaatcggcaagctatcttaaaccagtttgcagcaactgctcctgttggcatcaatatgagatcaggcatgcaacagcaaattacacctcagccacccctgaatgctcaaatgttggcacaacgtcagcgggaactgtacagtcaacagcaccgacagaggcagctaatacagcagcaaagagccatgcttatgaggcagcaaagctttgggaacaacctccctccctcatctggactaccagttcaaatggggaacccccgtcttcctcagggtgctccacagcaattcccctatccaccaaactatggtacaaatccaggaaccccacctgcttctaccagcccgttttcacaactagcagcaaatcctgaagcatccttggccaaccgcaacagcatggtgagcagaggcatgacaggaaacataggaggacagtttggcactggaatcaatcctcagatgcagcagaatgtcttccagtatccaggagcaggaatggttccccaaggtgaggccaactttgctccatctctaagccctgggagctccatggtgccgatgccaatccctcctcctcagagttctcttctccagcaaactccacctgcctccgggtatcagtcaccagacatgaaggcctggcagcaaggagcgataggaaacaacaatgtgttcagtcaagctgtccagaaccagcccacgcctgcacagccaggagtatacaacaacatgagcatcaccgtttccatggcaggtggaaatacgaatgttcagaacatgaacccaatgatggcccagatgcagatgagctctttgcagatgccaggaatgaacactgtgtgccctgagcagataaatgatcccgcactgagacacacaggcctctactgcaaccagctctcatccactgaccttctcaaaacagaagcagatggaacccagcaggtgcaacaggttcaggtgtttgctgacgtccagtgtacagtgaatctggtaggcggggacccttacctgaaccagcctggtccactgggaactcaaaagcccacgtcaggaccacagaccccccaggcccagcagaagagcctccttcagcagctactgactgaataaccacttttaaaggaatgtgaaatttaaataatagacatacagagatatacaaatatattatatatttttctgagatttttgatatctcaatctgcagccattcttcaggtcgtagcatttggagcaaaaaaaaaaaaaaaaaaaaaaaaaggagtttgcttttgtcgggagattgaaagatgtttttgtttctttctttgtaaaggccttggatattgaaaaaataccaaggcagaacagttggacaatctatttcttgagccaaatttaattattcttatttttgtaatcagtcattggcttcttatctggatgaaggcttttggaggagaaccaaaacgacaagttccaagaagaagatgaagctccgcctccgccgcttagtcccaaccctgcccaggaagaagggcccgtggggctttgcctgtgcccgtccaccaaaggctgtcatgtgtctcgaaatcagcagccctccccatcccaatcccaggcagcttgtgtgtacaatcagcttctctagcaactctgtatctgttggcttcaagagaatattttgcctccacatatgtaccccttctcctttttttaaagatggatttaaaccaagatgcctccaggaaagaggacgaaatgagtatattcacagaggaatccaaaaaatacagtttgggggaaaatgcaataatttttgatgagatgggtgaaggacaagaagtgagttgtgtcaattattgtagatacaattttctgattaaatctggaaaaataaaaggcagcctgttttttctgcttttattgtattaacagctgaggtagctaaagttatttaaaataaaattaaatttatgatccaagtagcttatttttccctttaaatctcattgtaaatatatttgatttcttgtagaaattgatttccttctgtttaattttatgcttttattatactcttgatttttctaaatttgtgtgtgaaatataacattgattgaattgcagttacatttggttagtaatatttcattattttaataactgtgatgtcatgtatggatttactttggggttcaaatcaaaatgtcactgccagaaagagctgttccagctgatctagagcatactgccctagagtgtccctgggatcatctgaacagaagtgcacaggctacttgtacagagaaaaaattaatactcaaaggaaatcttcattttttagattgactttgggaatttgaattttcatcagtgcaaatataaatttctctatcctgctctgaggctaattggtaccatattttccctttgtgtcttgtgactctgccacatcccatctcatcctggcctctgagtcaagaacccagtgaactgactttctagttctagaagttccgctgcaaggccaggaaagcttgagaaaggtattgtggaagaagcaaaggtagacccccatcactcacctttgtctgcatccctgggcctgtgaatgatgacagcacctgacattctgcaccagctacctctgcctccatggcagagaaaaggccataagaacagtggaagaggagcatggactcagacttcaaggaagaagccatttccccaggtccttccttctgcatctcaccacccctagttacaaataactccattgaacagcatctattcagaaactatgccgaataaaaagattggtggaagggctcatgtggttagcaactatgaaacagaaataggacactcagttacaaacattatctcctttagtttttcagaaaatgcatccctgatttcattcatttccagcttgaaagccagccatattactctagtccctaccaaactgctctagaaggtcatttccattttgtttgtgatatttagacgcgcagacttcaggaagttcacctttaacttcagcattccagatgaagtttcctgactcagtgcttttgcataaggaactagaaaaaaaaagtaaggaaaattggagatgctaacatcctcccccatcccaactgcaccttaaaatatgcatgtcaccttcaaggttttataattgcactgtttgttttatgtatgtacagattaaaattattgctacatttgaggaaaataaaattgcttgcttctatgtaattcctgtcattccacaggaaattcacttttccagctactgaatagaatttgtttaacaacctcatgggttgcctcttcatttacagggaagaaatgaaatgtacatctgcagaaattgccaaagcccaaattaacgagtattataaaaggataataaagcatccctgaagccaaa

SEQ ID NO: 160756 - DNA, 8447 bp, Homo sapiens
  Payload ID: 11415
  Gene Symbol: NCOA2
  Gene Name: nuclear receptor coactivator 2
  Uniprot ID: Q15596
  ENST ID: ENST00000452400
  CDS Start-End: 183-4577
agttattaacacgggaacatggcggccgcagcctcggctacagcttcggcggcgaaggtcagcgccgacggcagccggcacctgacggcgtgaccgacccgagccgatttctcttggatttggctacacacttatagatcttctgcactgtttacaggcacagttgctgatatgtgttcaagatgagtgggatgggagaaaatacctctgacccctccagggcagagacaagaaagcgcaaggaatgtcctgaccaacttggacccagccccaaaaggaacactgaaaaacgtaatcgtgaacaggaaaataaatatatagaagaacttgcagagttgatttttgcaaattttaatgatatagacaactttaacttcaaacctgacaaatgtgcaatcttaaaagaaactgtgaagcaaattcgtcagatcaaagaacaagagaaagcagcagctgccaacatagatgaagtgcagaagtcagatgtatcctctacagggcagggtgtcatcgacaaggatgcgctggggcctatgatgcttgaggcccttgatgggttcttctttgtagtgaacctggaaggcaacgttgtgtttgtgtcagagaatgtgacacagtatctaaggtataaccaagaagagctgatgaacaaaagtgtatatagcatcttgcatgttggggaccacacggaatttgtcaaaaacctgctgccaaagtctatagtaaatgggggatcttggtctggcgaacctccgaggcggaacagccataccttcaattgtcggatgctggtaaaacctttacctgattcagaagaggagggtcatgataaccaggaagctcatcagaaatatgaaactatgcagtgcttcgctgtctctcaaccaaagtccatcaaagaagaaggagaagatttgcagtcctgcttgatttgcgtggcaagaagagttcccatgaaggaaagaccagttcttccctcatcagaaagttttactactcgccaggatctccaaggcaagatcacgtctctggataccagcaccatgagagcagccatgaaaccaggctgggaggacctggtaagaaggtgtattcagaagttccatgcgcagcatgaaggagaatctgtgtcctatgctaagaggcatcatcatgaagtactgagacaaggattggcattcagtcaaatctatcgtttttccttgtctgatggcactcttgttgctgcacaaacgaagagcaaactcatccgttctcagactactaatgaacctcaacttgtaatatctttacatatgcttcacagagagcagaatgtgtgtgtgatgaatccggatctgactggacaaacgatggggaagccactgaatccaattagctctaacagccctgcccatcaggccctgtgcagtgggaacccaggtcaggacatgaccctcagtagcaatataaattttcccataaatggcccaaaggaacaaatgggcatgcccatgggcaggtttggtggttctgggggaatgaaccatgtgtcaggcatgcaagcaaccactcctcagggtagtaactatgcactcaaaatgaacagcccctcacaaagcagccctggcatgaatccaggacagcccacctccatgctttcaccaaggcatcgcatgagccctggagtggctggcagccctcgaatcccacccagtcagttttcccctgcaggaagcttgcattcccctgtgggagtttgcagcagcacaggaaatagccatagttataccaacagctccctcaatgcacttcaggccctcagcgaggggcacggggtctcattagggtcatcgttggcttcaccagacctaaaaatgggcaatttgcaaaactccccagttaatatgaatcctcccccactcagcaagatgggaagcttggactcaaaagactgttttggactatatggggagccctctgaaggtacaactggacaagcagagagcagctgccatcctggagagcaaaaggaaacaaatgaccccaacctgcccccggccgtgagcagtgagagagctgacgggcagagcagactgcatgacagcaaagggcagaccaaactcctgcagctgctgaccaccaaatctgatcagatggagccctcgcccttagccagctctttgtcggatacaaacaaagactccacaggtagcttgcctggttctgggtctacacatggaacctcgctcaaggagaagcataaaattttgcacagactcttgcaggacagcagttcccctgtggacttggccaagttaacagcagaagccacaggcaaagacctgagccaggagtccagcagcacagctcctggatcagaagtgactattaaacaagagccggtgagccccaagaagaaagagaatgcactacttcgctatttgctagataaagatgatactaaagatattggtttaccagaaataacccccaaacttgagagactggacagtaagacagatcctgccagtaacacaaaattaatagcaatgaaaactgagaaggaggagatgagctttgagcctggtgaccagcctggcagtgagctggacaacttggaggagattttggatgatttgcagaatagtcaattaccacagcttttcccagacacgaggccaggcgcccctgctggatcagttgacaagcaagccatcatcaatgacctcatgcaactcacagctgaaaacagccctgtcacacctgttggagcccagaaaacagcactgcgaatttcacagagcacttttaataacccacgaccagggcaactgggcaggttattgccaaaccagaatttaccacttgacatcacattgcaaagcccaactggtgctggacctttcccaccaatcagaaacagtagtccctactcagtgatacctcagccaggaatgatgggtaatcaagggatgataggaaaccaaggaaatttagggaacagtagcacaggaatgattggtaacagtgcttctcggcctactatgccatctggagaatgggcaccgcagagttcggctgtgagagtcacctgtgctgctaccaccagtgccatgaaccggccagtccaaggaggtatgattcggaacccagcagccagcatccccatgaggcccagcagccagcctggccaaagacagacgcttcagtctcaggtcatgaatatagggccatctgaattagagatgaacatggggggacctcagtatagccaacaacaagctcctccaaatcagactgccccatggcctgaaagcatcctgcctatagaccaggcgtcttttgccagccaaaacaggcagccatttggcagttctccagatgacttgctatgtccacatcctgcagctgagtctccgagtgatgagggagctctcctggaccagctgtatctggccttgcggaattttgatggcctggaggagattgatagagccttaggaatacccgaactggtcagccagagccaagcagtagatccagaacagttctcaagtcaggattccaacatcatgctggagcagaaggcgcccgttttcccacagcagtatgcatctcaggcacaaatggcccagggtagctattctcccatgcaagatccaaactttcacaccatgggacagcggcctagttatgccacactccgtatgcagcccagaccgggcctcaggcccacgggcctagtgcagaaccagccaaatcaactaagacttcaacttcagcatcgcctccaagcacagcagaatcgccagccacttatgaatcaaatcagcaatgtttccaatgtgaacttgactctgaggcctggagtaccaacacaggcacctattaatgcacagatgctggcccagagacagagggaaatcctgaaccagcatcttcgacagagacaaatgcatcagcaacagcaagttcagcaacgaactttgatgatgagaggacaagggttgaatatgacaccaagcatggtggctcctagtggtatgccagcaactatgagcaaccctcggattccccaggcaaatgcacagcagtttccatttcctccaaactacggaataagtcagcaacctgatccaggctttactggggctacgactccccagagcccacttatgtcaccccgaatggcacatacacagagtcccatgatgcaacagtctcaggccaacccagcctatcaggccccctccgacataaatggatgggcgcaggggaacatgggcggaaacagcatgttttcccagcagtccccaccacactttgggcagcaagcaaacaccagcatgtacagtaacaacatgaacatcaatgtgtccatggcgaccaacacaggtggcatgagcagcatgaaccagatgacaggacagatcagcatgacctcagtgacctccgtgcctacgtcagggctgtcctccatgggtcccgagcaggttaatgatcctgctctgaggggaggcaacctgttcccaaaccagctgcctggaatggatatgattaagcaggagggagacacaacacggaaatattgctgacactgctgaagccagttgcttcttcagctgaccgggctcacttgctcaaaacacttccagtctggagagctgtgtctatttgtttcaacccaactgacctgccagccggttctgctagagcagacaggcctggccctggttcccagggtggcgtccactcggctgtggcaggaggagctgcctcttctcttgacagtctgaagctcgcatccagacagtcgctcagtctgttcactgcattcaccttagtgcaacttagatctctcctgcaaaagtaaatgttgacaggcaaatttcatacccatgtcagattgaatgtatttaaatgtatgtatttaaggagaaccatgctcttgttctgttcctgttcggttccagacactggtttcttgctttgttttccctggctaacagtctagtgcaaaagattaagattttatctgggggaaagaaaagaattttttaaaaaattaaactaaagatgttttaagctaaagcctgaatttgggatggaagcaggacagacaccgtggacagcgctgtatttacagacacacccagtgcgtgaagaccaacaaagtcacagtcgtatctctagaaagctctaaagaccatgttggaaagagtctccagttactgaacagatgaaaaggagcctgtgagagggctgttaacattagcaaatattttttccttgttttttctttgttaaaaccaaactggttcacctgaatcatgaattgagaagaaataattttcatttctaaattaagtcccttttagtttgatcagacagcttgaatcagcatctcttcttccctgtcagcctgactcttcccttcccctctctcattccccatactccctattttcattccttttttaaaaaataatataagctacagaaaccaggtaagccctttatttccttaaatgttttgccagccacttaccaattgctaagtattgaatttcagaaaaaaaaaatgcatttactggcaaggagaagagcaaagttaaggcttgataccaatcgagctaaggatacctgctttggaagcatgtttattctgttccccagcaactctggcctccaaaatgggagaaaacgccagtgtgtttaaattgatagcagatatcacgacagatttaacctctgccatgtgttttttattttgttttttagcagtgctgactaagccgaagttttgtaaggtacataaaatccaatttatatgtaaacaagcaataatttaagttgagaacttatgtgttttaattgtataatttttgtgaggtatacatattgtggaattgactcaaaaatgaggtacttcagtattaaattagatatcttcatagcaatgtctcctaaaggtgttttgtaaaggatatcaatgccttgattagacctaatttgtagacttaagactttttattttctaaaccttgtgattctgcttataagtcatttatctaatctatatgatatgcagccgctgtaggaaccaattcttgatttttatatgtttatattctttcttaatgaaccttagaaagactacatgttactaagcaggccacttttatggttgtttttcttgcccactctggtaggggaaaaatcttttattaataggtgtcagtttcagacaactccaataccaagaaactgatgaccttttttgagctatttctccttaacccctaatacctttcttacctaaatttcagaatgatatctttttgatgtctaaaaagcaaagcattttataatatctcattagccaggctttttaggaacagagaagtttttccttgaaatttgattgtttgtttatttgtggcagggtgaaaaatgtacaaactacccctatttatacttatatctctctctatatgtacgcattatggaaatataggaagagatatagcccaaagatagatggtaagtagacagtctgaaaatgttgctccatactaaagaacctttctggaaatttgcatttcgctacttttttccacttgagaggggtctcaatacagggaggtggccaaggaacaacacttctcagtggccaccagttcatatatcccctcaaaaggctctacttttctccaccaaaccattgggttgcccaactgtgatggaaaaaacaagcagatgttggcccagaactccaggacctccccgtgggctgaggctcatgtggcatacaattcagtgtgaccagttttaatgttcagaaatatgtgaattagaatgacttttaacttcacacagcacaaaagagaaatggagtttaaactggatttgttttgttttgagtttcaagtcccttttcactacaacaccgtccaaaactatctacctatctcttcttttttatccatctgcccgctgtattttaatgtcaatcctaattcagacaaatccgcaacttcatgatactggtaatttataataattcgtgatcattgctgttttgaaggaaaagagatgataaattctcttacggtttcaatcaggtaatggattttgttttacatctagttaggagaagaaaagtaagtgaaggaatcctctgatcatattgatcactatagaagcaaaagccaaatcagttcccttcattatcagtatttctcatgctgtacacaataaatttgttagactgagtacttggtttttgtttaatagaacaaataatcagtgtttcacttatattactaaatgtgaaaaacataatgtgaaaagtatacatacattaacttggttgtaaaactcattttaagtgttcatgtaatgtggtaagtttaaaaagtgaagtgagctgttttactacaatgaattcgtttgactcaaagattaaaatgcccctccccctatgtgtatctcttatggcctgtaataattgaaagcaatgtttttgcagtttatataatgcaatttttaatctgtgttcaaaaatggagttcatatgggcttaacacatgaaatgggtggcacagatccacttgcagaacccaaagatacacaatcagttttgaaatgcaacttaagccattaattgttggtgtgaatttaaaattttctagtgtttgtatggtggtatgctgcctaagagcaaagcatcctctgcacaaaagaaaattactgtagtggcttcgattttaattagaattttctccctggtgtttctttatagactaaagcaaaatcttttaagtttcttactacaggtaaaagctatgtgcaagaacctcaaaatgctaaaatctagcataatgccttagatctgtttttaagtcttgtatattcctacatagctgtccgatgtattatatttgtatagtgaattgtgtacaatttttgaataagtgcatcatcacttaacctttatgttgtttgaatagtgatgatgatacatttcttcagacatttaactgtcatttttttcctttgtcatttgtgagttttatttgtacagttcctcatgaagttgcatctgagatgtgtgtatatgaaaagattatacaagggtaaaattaagcaatatattaactatggttcttcaggagaaagcttacagtgtttcaggttgtgatttattttcaaaatggagttgactctgaacatcactttgttcacctgcattgatgtttgtatttctagtgtgagcagtttatgcaaaggtagatatattcagagaaattttaaatacatttatgcaagttaatattgctttgctgatgctatttgcttatttgatgttaaataatgctattgtaaataaagaattctgttgttattgcatcatttaataaattttaatgccttcgggttttacatggctttagagattttaa

SEQ ID NO: 160757 - DNA, 1834 bp, Homo sapiens
  Payload ID: 11415
  Gene Symbol: NCOA2
  Gene Name: nuclear receptor coactivator 2
  ENST ID: ENST00000518363
  CDS Start-End: 1-1771
ggaggagattttggatgatttgcagaatagtcaattaccacagcttttcccagacacgaggccaggcgcccctgctggatcagttgacaagcaagccatcatcaatgacctcatgcaactcacagctgaaaacagccctgtcacacctgttggagcccagaaaacagcactgcgaatttcacagagcagaatgattggtaacagtgcttctcggcctactatgccatctggagaatgggcaccgcagagttcggctgtgagagtcacctgtgctgctaccaccagtgccatgaaccggccagtccaaggaggtatgattcggaacccagcagccagcatccccatgaggcccagcagccagcctggccaaagacagacgcttcagtctcaggtcatgaatatagggccatctgaattagagatgaacatggggggacctcagtatagccaacaacaagctcctccaaatcagactgccccatggcctgaaagcatcctgcctatagaccaggcgtcttttgccagccaaaacaggcagccatttggcagttctccagatgacttgctatgtccacatcctgcagctgagtctccgagtgatgagggagctctcctggaccagctgtatctggccttgcggaattttgatggcctggaggagattgatagagccttaggaatacccgaactggtcagccagagccaagcagtagatccagaacagttctcaagtcaggattccaacatcatgctggagcagaaggcgcccgttttcccacagcagtatgcatctcaggcacaaatggcccagggtagctattctcccatgcaagatccaaactttcacaccatgggacagcggcctagttatgccacactccgtatgcagcccagaccgggcctcaggcccacgggcctagtgcagaaccagccaaatcaactaagacttcaacttcagcatcgcctccaagcacagcagaatcgccagccacttatgaatcaaatcagcaatgtttccaatgtgaacttgactctgaggcctggagtaccaacacaggcacctattaatgcacagatgctggcccagagacagagggaaatcctgaaccagcatcttcgacagagacaaatgcatcagcaacagcaagttcagcaacgaactttgatgatgagaggacaagggttgaatatgacaccaagcatggtggctcctagtggtatgccagcaactatgagcaaccctcggattccccaggcaaatgcacagcagtttccatttcctccaaactacggaataagtcagcaacctgatccaggctttactggggctacgactccccagagcccacttatgtcaccccgaatggcacatacacagagtcccatgatgcaacagtctcaggccaacccagcctatcaggccccctccgacataaatggatgggcgcaggggaacatgggcggaaacagcatgttttcccagcagtccccaccacactttgggcagcaagcaaacaccagcatgtacagtaacaacatgaacatcaatgtgtccatggcgaccaacacaggtggcatgagcagcatgaaccagatgacaggacagatcagcatgacctcagtgacctccgtgcctacgtcagggctgtcctccatgggtcccgagcaggttaatgatcctgctctgaggggaggcaacctgttcccaaaccagctgcctggaatggatatgattaagcaggagggagacacaacacggaaatattgctgacactgctgaagccagttgcttcttcagctgaccgggctcacttgctcaaaacacttccagtct

SEQ ID NO: 160758 - DNA, 6087 bp, Homo sapiens
  Payload ID: 11415
  Gene Symbol: NCOA2
  Gene Name: nuclear receptor coactivator 2
  ENST ID: ENST00000518287
  CDS Start-End: 343-3183
gagtcatggagacgctgagagccagctactcttgtccatccccgagtcacccgctccttgatttctggggttgtgtcacttataggggctccgacccgcagaggctgccgaggcactcgaggtcctgtatgtctttcgtaccgaaatagacgttgtcttagacacgacgaagtctaaagccactttaggatgtggcagtaactcaccgaggccggtttctaaaatggcatatgctgtagtgatcatgtcctggacctcagcgtccgatttctcttggatttggctacacacttatagatcttctgcactgtttacaggcacagttgctgatatgtgttcaagatgagtgggatgggagaaaatacctctgacccctccagggcagagacaagaaagcgcaaggaatgtcctgaccaacttggacccagccccaaaaggaacactgaaaaacgtaatcgtgaacaggaaaataaatatatagaagaacttgcagagttgatttttgcaaattttaatgatatagacaactttaacttcaaacctgacaaatgtgcaatcttaaaagaaactgtgaagcaaattcgtcagatcaaagaacaagagaaagcagcagctgccaacatagatgaagtgcagaagtcagatgtatcctctacagggcagggtgtcatcgacaaggatgcgctggggcctatgatgcttgaggcccttgatgggttcttctttgtagtgaacctggaaggcaacgttgtgtttgtgtcagagaatgtgacacagtatctaaggtataaccaagaagagctgatgaacaaaagtgtatatagcatcttgcatgttggggaccacacggaatttgtcaaaaacctgctgccaaagtctatagtaaatgggggatcttggtctggcgaacctccgaggcggaacagccataccttcaattgtcggatgctggtaaaacctttacctgattcagaagaggagggtcatgataaccaggaagctcatcagaaatatgaaactatgcagtgcttcgctgtctctcaaccaaagtccatcaaagaagaaggagaagatttgcagtcctgcttgatttgcgtggcaagaagagttcccatgaaggaaagaccagttcttccctcatcagaaagttttactactcgccaggatctccaaggcaagatcacgtctctggataccagcaccatgagagcagccatgaaaccaggctgggaggacctggtaagaaggtgtattcagaagttccatgcgcagcatgaaggagaatctgtgtcctatgctaagaggcatcatcatgaagtactgagacaaggattggcattcagtcaaatctatcgtttttccttgtctgatggcactcttgttgctgcacaaacgaagagcaaactcatccgttctcagactactaatgaacctcaacttgtaatatctttacatatgcttcacagagagcagaatgtgtgtgtgatgaatccggatctgactggacaaacgatggggaagccactgaatccaattagctctaacagccctgcccatcaggccctgtgcagtgggaacccaggtcaggacatgaccctcagtagcaatataaattttcccataaatggcccaaaggaacaaatgggcatgcccatgggcaggtttggtggttctgggggaatgaaccatgtgtcaggcatgcaagcaaccactcctcagggtagtaactatgcactcaaaatgaacagcccctcacaaagcagccctggcatgaatccaggacagcccacctccatgctttcaccaaggcatcgcatgagccctggagtggctggcagccctcgaatcccacccagtcagttttcccctgcaggaagcttgcattcccctgtgggagtttgcagcagcacaggaaatagccatagttataccaacagctccctcaatgcacttcaggccctcagcgaggggcacggggtctcattagggtcatcgttggcttcaccagacctaaaaatgggcaatttgcaaaactccccagttaatatgaatcctcccccactcagcaagatgggaagcttggactcaaaagactgttttggactatatggggagccctctgaaggtacaactggacaagcagagagcagctgccatcctggagagcaaaaggaaacaaatgaccccaacctgcccccggccgtgagcagtgagagagctgacgggcagagcagactgcatgacagcaaagggcagaccaaactcctgcagctgctgaccaccaaatctgatcagatggagccctcgcccttagccagctctttgtcggatacaaacaaagactccacaggtagcttgcctggttctgggtctacacatggaacctcgctcaaggagaagcataaaattttgcacagactcttgcaggacagcagttcccctgtggacttggccaagttaacagcagaagccacaggcaaagacctgagccaggagtccagcagcacagctcctggatcagaagtgactattaaacaagagccggtgagccccaagaagaaagagaatgcactacttcgctatttgctagataaagatgatactaaagatattggtttaccagaaataacccccaaacttgagagactggacagtaagacagatcctgccagtaacacaaaattaatagcaatgaaaactgagaaggaggagatgagctttgagcctggtgaccagcctggcagtgagctggacaacttggaggagattttggatgatttgcagaatagtcaattaccacagcttttcccagacacgaggccaggcgcccctgctggatcagttgacaagcaagccatcatcaatgacctcatgcaactcacagctgaaaacagccctgtcacacctgttggagcccagaaaacagcactgcgaatttcacagagcagaatgattggtaacagtgcttctcggcctactatgccatctggagaatgggcaccgcagagttcggctgtgagagtcacctgtgctgctaccaccagtgccatgaaccggccagtccaaggaggtatgattcggaacccagcagccagcatccccatgaggcccagcagccagcctggccaaagacagacgcttcagtctcaggtcatgaatataggtaagggccatctgaattagagatgaacatggggggacctcagtatagccaacaacaagctcctccaaatcagactgccccatggcctgaaagcatcctgcctatagaccaggcgtcttttgccagccaaaacaggcagccatttggcagttctccagatgacttgctatgtccacatcctgcagctgagtctccgagtgatgagggagctctcctggaccagctgtatctggccttgcggaattttgatggcctggaggagattgatagagccttaggaatacccgaactggtcagccagagccaagcagtagatccagaacagttctcaagtcaggattccaacatcatgctggagcagaaggcgcccgttttcccacagcagtatgcatctcaggcacaaatggcccagggtagctattctcccatgcaagatccaaactttcacaccatgggacagcggcctagttatgccacactccgtatgcagcccagaccgggcctcaggcccacgggcctagtgcagaaccagccaaatcaactaagacttcaacttcagcatcgcctccaagcacagcagaatcgccagccacttatgaatcaaatcagcaatgtttccaatgtgaacttgactctgaggcctggagtaccaacacaggcacctattaatgcacagatgctggcccagagacagagggaaatcctgaaccagcatcttcgacagagacaaatgcatcagcaacagcaagttcagcaacgaactttgatgatgagaggacaagggttgaatatgacaccaagcatggtggctcctagtggtatgccagcaactatgagcaaccctcggattccccaggcaaatgcacagcagtttccatttcctccaaactacggaataagtcagcaacctgatccaggctttactggggctacgactccccagagcccacttatgtcaccccgaatggcacatacacagagtcccatgatgcaacagtctcaggccaacccagcctatcaggccccctccgacataaatggatgggcgcaggggaacatgggcggaaacagcatgttttcccagcagtccccaccacactttgggcagcaagcaaacaccagcatgtacagtaacaacatgaacatcaatgtgtccatggcgaccaacacaggtggcatgagcagcatgaaccagatgacaggacagatcagcatgacctcagtgacctccgtgcctacgtcagggctgtcctccatgggtcccgagcaggtgagtgcccaaggagaagcaacccagtggcttcatatcacggctttttttctacttctgcatcaaatatatctttccataaatattgctgacactgctgaagccagttgcttcttcagctgaccgggctcacttgctcaaaacacttccagtctggagagctgtgtctatttgtttcaacccaactgacctgccagccggttctgctagagcagacaggcctggccctggttcccagggtggcgtccactcggctgtggcaggaggagctgcctcttctcttgacagtctgaagctcgcatccagacagtcgctcagtctgttcactgcattcaccttagtgcaacttagatctctcctgcaaaagtaaatgttgacaggcaaatttcatacccatgtcagattgaatgtatttaaatgtatgtatttaaggagaaccatgctcttgttctgttcctgttcggttccagacactggtttcttgctttgttttccctggctaacagtctagtgcaaaagattaagattttatctgggggaaagaaaagaattttttaaaaaattaaactaaagatgttttaagctaaagcctgaatttgggatggaagcaggacagacaccgtggacagcgctgtatttacagacacacccagtgcgtgaagaccaacaaagtcacagtcgtatctctagaaagctctaaagaccatgttggaaagagtctccagttactgaacagatgaaaaggagcctgtgagagggctgttaacattagcaaatattttttccttgttttttctttgttaaaaccaaactggttcacctgaatcatgaattgagaagaaataattttcatttctaaattaagtcccttttagtttgatcagacagcttgaatcagcatctcttcttccctgtcagcctgactcttcccttcccctctctcattccccatactccctattttcattccttttttaaaaaataatataagctacagaaaccaggtaagccctttatttccttaaatgttttgccagccacttaccaattgctaagtattgaatttcagaaaaaaaaaatgcatttactggcaaggagaagagcaaagttaaggcttgataccaatcgagctaaggatacctgctttggaagcatgtttattctgttccccagcaactctggcctccaaaatgggagaaaacgccagtgtgtttaaattgatagcagatatcacgacagatttaacctctgccatgtgttttttattttgttttttagcagtgctgactaagccgaagttttgtaaggtacataaaatccaatttatatgtaaacaagcaataatttaagttgagaacttatgtgttttaattgtataatttttgtgaggtatacatattgtggaattgactcaaaaatgaggtacttcagtattaaattagatatcttcatagcaatgtctcctaaaggtgttttgtaaaggatatcaatgccttgattagacctaatttgtagacttaagactttttattttctaaaccttgtgattctgcttataagtcatttatctaatctatatgatatgcagccgctgtaggaaccaattcttgatttttatatgtttatattctttcttaatgaaccttagaaagac

SEQ ID NO: 160759 - DNA, 438 bp, Homo sapiens
  Payload ID: 11415
  Gene Symbol: NCOA2
  Gene Name: nuclear receptor coactivator 2
  ENST ID: ENST00000519724
  CDS Start-End: 389-438
agagcaagcaatagaatagaagcaggaagaattttcgagtgttccaccatgctggattgtcaaagggggatctgtctgatcagcagctaaaaaaggatttgtgtggctagtttgtcagctatcgttagaaacaaatgatagaggagataagcggcggggtgctcagcatgtgcttaggtttacatcaagatgtaatgttggtttgggttaacagaggagatttatctctgaggcaataaatttattgctaattgtgggggtttttgttttgatgagtgatgtatggtatttgtatttacatcactggtgaagataaagagaagctgctgagctctaatatgaactgcagaagctgtggacagttacaagttgctgatatgtgttcaagatgagtgggatgggagaaaatacctctgacccctccagggcagagacaag

SEQ ID NO: 160760 - DNA, 526 bp, Homo sapiens
  Payload ID: 11415
  Gene Symbol: NCOA2
  Gene Name: nuclear receptor coactivator 2
  ENST ID: ENST00000520416
  CDS Start-End: 502-526
ggagggggccggggtcgtcgctgccggctgcgctccccgcctcctcccctcgggggagtcccagaggcgcctcttccgagaccgggggtgggtcggtccctggttagatggcccctccctcttcccctccctctagtggtttccggggcctgcgggaccgaggggcgggaatcggggactggagcccccttccgctggcccggagctggactgggcctcccgcgttctgggtccgtcactggtaggggaaactttcccaaaccagagaccgagcctgaacaccttcctccgccacctcgtcctctaatcccactccctctccacctcctccgacgccttcccctcccaccgacccgaatctcggtgcgtctgactgatggggcagtgagccaatcgaaggcagggagctgacctgccgggtgtcgatttctcttggatttggctacacacttatagatcttctgcactgtttacaggcacagttgctgatatgtgttcaagatgagtgggatgggagaaaatacct

SEQ ID NO: 160761 - DNA, 6750 bp, Homo sapiens
  Payload ID: 11416
  Gene Symbol: NCOA3
  Gene Name: nuclear receptor coactivator 3
  Uniprot ID: Q9Y6Q9
  ENST ID: ENST00000371997
  CDS Start-End: 178-4425
gtggcggccggcggcggctgcgggctgagcggcgagtttccgatttaaagctgagctgcgaggaaaatggcggcgggaggatcaaaatacttgctggatggtggactcagagaccaataaaaataaactgcttgaacatcctttgactggttagccagttgctgatgtatattcaagatgagtggattaggagaaaacttggatccactggccagtgattcacgaaaacgcaaattgccatgtgatactccaggacaaggtcttacctgcagtggtgaaaaacggagacgggagcaggaaagtaaatatattgaagaattggctgagctgatatctgccaatcttagtgatattgacaatttcaatgtcaaaccagataaatgtgcgattttaaaggaaacagtaagacagatacgtcaaataaaagagcaaggaaaaactatttccaatgatgatgatgttcaaaaagccgatgtatcttctacagggcagggagttattgataaagactccttaggaccgcttttacttcaggcattggatggtttcctatttgtggtgaatcgagacggaaacattgtatttgtatcagaaaatgtcacacaatacctgcaatataagcaagaggacctggttaacacaagtgtttacaatatcttacatgaagaagacagaaaggattttcttaagaatttaccaaaatctacagttaatggagtttcctggacaaatgagacccaaagacaaaaaagccatacatttaattgccgtatgttgatgaaaacaccacatgatattctggaagacataaacgccagtcctgaaatgcgccagagatatgaaacaatgcagtgctttgccctgtctcagccacgagctatgatggaggaaggggaagatttgcaatcttgtatgatctgtgtggcacgccgcattactacaggagaaagaacatttccatcaaaccctgagagctttattaccagacatgatctttcaggaaaggttgtcaatatagatacaaattcactgagatcctccatgaggcctggctttgaagatataatccgaaggtgtattcagagattttttagtctaaatgatgggcagtcatggtcccagaaacgtcactatcaagaagttaccagtgatgggatattttccccaacagcttatcttaatggccatgcagaaaccccagtatatcgattctcgttggctgatggaactatagtgactgcacagacaaaaagcaaactcttccgaaatcctgtaacaaatgatcgacatggctttgtctcaacccacttccttcagagagaacagaatggatatagaccaaacccaaatcctgttggacaagggattagaccacctatggctggatgcaacagttcggtaggcggcatgagtatgtcgccaaaccaaggcttacagatgccgagcagcagggcctatggcttggcagaccctagcaccacagggcagatgagtggagctaggtatgggggttccagtaacatagcttcattgacccctgggccaggcatgcaatcaccatcttcctaccagaacaacaactatgggctcaacatgagtagccccccacatgggagtcctggtcttgccccaaaccagcagaatatcatgatttctcctcgtaatcgtgggagtccaaagatagcctcacatcagttttctcctgttgcaggtgtgcactctcccatggcatcttctggcaatactgggaaccacagcttttccagcagctctctcagtgccctgcaagccatcagtgaaggtgtggggacttcccttttatctactctgtcatcaccaggccccaaattggataactctcccaatatgaatattacccaaccaagtaaagtaagcaatcaggattccaagagtcctctgggcttttattgcgaccaaaatccagtggagagttcaatgtgtcagtcaaatagcagagatcacctcagtgacaaagaaagtaaggagagcagtgttgagggggcagagaatcaaaggggtcctttggaaagcaaaggtcataaaaaattactgcagttacttacctgttcttctgatgaccggggtcattcctccttgaccaactcccccctagattcaagttgtaaagaatcttctgttagtgtcaccagcccctctggagtctcctcctctacatctggaggagtatcctctacatccaatatgcatgggtcactgttacaagagaagcaccggattttgcacaagttgctgcagaatgggaattcaccagctgaggtagccaagattactgcagaagccactgggaaagacaccagcagtataacttcttgtggggacggaaatgttgtcaagcaggagcagctaagtcctaagaagaaggagaataatgcacttcttagatacctgctggacagggatgatcctagtgatgcactctctaaagaactacagccccaagtggaaggagtggataataaaatgagtcagtgcaccagctccaccattcctagctcaagtcaagagaaagaccctaaaattaagacagagacaagtgaagagggatctggagacttggataatctagatgctattcttggtgatctgactagttctgacttttacaataattccatatcctcaaatggtagtcatctggggactaagcaacaggtgtttcaaggaactaattctctgggtttgaaaagttcacagtctgtgcagtctattcgtcctccatataaccgagcagtgtctctggatagccctgtttctgttggctcaagtcctccagtaaaaaatatcagtgctttccccatgttaccaaagcaacccatgttgggtgggaatccaagaatgatggatagtcaggaaaattatggctcaagtatgggagactggggcttaccaaactcaaaggccggcagaatggaacctatgaattcaaactccatgggaagaccaggaggagattataatacttctttacccagacctgcactgggtggctctattcccacattgcctcttcggtctaatagcataccaggtgcgagaccagtattgcaacagcagcagcagatgcttcaaatgaggcctggtgaaatccccatgggaatgggggctaatccctatggccaagcagcagcatctaaccaactgggttcctggcccgatggcatgttgtccatggaacaagtttctcatggcactcaaaataggcctcttcttaggaattccctggatgatcttgttgggccaccttccaacctggaaggccagagtgacgaaagagcattattggaccagctgcacactcttctcagcaacacagatgccacaggcctggaagaaattgacagagctttgggcattcctgaacttgtcaatcagggacaggcattagagcccaaacaggatgctttccaaggccaagaagcagcagtaatgatggatcagaaggcaggattatatggacagacatacccagcacaggggcctccaatgcaaggaggctttcatcttcagggacaatcaccatcttttaactctatgatgaatcagatgaaccagcaaggcaattttcctctccaaggaatgcacccacgagccaacatcatgagaccccggacaaacacccccaagcaacttagaatgcagcttcagcagaggctgcagggccagcagtttttgaatcagagccgacaggcacttgaattgaaaatggaaaaccctactgctggtggtgctgcggtgatgaggcctatgatgcagccccagcagggttttcttaatgctcaaatggtcgcccaacgcagcagagagctgctaagtcatcacttccgacaacagagggtggctatgatgatgcagcagcagcagcagcagcaacagcagcagcagcagcagcagcagcagcaacagcaacagcaacagcaacagcagcaacagcagcaaacccaggccttcagcccacctcctaatgtgactgcttcccccagcatggatgggcttttggcaggacccacaatgccacaagctcctccgcaacagtttccatatcaaccaaattatggaatgggacaacaaccagatccagcctttggtcgagtgtctagtcctcccaatgcaatgatgtcgtcaagaatgggtccctcccagaatcccatgatgcaacacccgcaggctgcatccatctatcagtcctcagaaatgaagggctggccatcaggaaatttggccaggaacagctccttttcccagcagcagtttgcccaccaggggaatcctgcagtgtatagtatggtgcacatgaatggcagcagtggtcacatgggacagatgaacatgaaccccatgcccatgtctggcatgcctatgggtcctgatcagaaatactgctgacatctctgcaccaggacctcttaaggaaaccactgtacaaatgacactgcactaggattattgggaaggaatcattgttccaggcatccatcttggaagaaaggaccagctttgagctccatcaagggtattttaagtgatgtcatttgagcaggactggattttaagccgaagggcaatatctacgtgtttttcccccctccttctgctgtgtatcatggtgttcaaaacagaaatgttttttggcattccacctcctagggatataattctggagacatggagtgttactgatcataaaacttttgtgtcacttttttctgccttgctagccaaaatctcttaaatacacgtaggtgggccagagaacattggaagaatcaagagagattagaatatctggtttctctagttgcagtattggacaaagagcatagtcccagccttcaggtgtagtagttctgtgttgaccctttgtccagtggaattggtgattctgaattgtcctttactaatggtgttgagttgctctgtccctattatttgccctaggctttctcctaatgaaggttttcatttgccattcatgtcctgtaatacttcacctccaggaactgtcatggatgtccaaatggctttgcagaaaggaaatgagatgacagtatttaatcgcagcagtagcaaacttttcacatgctaatgtgcagctgagtgcactttatttaaaaagaatggataaatgcaatattcttgaggtcttgagggaatagtgaaacacattcctggtttttgcctacacttacgtgttagacaagaactatgatttttttttttaaagtactggtgtcaccctttgcctatatggtagagcaataatgctttttaaaaataaacttctgaaaacccaaggccaggtactgcattctgaatcagaatctcgcagtgtttctgtgaatagatttttttgtaaatatgacctttaagatattgtattatgtaaaatatgtatatacctttttttgtaggtcacaacaactcatttttacagagtttgtgaagctaaatatttaacattgttgatttcagtaagctgtgtggtgaggctaccagtggaagagacatcccttgacttttgtggcctgggggaggggtagtgctccacagcttttccttccccaccccccagccttagatgcctcgctcttttcaatctcttaatctaaatgctttttaaagagattatttgtttagatgtaggcattttaattttttaaaaattcctctaccagaactaagcactttgttaatttggggggaaagaatagatatggggaaataaacttaaaaaaaaatcaggaatttaaaaaaacgagcaatttgaagagaatcttttggattttaagcagtccgaaataatagcaattcatgggctgtgtgtgtgtgtgtatgtgtgtgtgtgtgtgtgtatgtttaattatgttaccttttcatcccctttaggagcgttttcagattttggttgctaagacctgaatcccatattgagatctcgagtagaatccttggtgtggtttctggtgtctgctcagctgtcccctcattctactaatgtgatgctttcattatgtccctgtggattagaatagtgtcagttatttcttaagtaactcagtacccagaacagccagttttactgtgattcagagccacagtctaactgagcaccttttaaacccctccctcttctgccccctaccacttttctgctgttgcctctctttgacacctgttttagtcagttgggaggaagggaaaaatcaagtttaattccctttatctgggttaattcatttggttcaaatagttgacggaattgggtttctgaatgtctgtgaatttcagaggtctctgctagccttggtatcattttctagcaataactgagagccagttaattttaagaatttcacacatttagccaatctttctagatgtctctgaaggtaagatcatttaatatctttgatatgcttacgagtaagtgaatcctgattatttccagacccaccaccagagtggatcttattttcaaagcagtatagacaattatgagtttgccctctttcccctaccaagttcaaaatatatctaagaaagattgtaaatccgaaaacttccattgtagtggcctgtgcttttcagatagtatactctcctgtttggagacagaggaagaaccaggtcagtctgtctctttttcagctcaattgtatctgacccttctttaagttatgtgtgtggggagaaatagaatggtgctcttat

SEQ ID NO: 160762 - DNA, 4668 bp, Homo sapiens
  Payload ID: 11416
  Gene Symbol: NCOA3
  Gene Name: nuclear receptor coactivator 3
  Uniprot ID: Q9Y6Q9
  ENST ID: ENST00000371998
  CDS Start-End: 192-4466
ctgcggcttagtcggtggcggccggcggcggctgcgggctgagcggcgagtttccgatttaaagctgagctgcgaggaaaatggcggcgggaggatcaaaatacttgctggatggtggactcagagaccaataaaaataaactgcttgaacatcctttgactggttagccagttgctgatgtatattcaagatgagtggattaggagaaaacttggatccactggccagtgattcacgaaaacgcaaattgccatgtgatactccaggacaaggtcttacctgcagtggtgaaaaacggagacgggagcaggaaagtaaatatattgaagaattggctgagctgatatctgccaatcttagtgatattgacaatttcaatgtcaaaccagataaatgtgcgattttaaaggaaacagtaagacagatacgtcaaataaaagagcaaggaaaaactatttccaatgatgatgatgttcaaaaagccgatgtatcttctacagggcagggagttattgataaagactccttaggaccgcttttacttcaggcattggatggtttcctatttgtggtgaatcgagacggaaacattgtatttgtatcagaaaatgtcacacaatacctgcaatataagcaagaggacctggttaacacaagtgtttacaatatcttacatgaagaagacagaaaggattttcttaagaatttaccaaaatctacagttaatggagtttcctggacaaatgagacccaaagacaaaaaagccatacatttaattgccgtatgttgatgaaaacaccacatgatattctggaagacataaacgccagtcctgaaatgcgccagagatatgaaacaatgcagtgctttgccctgtctcagccacgagctatgatggaggaaggggaagatttgcaatcttgtatgatctgtgtggcacgccgcattactacaggagaaagaacatttccatcaaaccctgagagctttattaccagacatgatctttcaggaaaggttgtcaatatagatacaaattcactgagatcctccatgaggcctggctttgaagatataatccgaaggtgtattcagagattttttagtctaaatgatgggcagtcatggtcccagaaacgtcactatcaagaagcttatcttaatggccatgcagaaaccccagtatatcgattctcgttggctgatggaactatagtgactgcacagacaaaaagcaaactcttccgaaatcctgtaacaaatgatcgacatggctttgtctcaacccacttccttcagagagaacagaatggatatagaccaaacccaaatcctgttggacaagggattagaccacctatggctggatgcaacagttcggtaggcggcatgagtatgtcgccaaaccaaggcttacagatgccgagcagcagggcctatggcttggcagaccctagcaccacagggcagatgagtggagctaggtatgggggttccagtaacatagcttcattgacccctgggccaggcatgcaatcaccatcttcctaccagaacaacaactatgggctcaacatgagtagccccccacatgggagtcctggtcttgccccaaaccagcagaatatcatgatttctcctcgtaatcgtgggagtccaaagatagcctcacatcagttttctcctgttgcaggtgtgcactctcccatggcatcttctggcaatactgggaaccacagcttttccagcagctctctcagtgccctgcaagccatcagtgaaggtgtggggacttcccttttatctactctgtcatcaccaggccccaaattggataactctcccaatatgaatattacccaaccaagtaaagtaagcaatcaggattccaagagtcctctgggcttttattgcgaccaaaatccagtggagagttcaatgtgtcagtcaaatagcagagatcacctcagtgacaaagaaagtaaggagagcagtgttgagggggcagagaatcaaaggggtcctttggaaagcaaaggtcataaaaaattactgcagttacttacctgttcttctgatgaccggggtcattcctccttgaccaactcccccctagattcaagttgtaaagaatcttctgttagtgtcaccagcccctctggagtctcctcctctacatctggaggagtatcctctacatccaatatgcatgggtcactgttacaagagaagcaccggattttgcacaagttgctgcagaatgggaattcaccagctgaggtagccaagattactgcagaagccactgggaaagacaccagcagtataacttcttgtggggacggaaatgttgtcaagcaggagcagctaagtcctaagaagaaggagaataatgcacttcttagatacctgctggacagggatgatcctagtgatgcactctctaaagaactacagccccaagtggaaggagtggataataaaatgagtcagtgcaccagctccaccattcctagctcaagtcaagagaaagaccctaaaattaagacagagacaagtgaagagggatctggagacttggataatctagatgctattcttggtgatctgactagttctgacttttacaataattccatatcctcaaatggtagtcatctggggactaagcaacaggtgtttcaaggaactaattctctgggtttgaaaagttcacagtctgtgcagtctattcgtcctccatataaccgagcagtgtctctggatagccctgtttctgttggctcaagtcctccagtaaaaaatatcagtgctttccccatgttaccaaagcaacccatgttgggtgggaatccaagaatgatggatagtcaggaaaattatggctcaagtatgggtgggccaaaccgaaatgtgactgtgactcagactccttcctcaggagactggggcttaccaaactcaaaggccggcagaatggaacctatgaattcaaactccatgggaagaccaggaggagattataatacttctttacccagacctgcactgggtggctctattcccacattgcctcttcggtctaatagcataccaggtgcgagaccagtattgcaacagcagcagcagatgcttcaaatgaggcctggtgaaatccccatgggaatgggggctaatccctatggccaagcagcagcatctaaccaactgggttcctggcccgatggcatgttgtccatggaacaagtttctcatggcactcaaaataggcctcttcttaggaattccctggatgatcttgttgggccaccttccaacctggaaggccagagtgacgaaagagcattattggaccagctgcacactcttctcagcaacacagatgccacaggcctggaagaaattgacagagctttgggcattcctgaacttgtcaatcagggacaggcattagagcccaaacaggatgctttccaaggccaagaagcagcagtaatgatggatcagaaggcaggattatatggacagacatacccagcacaggggcctccaatgcaaggaggctttcatcttcagggacaatcaccatcttttaactctatgatgaatcagatgaaccagcaaggcaattttcctctccaaggaatgcacccacgagccaacatcatgagaccccggacaaacacccccaagcaacttagaatgcagcttcagcagaggctgcagggccagcagtttttgaatcagagccgacaggcacttgaattgaaaatggaaaaccctactgctggtggtgctgcggtgatgaggcctatgatgcagccccaggtgagctcccagcagggttttcttaatgctcaaatggtcgcccaacgcagcagagagctgctaagtcatcacttccgacaacagagggtggctatgatgatgcagcagcagcagcagcagcaacagcagcagcagcagcagcagcagcagcaacagcaacagcaacagcaacagcagcaacagcagcaaacccaggccttcagcccacctcctaatgtgactgcttcccccagcatggatgggcttttggcaggacccacaatgccacaagctcctccgcaacagtttccatatcaaccaaattatggaatgggacaacaaccagatccagcctttggtcgagtgtctagtcctcccaatgcaatgatgtcgtcaagaatgggtccctcccagaatcccatgatgcaacacccgcaggctgcatccatctatcagtcctcagaaatgaagggctggccatcaggaaatttggccaggaacagctccttttcccagcagcagtttgcccaccaggggaatcctgcagtgtatagtatggtgcacatgaatggcagcagtggtcacatgggacagatgaacatgaaccccatgcccatgtctggcatgcctatgggtcctgatcagaaatactgctgacatctctgcaccaggacctcttaaggaaaccactgtacaaatgacactgcactaggattattgggaaggaatcattgttccaggcatccatcttggaagaaaggaccagctttgagctccatcaagggtattttaagtgatgtcatttgagcaggactggattttaagccgaagggcaatatctacgtgtttttcccccctc

SEQ ID NO: 160763 - DNA, 7939 bp, Homo sapiens
  Payload ID: 11416
  Gene Symbol: NCOA3
  Gene Name: nuclear receptor coactivator 3
  Uniprot ID: Q9Y6Q9
  ENST ID: ENST00000372004
  CDS Start-End: 217-4479
agccgctccacagcgacggcagcggctgcggcttagtcggtggcggccggcggcggctgcgggctgagcggcgagtttccgatttaaagctgagctgcgaggaaaatggcggcgggaggatcaaaatacttgctggatggtggactcagagaccaataaaaataaactgcttgaacatcctttgactggttagccagttgctgatgtatattcaagatgagtggattaggagaaaacttggatccactggccagtgattcacgaaaacgcaaattgccatgtgatactccaggacaaggtcttacctgcagtggtgaaaaacggagacgggagcaggaaagtaaatatattgaagaattggctgagctgatatctgccaatcttagtgatattgacaatttcaatgtcaaaccagataaatgtgcgattttaaaggaaacagtaagacagatacgtcaaataaaagagcaaggaaaaactatttccaatgatgatgatgttcaaaaagccgatgtatcttctacagggcagggagttattgataaagactccttaggaccgcttttacttcaggcattggatggtttcctatttgtggtgaatcgagacggaaacattgtatttgtatcagaaaatgtcacacaatacctgcaatataagcaagaggacctggttaacacaagtgtttacaatatcttacatgaagaagacagaaaggattttcttaagaatttaccaaaatctacagttaatggagtttcctggacaaatgagacccaaagacaaaaaagccatacatttaattgccgtatgttgatgaaaacaccacatgatattctggaagacataaacgccagtcctgaaatgcgccagagatatgaaacaatgcagtgctttgccctgtctcagccacgagctatgatggaggaaggggaagatttgcaatcttgtatgatctgtgtggcacgccgcattactacaggagaaagaacatttccatcaaaccctgagagctttattaccagacatgatctttcaggaaaggttgtcaatatagatacaaattcactgagatcctccatgaggcctggctttgaagatataatccgaaggtgtattcagagattttttagtctaaatgatgggcagtcatggtcccagaaacgtcactatcaagaagcttatcttaatggccatgcagaaaccccagtatatcgattctcgttggctgatggaactatagtgactgcacagacaaaaagcaaactcttccgaaatcctgtaacaaatgatcgacatggctttgtctcaacccacttccttcagagagaacagaatggatatagaccaaacccaaatcctgttggacaagggattagaccacctatggctggatgcaacagttcggtaggcggcatgagtatgtcgccaaaccaaggcttacagatgccgagcagcagggcctatggcttggcagaccctagcaccacagggcagatgagtggagctaggtatgggggttccagtaacatagcttcattgacccctgggccaggcatgcaatcaccatcttcctaccagaacaacaactatgggctcaacatgagtagccccccacatgggagtcctggtcttgccccaaaccagcagaatatcatgatttctcctcgtaatcgtgggagtccaaagatagcctcacatcagttttctcctgttgcaggtgtgcactctcccatggcatcttctggcaatactgggaaccacagcttttccagcagctctctcagtgccctgcaagccatcagtgaaggtgtggggacttcccttttatctactctgtcatcaccaggccccaaattggataactctcccaatatgaatattacccaaccaagtaaagtaagcaatcaggattccaagagtcctctgggcttttattgcgaccaaaatccagtggagagttcaatgtgtcagtcaaatagcagagatcacctcagtgacaaagaaagtaaggagagcagtgttgagggggcagagaatcaaaggggtcctttggaaagcaaaggtcataaaaaattactgcagttacttacctgttcttctgatgaccggggtcattcctccttgaccaactcccccctagattcaagttgtaaagaatcttctgttagtgtcaccagcccctctggagtctcctcctctacatctggaggagtatcctctacatccaatatgcatgggtcactgttacaagagaagcaccggattttgcacaagttgctgcagaatgggaattcaccagctgaggtagccaagattactgcagaagccactgggaaagacaccagcagtataacttcttgtggggacggaaatgttgtcaagcaggagcagctaagtcctaagaagaaggagaataatgcacttcttagatacctgctggacagggatgatcctagtgatgcactctctaaagaactacagccccaagtggaaggagtggataataaaatgagtcagtgcaccagctccaccattcctagctcaagtcaagagaaagaccctaaaattaagacagagacaagtgaagagggatctggagacttggataatctagatgctattcttggtgatctgactagttctgacttttacaataattccatatcctcaaatggtagtcatctggggactaagcaacaggtgtttcaaggaactaattctctgggtttgaaaagttcacagtctgtgcagtctattcgtcctccatataaccgagcagtgtctctggatagccctgtttctgttggctcaagtcctccagtaaaaaatatcagtgctttccccatgttaccaaagcaacccatgttgggtgggaatccaagaatgatggatagtcaggaaaattatggctcaagtatgggtgggccaaaccgaaatgtgactgtgactcagactccttcctcaggagactggggcttaccaaactcaaaggccggcagaatggaacctatgaattcaaactccatgggaagaccaggaggagattataatacttctttacccagacctgcactgggtggctctattcccacattgcctcttcggtctaatagcataccaggtgcgagaccagtattgcaacagcagcagcagatgcttcaaatgaggcctggtgaaatccccatgggaatgggggctaatccctatggccaagcagcagcatctaaccaactgggttcctggcccgatggcatgttgtccatggaacaagtttctcatggcactcaaaataggcctcttcttaggaattccctggatgatcttgttgggccaccttccaacctggaaggccagagtgacgaaagagcattattggaccagctgcacactcttctcagcaacacagatgccacaggcctggaagaaattgacagagctttgggcattcctgaacttgtcaatcagggacaggcattagagcccaaacaggatgctttccaaggccaagaagcagcagtaatgatggatcagaaggcaggattatatggacagacatacccagcacaggggcctccaatgcaaggaggctttcatcttcagggacaatcaccatcttttaactctatgatgaatcagatgaaccagcaaggcaattttcctctccaaggaatgcacccacgagccaacatcatgagaccccggacaaacacccccaagcaacttagaatgcagcttcagcagaggctgcagggccagcagtttttgaatcagagccgacaggcacttgaattgaaaatggaaaaccctactgctggtggtgctgcggtgatgaggcctatgatgcagccccagcagggttttcttaatgctcaaatggtcgcccaacgcagcagagagctgctaagtcatcacttccgacaacagagggtggctatgatgatgcagcagcagcagcagcagcaacagcagcagcagcagcagcagcagcagcaacagcaacagcaacagcaacagcagcaacagcagcaaacccaggccttcagcccacctcctaatgtgactgcttcccccagcatggatgggcttttggcaggacccacaatgccacaagctcctccgcaacagtttccatatcaaccaaattatggaatgggacaacaaccagatccagcctttggtcgagtgtctagtcctcccaatgcaatgatgtcgtcaagaatgggtccctcccagaatcccatgatgcaacacccgcaggctgcatccatctatcagtcctcagaaatgaagggctggccatcaggaaatttggccaggaacagctccttttcccagcagcagtttgcccaccaggggaatcctgcagtgtatagtatggtgcacatgaatggcagcagtggtcacatgggacagatgaacatgaaccccatgcccatgtctggcatgcctatgggtcctgatcagaaatactgctgacatctctgcaccaggacctcttaaggaaaccactgtacaaatgacactgcactaggattattgggaaggaatcattgttccaggcatccatcttggaagaaaggaccagctttgagctccatcaagggtattttaagtgatgtcatttgagcaggactggattttaagccgaagggcaatatctacgtgtttttcccccctccttctgctgtgtatcatggtgttcaaaacagaaatgttttttggcattccacctcctagggatataattctggagacatggagtgttactgatcataaaacttttgtgtcacttttttctgccttgctagccaaaatctcttaaatacacgtaggtgggccagagaacattggaagaatcaagagagattagaatatctggtttctctagttgcagtattggacaaagagcatagtcccagccttcaggtgtagtagttctgtgttgaccctttgtccagtggaattggtgattctgaattgtcctttactaatggtgttgagttgctctgtccctattatttgccctaggctttctcctaatgaaggttttcatttgccattcatgtcctgtaatacttcacctccaggaactgtcatggatgtccaaatggctttgcagaaaggaaatgagatgacagtatttaatcgcagcagtagcaaacttttcacatgctaatgtgcagctgagtgcactttatttaaaaagaatggataaatgcaatattcttgaggtcttgagggaatagtgaaacacattcctggtttttgcctacacttacgtgttagacaagaactatgatttttttttttaaagtactggtgtcaccctttgcctatatggtagagcaataatgctttttaaaaataaacttctgaaaacccaaggccaggtactgcattctgaatcagaatctcgcagtgtttctgtgaatagatttttttgtaaatatgacctttaagatattgtattatgtaaaatatgtatatacctttttttgtaggtcacaacaactcatttttacagagtttgtgaagctaaatatttaacattgttgatttcagtaagctgtgtggtgaggctaccagtggaagagacatcccttgacttttgtggcctgggggaggggtagtgctccacagcttttccttccccaccccccagccttagatgcctcgctcttttcaatctcttaatctaaatgctttttaaagagattatttgtttagatgtaggcattttaattttttaaaaattcctctaccagaactaagcactttgttaatttggggggaaagaatagatatggggaaataaacttaaaaaaaaatcaggaatttaaaaaaacgagcaatttgaagagaatcttttggattttaagcagtccgaaataatagcaattcatgggctgtgtgtgtgtgtgtatgtgtgtgtgtgtgtgtgtatgtttaattatgttaccttttcatcccctttaggagcgttttcagattttggttgctaagacctgaatcccatattgagatctcgagtagaatccttggtgtggtttctggtgtctgctcagctgtcccctcattctactaatgtgatgctttcattatgtccctgtggattagaatagtgtcagttatttcttaagtaactcagtacccagaacagccagttttactgtgattcagagccacagtctaactgagcaccttttaaacccctccctcttctgccccctaccacttttctgctgttgcctctctttgacacctgttttagtcagttgggaggaagggaaaaatcaagtttaattccctttatctgggttaattcatttggttcaaatagttgacggaattgggtttctgaatgtctgtgaatttcagaggtctctgctagccttggtatcattttctagcaataactgagagccagttaattttaagaatttcacacatttagccaatctttctagatgtctctgaaggtaagatcatttaatatctttgatatgcttacgagtaagtgaatcctgattatttccagacccaccaccagagtggatcttattttcaaagcagtatagacaattatgagtttgccctctttcccctaccaagttcaaaatatatctaagaaagattgtaaatccgaaaacttccattgtagtggcctgtgcttttcagatagtatactctcctgtttggagacagaggaagaaccaggtcagtctgtctctttttcagctcaattgtatctgacccttctttaagttatgtgtgtggggagaaatagaatggtgctcttatctttcttgactttaaaaaaattattaaaaacaaaaaaaaaataaatttttttgcaatcctttcctcagacctggctccaggctaactggaaggcagcactcccttttttatatagtagaaaaatgaagtttattataagtttttatattttctacttgttcatttggtgcaaactcaagatttcttttaataggtgcagtctttgagataatttgtttttacctgtattgccctttatcttttttaggtaattctttgtactcctgctgtctacctctcctcacaccccagcaccccccattttttcaaaccttggtatctgttgggtgaacagtataatcttttcatctgcttttagaatgtgggatatttccagtacctactttttttttttttttttgctgaatccaaagatatataaataaaatatatatattttataaagatcagaatgatataaaggagatacatgtttcttcctttaaaaaataaacggaagttacattgttaatgttcatattatgatgccacttttctaaactgcatctggattgaaaggtgtaaatatcaataacagtgctacttagttatcagtatttaatatctgaggtgagttgggggtatctatattaggggtagggtattacagaagataattggcttgatgtcctagaagttctttgatccagaggtgggtgcagctgaaagtaaacagaatggattgccagttacatgtatgcctgcccagttccctttttatttgcagaagctgtgagttttgttcacaattaggttcctaggagcaaaacctcaaggattgatttattgttttcaactccaaggcacactgttaataaacgagcagggtgttttctctcttcctttctaatatatggagtttcgaagaataaaatatgagagcaatatttaaattctcaggaattgacttatactcttgagaatgaattcagtttcaatcaagtttacattatgttgcttaaaaaaatagaaattattctttatcttgcaaagaattgaaaccacatgaaatgacttatgggggatggtgagctgtgactgctttgctgaccattttggatgtcattgtaaataaaggtttctatttaaaattgga

SEQ ID NO: 160764 - DNA, 1755 bp, Homo sapiens
  Payload ID: 11417
  Gene Symbol: NCOA4
  Gene Name: nuclear receptor coactivator 4
  ENST ID: ENST00000580070
  CDS Start-End: 195-1541
tagtgtggggccgtgtctcagtccacccaaggtctcctcggatcgcctggagaggcactcggacctgactgggcagtttgacccttaagcctgaagattcaactgtcctgctctttgaagctgacacaattactctgcgccagaccatcaccacatttgggtctctcaaaaccattcaaattcctgagcacttgatggctcatgctagttcagcaaatattgggcccttcctggagaagagaggctgtatctccatgccagagcagaagtcagcatccggtattgtagctgtccctttcagcgaatggctccttggaagcaaacctgccagtggttatcaagctccttacatacccagcaccgacccccaggactggcttacccaaaagcagaccttggagaacagtcagacttcttccagagcctgcaatttcttcaataatgtcgggggaaacctaaagggcttagaaaactggctcctcaagagtgaaaaatcaagttatcaaaagtgtaacagccattccactactagttctttctccattgaaatggaaaaggttggagatcaagagcttcctgatcaagatgagatggacctatcagattggctagtgactccccaggaatcccataagctgcggaagcctgagaatggcagtcgtgaaaccagtgagaagtttaagctcttattccagtcctataatgtgaatgattggcttgtcaagactgactcctgtaccaactgtcagggaaaccagcccaaaggtgtggagattgaaaacctgggcaatctgaagtgcctgaatgaccacttggaggccaagaaaccattgtccacccccagcatggttacagaggattggcttgtccagaaccatcaggacccatgtaaggtagaggaggtgtgcagagccaatgagccctgcacaagctttgcagagtgtgtgtgtgatgagaattgtgagaaggaggctctgtataagtggcttctgaagaaagaaggaaaggataaaaatgggatgcctgtggaacccaaacctgagcctgagaagcataaagattccctgaatatgtggctctgtcctagaaaagaagtaatagaacaaactaaagcaccaaaggcaatgactccttctagaattgctgattccttccaagtcataaagaacagccccttgtcggagtggcttatcaggcccccatacaaagaaggaagtcccaaggaagtgcctggtactgaagacagagctggcaaacagaagtttaaaagccccatgaatacttcctggtgttcctttaacacagctgactgggtcctgccaggaaagaagatgggcaacctcagccagttatcttctggagaagacaagtggctgcttcgaaagaaggcccaggaagtattacttaattcacctctacaggaggaacataacttccccccagaccattatggcctccctgcagtttgtgatctctttgcctgtatgcagcttaaagttgataaagagaagtggttatatcgaactcctctacagatgtgaaggaatggacaagagttgagcagcctttctgctgattatcacacatcatgagctgagtgactgcagcttgccaaatctttgtgtttctgggtctgaccaattagcttagttcttctcctgcctaattttgaactagtaaagcaaagtgagtcatcagattatgagttactgtttaaaagaaaaatgctgtttattcatgctgaggtgattcagt

SEQ ID NO: 160765 - DNA, 3549 bp, Homo sapiens
  Payload ID: 11417
  Gene Symbol: NCOA4
  Gene Name: nuclear receptor coactivator 4
  Uniprot ID: Q13772
  ENST ID: ENST00000581486
  CDS Start-End: 204-2048
agagggcagtcaagggcttctggctgacccgagcggagatctcgcgagactgtcagacgtatggcgagaggtgtgggaggaagattgtgttgtcgcgagaactctgcctttgggccgtaggttagtgtggggccgtgtctcagtccacccaaggtctcctcggatcgcctggagaggcactcggacctggagcagtgaggagaatgaataccttccaagaccagagtggcagctccagtaatagagaaccccttttgaggtgtagtgatgcacggagggacttggagcttgctattggtggagttctccgggctgaacagcaaattaaagataacttgcgagaggtcaaagctcagattcacagttgcataagccgtcacctggaatgtcttagaagccgtgaggtatggctgtatgaacaggtggaccttatttatcagcttaaagaggagacacttcaacagcaggctcagcagctctactcgttattgggccagttcaattgtcttactcatcaactggagtgtacccaaaacaaagatctagccaatcaagtctctgtgtgcctggagagactgggcagtttgacccttaagcctgaagattcaactgtcctgctctttgaagctgacacaattactctgcgccagaccatcaccacatttgggtctctcaaaaccattcaaattcctgagcacttgatggctcatgctagttcagcaaatattgggcccttcctggagaagagaggctgtatctccatgccagagcagaagtcagcatccggtattgtagctgtccctttcagcgaatggctccttggaagcaaacctgccagtggttatcaagctccttacatacccagcaccgacccccaggactggcttacccaaaagcagaccttggagaacagtcagacttcttccagagcctgcaatttcttcaataatgtcgggggaaacctaaagggcttagaaaactggctcctcaagagtgaaaaatcaagttatcaaaagtgtaacagccattccactactagttctttctccattgaaatggaaaaggttggagatcaagagcttcctgatcaagatgagatggacctatcagattggctagtgactccccaggaatcccataagctgcggaagcctgagaatggcagtcgtgaaaccagtgagaagtttaagctcttattccagtcctataatgtgaatgattggcttgtcaagactgactcctgtaccaactgtcagggaaaccagcccaaaggtgtggagattgaaaacctgggcaatctgaagtgcctgaatgaccacttggaggccaagaaaccattgtccacccccagcatggttacagaggattggcttgtccagaaccatcaggacccatgtaaggtagaggaggtgtgcagagccaatgagccctgcacaagctttgcagagtgtgtgtgtgatgagaattgtgagaaggaggctctgtataagtggcttctgaagaaagaaggaaaggataaaaatgggatgcctgtggaacccaaacctgagcctgagaagcataaagattccctgaatatgtggctctgtcctagaaaagaagtaatagaacaaactaaagcaccaaaggcaatgactccttctagaattgctgattccttccaagtcataaagaacagccccttgtcggagtggcttatcaggcccccatacaaagaaggaagtcccaaggaagtgcctggtactgaagacagagctggcaaacagaagtttaaaagccccatgaatacttcctggtgttcctttaacacagctgactgggtcctgccaggaaagaagatgggcaacctcagccagttatcttctggagaagacaagtggctgcttcgaaagaaggcccaggaagtattacttaattcacctctacaggaggaacataacttccccccagaccattatggcctccctgcagtttgtgatctctttgcctgtatgcagcttaaagttgataaagagaagtggttatatcgaactcctctacagatgtgaaggaatggacaagagttgagcagcctttctgctgattatcacacatcatgagctgagtgactgcagcttgccaaatctttgtgtttctgggtctgaccaattagcttagttcttctcctgcctaattttgaactagtaaagcaaagtgagtcatcagattatgagttactgtttaaaagaaaaatgctgtttattcatgctgaggtgattcagttccctccttcttacagaagtattttaattcaccccacactagaaatgcagcatctttgtggacgtctttttcacaagcctccaaggctccttagattgggtcgttactaaaagtacattaaaacactcttgtttatcgaagtatattgatgtattctaaagctagtaaacttccctaacgtttaattgccctacagatgcttctcttgctgtgggttttcttttgttagtggtctgaaataattattttcctgttctattaatacatagtgtattttgcacaaaaaaattaacctggtcaatagtgattaccaaaatatatattaataatcttggcaatttttgacattaattatgaaacattttagcccacgttagttctacattattcttcacttaaactcagctactgcaaattttgtctttctgtaaatgttattaaaatatccagtgagctctttagaaggactcagtattatttcaagactatttttgaggtaattctagccttttaaaatattctacagacctacggggcttaaaagaaccccagtaccgactaagcaaataggcaaaagacatgttggaaatgtagtatagtacttgaaacagtcactatcatagggataattggtgcatcctgtgtaaatggaagctgagcttgacacctggtgcttttaagtagggataaagtcatcctctcactgcaagcacagcatacctgtacctccaaaagtgacgttttagtgaacaggccgttttcaacacttgtgccttggggtgttcattgaagctttgtgaaaactactgatgttttctcagtctccttaaagttacgtccatgctttaaaatgtctgtgtaggagagaagtggggtttataatgttttctctaagatatctttgctgctttccagactttgaaactattaagcttcttaactgcctcttaccggaaatacttctggggaaacttcatggtcccaaaatgtcattgccatacagcttcactagagttctttgaaccacagctgaaaagagctttgtattattttttaattccctccccagatatcatttaggagtattatataaaggtggtgggcaaaaacaatgtaaggagcctttccagttatcttgagttgcagctctgtagtttcttgaggccaaacacactgtattttacaagtcaaaatataatttacattaatcactatgttaatgagtatgtaaaacattcttttgcattgatgaattttgtatctgcttccattaaaagcataacagcc

SEQ ID NO: 160766 - DNA, 2124 bp, Homo sapiens
  Payload ID: 11417
  Gene Symbol: NCOA4
  Gene Name: nuclear receptor coactivator 4
  ENST ID: ENST00000585056
  CDS Start-End: 161-1705
aactctgcctttgggccgtaggttagtgtggggccgtgtctcagtccacccaaggtctcctcggatcgcctggagaggcactcggacctggtcaaagctcagattcacagttgcataagccgtcacctggaatgtcttagaagccgtgaggtatggctgtatgaacaggtggaccttatttatcagcttaaagaggagacacttcaacagcaggctcagcagctctactcgactgggcagtttgacccttaagcctgaagattcaactgtcctgctctttgaagctgacacaattactctgcgccagaccatcaccacatttgggtctctcaaaaccattcaaattcctgagcacttgatggctcatgctagttcagcaaatattgggcccttcctggagaagagaggctgtatctccatgccagagcagaagtcagcatccggtattgtagctgtccctttcagcgaatggctccttggaagcaaacctgccagtggttatcaagctccttacatacccagcaccgacccccaggactggcttacccaaaagcagaccttggagaacagtcagacttcttccagagcctgcaatttcttcaataatgtcgggggaaacctaaagggcttagaaaactggctcctcaagagtgaaaaatcaagttatcaaaagtgtaacagccattccactactagttctttctccattgaaatggaaaaggttggagatcaagagcttcctgatcaagatgagatggacctatcagattggctagtgactccccaggaatcccataagctgcggaagcctgagaatggcagtcgtgaaaccagtgagaagtttaagctcttattccagtcctataatgtgaatgattggcttgtcaagactgactcctgtaccaactgtcagggaaaccagcccaaaggtgtggagattgaaaacctgggcaatctgaagtgcctgaatgaccacttggaggccaagaaaccattgtccacccccagcatggttacagaggattggcttgtccagaaccatcaggacccatgtaaggtagaggaggtgtgcagagccaatgagccctgcacaagctttgcagagtgtgtgtgtgatgagaattgtgagaaggaggctctgtataagtggcttctgaagaaagaaggaaaggataaaaatgggatgcctgtggaacccaaacctgagcctgagaagcataaagattccctgaatatgtggctctgtcctagaaaagaagtaatagaacaaactaaagcaccaaaggcaatgactccttctagaattgctgattccttccaagtcataaagaacagccccttgtcggagtggcttatcaggcccccatacaaagaaggaagtcccaaggaagtgcctggtactgaagacagagctggcaaacagaagtttaaaagccccatgaatacttcctggtgttcctttaacacagctgactgggtcctgccaggaaagaagatgggcaacctcagccagttatcttctggagaagacaagtggctgcttcgaaagaaggcccaggaagtattacttaattcacctctacaggaggaacataacttccccccagaccattatggcctccctgcagtttgtgatctctttgcctgtatgcagcttaaagttgataaagagaagtggttatatcgaactcctctacagatgtgaaggaatggacaagagttgagcagcctttctgctgattatcacacatcatgagctgagtgactgcagcttgccaaatctttgtgtttctgggtctgaccaattagcttagttcttctcctgcctaattttgaactagtaaagcaaagtgagtcatcagattatgagttactgtttaaaagaaaaatgctgtttattcatgctgaggtgattcagttccctccttcttacagaagtattttaattcaccccacactagaaatgcagcatctttgtggacgtctttttcacaagcctccaaggctccttagattgggtcgttactaaaagtacattaaaacactcttgtttatcgaagtatattgatgtattctaaagctagtaaacttccctaacgtttaattgccctacagatgcttctc

SEQ ID NO: 160767 - DNA, 2307 bp, Homo sapiens
  Payload ID: 11417
  Gene Symbol: NCOA4
  Gene Name: nuclear receptor coactivator 4
  Uniprot ID: Q13772
  ENST ID: ENST00000578454
  CDS Start-End: 146-2098
ctttgggccgtaggttagtgtggggccgtgtctcagtccacccaaggtctcctcggatcgcctggagaggcactcggacctgttatgtctggacacattgcttcaacatagaacgcacatgaacaatgtggaggtctaggctggaatgggggcccagttgaccacttttgctctagctggagcagtgaggagaatgaataccttccaagaccagagtggcagctccagtaatagagaaccccttttgaggtgtagtgatgcacggagggacttggagcttgctattggtggagttctccgggctgaacagcaaattaaagataacttgcgagaggtcaaagctcagattcacagttgcataagccgtcacctggaatgtcttagaagccgtgaggtatggctgtatgaacaggtggaccttatttatcagcttaaagaggagacacttcaacagcaggctcagcagctctactcgttattgggccagttcaattgtcttactcatcaactggagtgtacccaaaacaaagatctagccaatcaagtctctgtgtgcctggagagactgggcagtttgacccttaagcctgaagattcaactgtcctgctctttgaagctgacacaattactctgcgccagaccatcaccacatttgggtctctcaaaaccattcaaattcctgagcacttgatggctcatgctagttcagcaaatattgggcccttcctggagaagagaggctgtatctccatgccagagcagaagtcagcatccggtattgtagctgtccctttcagcgaatggctccttggaagcaaacctgccagtggttatcaagctccttacatacccagcaccgacccccaggactggcttacccaaaagcagaccttggagaacagtcagacttcttccagagcctgcaatttcttcaataatgtcgggggaaacctaaagggcttagaaaactggctcctcaagagtgaaaaatcaagttatcaaaagtgtaacagccattccactactagttctttctccattgaaatggaaaaggttggagatcaagagcttcctgatcaagatgagatggacctatcagattggctagtgactccccaggaatcccataagctgcggaagcctgagaatggcagtcgtgaaaccagtgagaagtttaagctcttattccagtcctataatgtgaatgattggcttgtcaagactgactcctgtaccaactgtcagggaaaccagcccaaaggtgtggagattgaaaacctgggcaatctgaagtgcctgaatgaccacttggaggccaagaaaccattgtccacccccagcatggttacagaggattggcttgtccagaaccatcaggacccatgtaaggtagaggaggtgtgcagagccaatgagccctgcacaagctttgcagagtgtgtgtgtgatgagaattgtgagaaggaggctctgtataagtggcttctgaagaaagaaggaaaggataaaaatgggatgcctgtggaacccaaacctgagcctgagaagcataaagattccctgaatatgtggctctgtcctagaaaagaagtaatagaacaaactaaagcaccaaaggcaatgactccttctagaattgctgattccttccaagtcataaagaacagccccttgtcggagtggcttatcaggcccccatacaaagaaggaagtcccaaggaagtgcctggtactgaagacagagctggcaaacagaagtttaaaagccccatgaatacttcctggtgttcctttaacacagctgactgggtcctgccaggaaagaagatgggcaacctcagccagttatcttctggagaagacaagtggctgcttcgaaagaaggcccaggaagtattacttaattcacctctacaggaggaacataacttccccccagaccattatggcctccctgcagtttgtgatctctttgcctgtatgcagcttaaagttgataaagagaagtggttatatcgaactcctctacaggcatacttcaaaatgaactttcaagatgtaaccgttgggaattttcagatcccatgtggattctagtagtttatatacctacctcgaagatgtgaaggaatggacaagagttgagcagcctttctgctgattatcacacatcatgagctgagtgactgcagcttgccaaatctttgtgtttctgggtctgaccaattagcttagttcttctcctgcctaattttgaactagtaaagcaaagtgagtcatcagattatgagttactgtttaaaaga

SEQ ID NO: 160768 - DNA, 2211 bp, Homo sapiens
  Payload ID: 11417
  Gene Symbol: NCOA4
  Gene Name: nuclear receptor coactivator 4
  Uniprot ID: Q13772
  ENST ID: ENST00000579039
  CDS Start-End: 154-2046
aactctgcctttgggccgtaggttagtgtggggccgtgtctcagtccacccaaggtctcctcggatcgcctggagaggcactcggacctgttatgtctggacacattgcttcaacatagaacgcacatgaacaatgtggaggtctaggctggaatgggggcccagttgaccacttttgctctagctggagcagtgaggagaatgaataccttccaagaccagagtggcagctccagtaatagagaaccccttttgaggtgtagtgatgcacggagggacttggagcttgctattggtggagttctccgggctgaacagcaaattaaagataacttgcgagaggtcaaagctcagattcacagttgcataagccgtcacctggaatgtcttagaagccgtgaggtatggctgtatgaacaggtggaccttatttatcagcttaaagaggagacacttcaacagcaggctcagcagctctactcgttattgggccagttcaattgtcttactcatcaactggagtgtacccaaaacaaagatctagccaatcaagtctctgtgtgcctggagagactgggcagtttgacccttaagcctgaagattcaactgtcctgctctttgaagctgacacaattactctgcgccagaccatcaccacatttgggtctctcaaaaccattcaaattcctgagcacttgatggctcatgctagttcagcaaatattgggcccttcctggagaagagaggctgtatctccatgccagagcagaagtcagcatccggtattgtagctgtccctttcagcgaatggctccttggaagcaaacctgccagtggttatcaagctccttacatacccagcaccgacccccaggactggcttacccaaaagcagaccttggagaacagtcagacttcttccagagcctgcaatttcttcaataatgtcgggggaaacctaaagggcttagaaaactggctcctcaagagtgaaaaatcaagttatcaaaagtgtaacagccattccactactagttctttctccattgaaatggaaaaggttggagatcaagagcttcctgatcaagatgagatggacctatcagattggctagtgactccccaggaatcccataagctgcggaagcctgagaatggcagtcgtgaaaccagtgagaagtttaagctcttattccagtcctataatgtgaatgattggcttgtcaagactgactcctgtaccaactgtcagggaaaccagcccaaaggtgtggagattgaaaacctgggcaatctgaagtgcctgaatgaccacttggaggccaagaaaccattgtccacccccagcatggttacagaggattggcttgtccagaaccatcaggacccatgtaaggtagaggaggtgtgcagagccaatgagccctgcacaagctttgcagagtgtgtgtgtgatgagaattgtgagaaggaggctctgtataagtggcttctgaagaaagaaggaaaggataaaaatgggatgcctgtggaacccaaacctgagcctgagaagcataaagattccctgaatatgtggctctgtcctagaaaagaagtaatagaacaaactaaagcaccaaaggcaatgactccttctagaattgctgattccttccaagtcataaagaacagccccttgtcggagtggcttatcaggcccccatacaaagaaggaagtcccaaggaagtgcctggtactgaagacagagctggcaaacagaagtttaaaagccccatgaatacttcctggtgttcctttaacacagctgactgggtcctgccaggaaagaagatgggcaacctcagccagttatcttctggagaagacaagtggctgcttcgaaagaaggcccaggaagtattacttaattcacctctacaggaggaacataacttccccccagaccattatggcctccctgcagtttgtgatctctttgcctgtatgcagcttaaagttgataaagagaagtggttatatcgaactcctctacagatgtgaaggaatggacaagagttgagcagcctttctgctgattatcacacatcatgagctgagtgactgcagcttgccaaatctttgtgtttctgggtctgaccaattagcttagttcttctcctgcctaattttgaactagtaaagcaaagtgagtcatcagattatgag

SEQ ID NO: 160769 - DNA, 2371 bp, Homo sapiens
  Payload ID: 11417
  Gene Symbol: NCOA4
  Gene Name: nuclear receptor coactivator 4
  Uniprot ID: Q13772
  ENST ID: ENST00000583565
  CDS Start-End: 230-2074
attgattcaattttacactgtgccaggcattgtggcattccacacaaatggtgagaagctaaaagtgagaaatttggcacaggtgaagaaggctgggtaacacatttgaaagactgctaaacaggtcttgcatgactggcctaagtgcaaagtgaagcagcccatcacgctccagctctccaaatcggagccggcatttcacccatgtgatacaggagcagtgaggagaatgaataccttccaagaccagagtggcagctccagtaatagagaaccccttttgaggtgtagtgatgcacggagggacttggagcttgctattggtggagttctccgggctgaacagcaaattaaagataacttgcgagaggtcaaagctcagattcacagttgcataagccgtcacctggaatgtcttagaagccgtgaggtatggctgtatgaacaggtggaccttatttatcagcttaaagaggagacacttcaacagcaggctcagcagctctactcgttattgggccagttcaattgtcttactcatcaactggagtgtacccaaaacaaagatctagccaatcaagtctctgtgtgcctggagagactgggcagtttgacccttaagcctgaagattcaactgtcctgctctttgaagctgacacaattactctgcgccagaccatcaccacatttgggtctctcaaaaccattcaaattcctgagcacttgatggctcatgctagttcagcaaatattgggcccttcctggagaagagaggctgtatctccatgccagagcagaagtcagcatccggtattgtagctgtccctttcagcgaatggctccttggaagcaaacctgccagtggttatcaagctccttacatacccagcaccgacccccaggactggcttacccaaaagcagaccttggagaacagtcagacttcttccagagcctgcaatttcttcaataatgtcgggggaaacctaaagggcttagaaaactggctcctcaagagtgaaaaatcaagttatcaaaagtgtaacagccattccactactagttctttctccattgaaatggaaaaggttggagatcaagagcttcctgatcaagatgagatggacctatcagattggctagtgactccccaggaatcccataagctgcggaagcctgagaatggcagtcgtgaaaccagtgagaagtttaagctcttattccagtcctataatgtgaatgattggcttgtcaagactgactcctgtaccaactgtcagggaaaccagcccaaaggtgtggagattgaaaacctgggcaatctgaagtgcctgaatgaccacttggaggccaagaaaccattgtccacccccagcatggttacagaggattggcttgtccagaaccatcaggacccatgtaaggtagaggaggtgtgcagagccaatgagccctgcacaagctttgcagagtgtgtgtgtgatgagaattgtgagaaggaggctctgtataagtggcttctgaagaaagaaggaaaggataaaaatgggatgcctgtggaacccaaacctgagcctgagaagcataaagattccctgaatatgtggctctgtcctagaaaagaagtaatagaacaaactaaagcaccaaaggcaatgactccttctagaattgctgattccttccaagtcataaagaacagccccttgtcggagtggcttatcaggcccccatacaaagaaggaagtcccaaggaagtgcctggtactgaagacagagctggcaaacagaagtttaaaagccccatgaatacttcctggtgttcctttaacacagctgactgggtcctgccaggaaagaagatgggcaacctcagccagttatcttctggagaagacaagtggctgcttcgaaagaaggcccaggaagtattacttaattcacctctacaggaggaacataacttccccccagaccattatggcctccctgcagtttgtgatctctttgcctgtatgcagcttaaagttgataaagagaagtggttatatcgaactcctctacagatgtgaaggaatggacaagagttgagcagcctttctgctgattatcacacatcatgagctgagtgactgcagcttgccaaatctttgtgtttctgggtctgaccaattagcttagttcttctcctgcctaattttgaactagtaaagcaaagtgagtcatcagattatgagttactgtttaaaagaaaaatgctgtttattcatgctgaggtgattcagttccctccttcttacagaagtattttaattcaccccacactagaaatgcagcatctttgtggacgtctttttcacaagcctcca

SEQ ID NO: 160770 - DNA, 3489 bp, Homo sapiens
  Payload ID: 11417
  Gene Symbol: NCOA4
  Gene Name: nuclear receptor coactivator 4
  Uniprot ID: Q13772
  ENST ID: ENST00000585132
  CDS Start-End: 141-1985
ctggagttgccgtgtgacgcgtgggcgggacgaggcccgggctcggggacctttcgcactcgggtcaggggtaaagcagcctgtcgcttgccgggcagctggtgagtcggtgacctggcctgtgaggagcagtgaggagaatgaataccttccaagaccagagtggcagctccagtaatagagaaccccttttgaggtgtagtgatgcacggagggacttggagcttgctattggtggagttctccgggctgaacagcaaattaaagataacttgcgagaggtcaaagctcagattcacagttgcataagccgtcacctggaatgtcttagaagccgtgaggtatggctgtatgaacaggtggaccttatttatcagcttaaagaggagacacttcaacagcaggctcagcagctctactcgttattgggccagttcaattgtcttactcatcaactggagtgtacccaaaacaaagatctagccaatcaagtctctgtgtgcctggagagactgggcagtttgacccttaagcctgaagattcaactgtcctgctctttgaagctgacacaattactctgcgccagaccatcaccacatttgggtctctcaaaaccattcaaattcctgagcacttgatggctcatgctagttcagcaaatattgggcccttcctggagaagagaggctgtatctccatgccagagcagaagtcagcatccggtattgtagctgtccctttcagcgaatggctccttggaagcaaacctgccagtggttatcaagctccttacatacccagcaccgacccccaggactggcttacccaaaagcagaccttggagaacagtcagacttcttccagagcctgcaatttcttcaataatgtcgggggaaacctaaagggcttagaaaactggctcctcaagagtgaaaaatcaagttatcaaaagtgtaacagccattccactactagttctttctccattgaaatggaaaaggttggagatcaagagcttcctgatcaagatgagatggacctatcagattggctagtgactccccaggaatcccataagctgcggaagcctgagaatggcagtcgtgaaaccagtgagaagtttaagctcttattccagtcctataatgtgaatgattggcttgtcaagactgactcctgtaccaactgtcagggaaaccagcccaaaggtgtggagattgaaaacctgggcaatctgaagtgcctgaatgaccacttggaggccaagaaaccattgtccacccccagcatggttacagaggattggcttgtccagaaccatcaggacccatgtaaggtagaggaggtgtgcagagccaatgagccctgcacaagctttgcagagtgtgtgtgtgatgagaattgtgagaaggaggctctgtataagtggcttctgaagaaagaaggaaaggataaaaatgggatgcctgtggaacccaaacctgagcctgagaagcataaagattccctgaatatgtggctctgtcctagaaaagaagtaatagaacaaactaaagcaccaaaggcaatgactccttctagaattgctgattccttccaagtcataaagaacagccccttgtcggagtggcttatcaggcccccatacaaagaaggaagtcccaaggaagtgcctggtactgaagacagagctggcaaacagaagtttaaaagccccatgaatacttcctggtgttcctttaacacagctgactgggtcctgccaggaaagaagatgggcaacctcagccagttatcttctggagaagacaagtggctgcttcgaaagaaggcccaggaagtattacttaattcacctctacaggaggaacataacttccccccagaccattatggcctccctgcagtttgtgatctctttgcctgtatgcagcttaaagttgataaagagaagtggttatatcgaactcctctacagatgtgaaggaatggacaagagttgagcagcctttctgctgattatcacacatcatgagctgagtgactgcagcttgccaaatctttgtgtttctgggtctgaccaattagcttagttcttctcctgcctaattttgaactagtaaagcaaagtgagtcatcagattatgagttactgtttaaaagaaaaatgctgtttattcatgctgaggtgattcagttccctccttcttacagaagtattttaattcaccccacactagaaatgcagcatctttgtggacgtctttttcacaagcctccaaggctccttagattgggtcgttactaaaagtacattaaaacactcttgtttatcgaagtatattgatgtattctaaagctagtaaacttccctaacgtttaattgccctacagatgcttctcttgctgtgggttttcttttgttagtggtctgaaataattattttcctgttctattaatacatagtgtattttgcacaaaaaaattaacctggtcaatagtgattaccaaaatatatattaataatcttggcaatttttgacattaattatgaaacattttagcccacgttagttctacattattcttcacttaaactcagctactgcaaattttgtctttctgtaaatgttattaaaatatccagtgagctctttagaaggactcagtattatttcaagactatttttgaggtaattctagccttttaaaatattctacagacctacggggcttaaaagaaccccagtaccgactaagcaaataggcaaaagacatgttggaaatgtagtatagtacttgaaacagtcactatcatagggataattggtgcatcctgtgtaaatggaagctgagcttgacacctggtgcttttaagtagggataaagtcatcctctcactgcaagcacagcatacctgtacctccaaaagtgacgttttagtgaacaggccgttttcaacacttgtgccttggggtgttcattgaagctttgtgaaaactactgatgttttctcagtctccttaaagttacgtccatgctttaaaatgtctgtgtaggagagaagtggggtttataatgttttctctaagatatctttgctgctttccagactttgaaactattaagcttcttaactgcctcttaccggaaatacttctggggaaacttcatggtcccaaaatgtcattgccatacagcttcactagagttctttgaaccacagctgaaaagagctttgtattattttttaattccctccccagatatcatttaggagtattatataaaggtggtgggcaaaaacaatgtaaggagcctttccagttatcttgagttgcagctctgtagtttcttgaggccaaacacactgtattttacaagtcaaaatataatttacattaatcactatgttaatgagtatgtaaaacattcttttgcattgatgaattttgtatctgcttccattaaaagcataacagccata

SEQ ID NO: 160771 - DNA, 3220 bp, Homo sapiens
  Payload ID: 11418
  Gene Symbol: NCOA5
  Gene Name: nuclear receptor coactivator 5
  Uniprot ID: Q9HCD5
  ENST ID: ENST00000290231
  CDS Start-End: 166-1905
cggccgccattgcctcgtgcccgcgccggtcggttggtggcgcctttgtcctacggcgggcaggtgggccgacgcggaggcggcagcggcgggcctgaggcgaaggagcggccgggagcccgccgcgctggtagcgatattaataaggcagcggaaagaagaaatatgaatacggctccatcaagacccagccccacacgaagggatccatatggctttggagacagtcgagattcaaggcgtgatcgatccccaattcgaggaagtccaaggagagagcccagggatggcagaaatggccgggatgcccgggacagcagagacattcgagacccccgagacttgcgggaccacagacatagtagagatttgcgggatcacagagacagcaggagtgtgcgcgacgttcgggacgtgagggatcttagagactttcgtgatctaagagactctagggattttcgagatcagcgagaccccatgtacgacagatacagagacatgagagactcccgagatcctatgtacaggagagaaggctcttatgaccgatacctacgaatggatgactattgcaggagaaaggatgactcttattttgaccgttacagagatagctttgatggacggggccctccaggcccagaaagtcagtctcgtgcaaaagagcgtttgaaacgtgaggaacggcgtagagaagagctttatcgtcaatattttgaggaaatccagagacgctttgatgccgaaaggcccgttgattgttctgtgattgtggtcaacaaacagacaaaagactatgctgagtctgtggggcggaaggtgcgagacctgggcatggtagtggacttgatcttccttaacacagaagtgtcactgtcacaagccttggaggatgttagcaggggaggttctccttttgctattgtcatcacccagcaacaccagattcaccgctcctgcacagtcaacatcatgtttggaaccccgcaagagcatcgcaacatgccccaagcagatgccatggtgctggtggccagaaattatgagcgttacaagaatgagtgccgggagaaggaacgtgaggagattgccagacaggcagccaagatggccgatgaagccatcctgcaggaaagagagagaggaggccctgaggagggagtgcgtgggggccaccctccagccatccagagcctcatcaacctgctggcagacaacaggtacctcactgctgaagagactgacaagatcatcaactacctgcgagagcggaaggagcggctgatgaggagcagcaccgactctctgcctggcccgatttcccgccaaccactcggggcgacctcgggtgcctcgctgaagacacagccaagctcccaaccgctccagagcggccaagtgctcccctctgctacacccactccatctgcaccccccacctcccagcaagagcttcaggccaaaatcctcagcctcttcaatagtggcacagtgacggccaatagcagctctgcatccccctcggttgctgccggaaacaccccaaaccagaatttttccacagcagcaaacagccagcctcaacaaagatcacaggcttctggcaatcagcctccaagcattttgggacagggaggatctgctcagaacatgggccccagacctggggctccttcccaagggctttttggccagccttccagtcgcctggcacctgctagcaacatgactagccagaggcctgtgtcttccacaggtatcaactttgacaatccaagtgtacagaaggctctggataccctgatccagagtggccctgctctctcccacctggttagccagaccacagcacagatggggcagccacaggcccccatgggatcttaccagaggcattactgaagctaaatctttcaactctccccagtcccctcatcccctggcctcctcccacttacttgttctaaatagagctgtttggaggatgttctctgcgctcccaggccggcatcgagtgtcatcaatttctaccacctgctctctcttctgcccaaggctgtgttgcttattccttacaaagtttatactgcatttggggctgtatctttttttgttttttgttttgtagaaaataaatatctccgggggcagtacaggtgtctgggcttgtatttgatggggtttctccggtccctgtttctactggatttggagccaggcccagctagccaagtttggaatggcatttgtcatgtcagtagccaccacctttgttcattgtgaacctaccaaggctttccagcttcatacacattgaccagagctcaagctcctgcctgcaactcctgcctagagttgaagaaaagcaaactggccttggcaggcacagtgtcatcataccctcaccccatatgtttggggtctgcttgaggattcataaatcagccactctggattgttgaggaatggccatggcagccacagaaaaaagaatttttctctctgagccaaggttgttttttgtttttttctcttttcttttttgttttcatttcattggaagatctccaatggactgaacagctccagtcagcagcagttaccacaaactgtgaatctgggccccaccactcttccctgttaaccagttctgtcagcatccccctctccagcagcacttccatgaagttggttctgagactctggccgtgaacacccgtttcttcagtgatttgttttgggcttttggctcaaaaccccaggctcttgtttttgtctagactcttattctgtttcctgagcagcaggaggtagggaccactttgatgtcagacttctggtagctggacatgttctcgagatgggtggctgttcgcgacttttgtaccagagtgaaattgttagaaggagggtttctggctgtggttctaaatggagccccaggaagctgccctctccccagggtttgtgctcagtagagccctgtggatcacagtcttgaggtcctctagcaggggtgagggagagcagcgacttcagctgagtccctgccagtggttaagcaaacaatggtttcaaaattcaaggtccccaaatggcagcattttatgttctgacctgtttgtgttatatagtggttttttttttcctctttggaactcttgtgttgttaataaaatgaaatgattactttttaattaaaatgaaaaaagtaaaa

SEQ ID NO: 160772 - DNA, 727 bp, Homo sapiens
  Payload ID: 11418
  Gene Symbol: NCOA5
  Gene Name: nuclear receptor coactivator 5
  ENST ID: ENST00000372291
  CDS Start-End: 414-727
cggccgccattgcctcgtgcccgcgccggtcggttggtggcgcctttgtcctacggcgggcaggtgggccgacgcggaggcggcagcggcgggcctgaggcgaaggagcggccgggagcccgccgcgctggtagcgggatccatatggctttggagacagtcgagattcaaggcgtgatcgatccccaattcgaggaagtccaaggagagagcccagggatggcagaaatggccgggatgcccgggacagcagagacattcgagacccccgagacttgcgggaccacagacatagtagagatttgcgggatcacagagacagcaggagtgtgcgcgacgttcgggacgtgagggatcttagagactttcgtgatctaagagactctagggattttcgagatcagcgagaccccatgtacgacagatacagagacatgagagactcccgagatcctatgtacaggagagaaggctcttatgaccgatacctacgaatggatgactattgcaggagaaaggatgactcttattttgaccgttacagagatagctttgatggacggggccctccaggcccagaaagtcagtctcgtgcaaaagagcgtttgaaacgtgaggaacggcgtagagaagagctttatcgtcaatattttgaggaaatccagagacgctttgatgccgaaaggcccgttgattgttctgtgattgtggtcaacaaacagacaaa

SEQ ID NO: 160773 - DNA, 7081 bp, Homo sapiens
  Payload ID: 11419
  Gene Symbol: NCOA6
  Gene Name: nuclear receptor coactivator 6
  Uniprot ID: Q14686
  ENST ID: ENST00000359003
  CDS Start-End: 342-6533
ccccctccccgccggctccgtgaggccctgccgggtcgggctgcgggcggccgggcgcgggcggcgggacagacgggcgcacgcgaggactgacggacggacgcaccgagggcggcgggcacgcacggcccgggccggcgctccaaggcccgcccgggagggccggggccgcgctcagaattttgatttggctgctgggctgctaccttgaaatccaagccctaaaaatgccagcttctttggacttagaagatgacctggataaatgataaaaattaagaaagagattttgaagttttcttattgtcctcttggcatatgcttctggaataatattcaccatggttttggatgaccttccaaacttagaagacatctatacttccttgtgttcatcaacaatggaagactcagagatggattttgactctggactagaagatgatgacacaaaaagtgatagtattttggaggattccacaatttttgtggccttcaaaggaaatatagatgataaagacttcaaatggaaattagatgcaatattgaaaaacgtgcccaatttgttacacatggagtccagcaagctaaaagtacagaaggtggagccctggaacagcgtgcgtgtgacattcaacatcccccgggaagcagcggagcggctacggatccttgctcagagcaacaaccagcagcttcgggatttagggattctctccgttcagattgaaggggaaggtgctattaacctggctttggctcagaaccgaagccaagatgtgagaatgaatggacccatgggagctggaaattcagttaggatggaggcgggatttcctatggcaagtggtccaggaataataaggatgaacaaccctgccactgttatgatacccccgggtggaaatgtgtcatcttccatgatggcaccaggccccaatccagagctgcagcccaggactcctcgccctgcttctcagtcagatgcaatggatccactcctctctgggctccatatacagcagcaaagtcatccctcaggatctttagctcccccacatcacccaatgcagcctgtctctgtgaacagacaaatgaacccagctaattttccccagctgcagcagcagcagcaacaacaacaacagcagcagcagcagcagcagcagcaacaacagcaacagcagcaacaacagttgcaggcaagacccccacagcaacatcagcagcaacagccacagggaattcgaccccagtttactgccccaactcaggtgcctgttcctccaggctggaaccagctgccttctggagcccttcaacctcctccagcccagggttctctgggcacaatgactgcaaaccaagggtggaagaaggctcccttgcccggcccaatgcaacagcaactccaggcaagaccatccttagccacggtacagacgccttcccaccctccccctccatatccctttggcagccagcaagcctcacaagcccacacaaactttcctcagatgagcaacccaggccagttcacagctcctcagatgaagagtttgcagggagggccctctagggtcccaactcccttgcagcagccccacctcaccaacaagtctcctgcctcctcaccctcctccttccagcagggatcccctgcatcctccccaacggttaaccaaactcagcagcagatgggaccaaggccacctcaaaataacccacttccccagggatttcagcagcctgtcagctctccgggtcggaatcctatggttcaacagggaaatgtgccacctaacttcatggtgatgcagcagcaaccaccaaaccaggggccacagagtttacatccaggcctaggaggaatgcctaaacgcctcccacctggcttctcagcaggacaggccaatccgaactttatgcaaggtcaggtgccttcgaccacagcaaccacccctgggaattcaggagcccctcagctgcaagcaaatcaaaatgtccagcatgcaggtggtcaaggagctggtcctcctcaaaaccagatgcaggtgtcccacgggccgccaaatatgatgcagcccagcctcatgggaattcatggcaacatgaacaatcagcaggctggtacttctggggttcctcaagtgaacctcagcaacatgcaaggccagccccagcagggcccaccatctcagctgatgggcatgcaccagcaaatcgtgccctcccagggccagatggtccagcaacaaggaaccttgaaccctcagaaccctatgatcctttcaagggcccagcttatgccacagggccagatgatggtgaaccccccgagccaaaatcttgggccctcgccccaaaggatgaccccacccaagcagatgctttcccagcagggcccacaaatgatggcgccacataaccagatgatggggcctcaggggcaggttttgctccaacagaacccaatgatagagcagattatgaccaatcaaatgcaggggaataagcagcagtttaacactcagaaccagtccaatgtcatgccgggaccagcccagataatgaggggaccaactccaaacatgcaaggaaatatggtgcagtttacgggacagatgtcaggacagatgctgccccagcaagggcctgtgaacaacagtccatctcaggttatgggcattcagggacaggtcctgcggccaccagggcccagcccacacatggcccagcagcatggtgatcctgctactacagcaaataacgatgtcagtttatctcagatgatgcctgatgttagcattcaacaaaccaacatggtcccccctcatgtgcaggccatgcagggaaacagtgcctcgggaaaccacttctcaggccatgggatgtctttcaatgcacctttcagtggagctcccaatggaaatcagatgtcctgtggtcaaaatccaggcttcccagtcaataaggatgtcacgctaacgagcccattgttggtcaacttattgcagagtgacatatctgcaggccattttggggtaaacaataagcaaaataataccaacgcaaataaaccgaagaagaagaaaccccctcggaagaagaaaaatagtcagcaagatctaaacaccccagatactcgcccagctggtctggaagaggctgatcagccaccgttgcctggagaacaaggaattaacttggataactcaggccctaaactgccagaattttcaaaccggccaccaggttatccttctcaaccagttgaacagaggccacttcagcagatgcctcctcaactcatgcagcatgtggcacccccaccacagccaccacagcagcagccacagccacaactgcctcagcagcagcagccaccacctcccagtcagccacagtctcagcagcagcagcagcagcagcaacaaatgatgatgatgctcatgatgcagcaggatcccaaatcagttaggcttccagtctctcaaaatgtccatcctccaaggggccccctgaaccccgactcccagagaatgcccatgcaacagagtggcagtgtgcctgtcatggtcagtctgcaaggacctgcctccgtgccaccatcacctgataaacaaagaatgccaatgcctgtgaatactcccttgggaagcaattcaaggaaaatggtctatcaggagagcccgcagaatccttccagctcgccactggcggagatggcctcactccctgaagcaagtggcagtgaagcaccatctgtcccaggaggcccaaacaacatgccttcacatgtagtacttccccagaatcagttaatgatgacagggccaaaacctggaccatcgcccctttcagcaactcaaggtgcaactccccagcaaccccctgtaaattccctgcccagctctcacggccaccacttcccaaatgtggctgcgccaacccagacatctaggcccaaaacaccaaacagagccagccccagaccctattatcctcagacacccaacaaccgccctcccagcacagaaccttcagaaatcagtctgtcaccagaaagactcaatgcctccatagcaggactcttccctccacagattaatattcctttacctcctaggccaaatttaaacaggggctttgatcaacaaggcctaaatccaacaactttgaaggccatcgggcaagcaccttcaaatcttaccatgaatccttccaattttgctaccccacaaactcacaaattagattctgtggtagtgaattctggaaagcagtctaattctggagcaacaaaacgggcaagtccaagcaacagtcgcaggtctagtcctgggtccagtaggaaaaccactccaagccctgggaggcaaaattcaaaagcccctaaacttactctggcctctcagacaaatgcagccctattgcagaatgtggagttgccgagaaatgtattggtcagtcccactcctctggccaatccccctgtacctgggagctttcctaacaacagtgggctgaatcctcagaattctactgtgtctgtggctgcagttgggggtgttgttgaggataacaaggagagcttgaatgtgcctcaggacagtgattgccagaattcccagagtaggaaggaacaggtaaacattgaactaaaagcagtccctgcccaagaagttaaaatggttgtccctgaagatcagtccaaaaaggatgggcagccttcggatcctaacaaacttcccagtgtcgaagagaacaaaaatttggtgtctcctgctatgagggaagcaccaacatcgttaagtcaacttcttgacaactctggagctcccaatgtgacaattaaaccccctgggcttacagatctggaagtaacacctccagtagtttctggggaggacctcaaaaaagcatctgtcattcccacactgcaggatctgtcttcttctaaagaaccttctaattccctaaacttacctcacagtaatgagctgtgttcatcccttgtgcatcccgaattgagtgaggtcagttctaacgttgcaccaagcatccctccagtaatgtcaagacctgttagctcttcctccatttccactcccttgcccccaaatcaaataactgtatttgtcacttccaatcccatcacaacttcagctaacacatcagcagctttgccaactcacttgcagtctgcattgatgtcaacagttgtcacaatgcccaatgcgggtagcaaggttatggtttctgagggacagtcagctgctcagtctaatgcccggcctcagttcattacacctgtctttatcaattcatcctcaataattcaggttatgaaaggatcacagccaagcacaattcctgcagccccactgacaaccaactctggcctgatgcctccctctgttgcagttgttggccctttacacatacctcagaacataaaattttcttctgctcctgtaccgcctaatgccctctccagtagtcctgctccaaacatccagacaggtcgacctttggtccttagctcacgagccacccctgttcagcttccttcccctccttgtacgtcttctccagttgtcccttctcatccccctgtgcagcaagtgaaagaattgaatccagatgaggctagccctcaggtgaacacctcagcagatcagaacactcttccctcttcacagtcaaccacaatggtttctccccttttgaccaatagtccagggtcctctggcaaccggcgaagcccagtctcgtctagtaagggcaaaggaaaagtggacaaaattggccaaattttgttgaccaaggcatgtaagaaagttacaggctctcttgagaaaggggaagaacaatatggtgcagatggagagactgaaggccaagggctagacaccacagctccggggctcatgggaacagagcagttatccacagagctggacagtaaaaccccaacgcccccagcacccactctgctaaaaatgacctctagccctgtgggcccgggcactgcctcagcaggacccagcttacctggcggtgctctccccaccagtgtacgctcgatagtaaccactctggtaccctccgagctcatctccgccgtaccgaccacaaaaagcaatcatggtggcatagcatctgagtcacttgcgggtggcctagtggaggagaaggtgggatcccatccagaacttctacccagcatagccccgtcgcagaatttagtctcaaaggaaacttcaaccacagcactgcaggcctctgttgccagaccagagctggaggtaaatgctgccatagtctctggacaaagcagtgagcccaaagagatagttgaaaagtccaaaatcccaggccgaagaaactcccgaactgaagagccaactgtggcctctgaaagtgtggaaaatggacatcgtaaacgatcttctcgacctgcttcagcctccagctctactaaagacataaccagtgcggtgcaatccaagcgaagaaaatccaagtaaacaagcaggactgcgacttgatacttggaaatgtgtgtgacttttacaaagagcaattttgagctgtgacttttttaaatcaatttctgtacagttagtaattttaataatgtggcccttttcctagtccctgcaacctgtttcataaagtgcaatggggaaagcaggactgttgagcccttttggtgttgcgagttgaagttcaaggtttctaaaatgttgtcttgtattgaaaggagctaatgccattataaatgttactagttttcacatttcctaagcagcctagagtacagggtgagcatttttagatctcctaatgatgtattgtgccgtggaagtactgtgtgtgaatagcagtagtgggggcaaaagcaatcttctcatttggaaatgttgtaaataattttattatatagtgttttggatgtatttgttgtagaaatggaccagtgaataaagagaatctaaggatttgtacaatgtgaaataacgtgttaaataaatgtcattgtcatagaacataaagttatgttattggtaaggga

SEQ ID NO: 160774 - DNA, 9311 bp, Homo sapiens
  Payload ID: 11419
  Gene Symbol: NCOA6
  Gene Name: nuclear receptor coactivator 6
  Uniprot ID: Q14686
  ENST ID: ENST00000374796
  CDS Start-End: 2572-8763
ctccagcccaggcaacagagcgtgactccgtctcaaaaaaaaaaaaaaaagtgaaaggaaaatgaggggagaattctcattgataataagggcgaaaaggtttttttggcagagtaatagagttttggaaaccattgcaaagctgtcaagtgtggtgtagtttttggttaaggaaatcagaggtgtcagcagacataaaagacaggggaaaacatgggaagtgtcctacctatagtgtagaaaaagcacaactatctatgtcagaggtcgacagactgtggtccataggtcaaatctggcccacgatctgtttttgtaaataacgttttattggaacatagccacactcatttatttatatattgtccatatcttcttttgtggtaccaatagcagagttgagtagtcgtgacagagatgtgttgtgtcagctcacaaagctggaaatactctttacaaaaacatttgccaacccctgatctatgtgtttgagtgttggatgttcaacctctaatttgccatccaatgtctatatgatgatagagaatgaataaacgtcttggctctgccctttgggctggattacccatgctctgtgtacctgcagcataacacagacccctgaatatttatatcagtcagtgatggcaaggtctattgttctggagtgtactgtgtggtaactgtggtagtgccagctttacacggattagataatgctcgggcttgttttgccattttttttattgggttgtcttttacaaaagatttatttatatattctgattattaatcctttgttgttggtagatattacagatgtcatttcccagtttcttgcttattttaatttttttttttttttttttgagatgaagtcttgctctgtcgcccaggctggagtgcagtcgtgccatctcagctcattgtaacctccgtctcccaggttcaagtgattctcttgcctcagcctcccaagtagctgggactacaggcatgtgccaccacacctggctgatttttgtgtttttagtagggatggggtttcatcatgttggccaggctggtctcaaactcctgacctcaagtgatccacccgtcttggcctcctaaagtgctgggattacaggtgtgagccactgcgcctggcctgttgcttattttaaaacatctgttttaaggtgtcatttgttaaaaagttctgaattttagtatcaactttatcaatcttttcctttaagatttgcagttattctttgttttgaggcagggtctcgctctgtcaccgaggctggagtgcagtggtgcgatctcggctcactgcagcctcaacctcctgggctcaagcaaccctcccacctcccatgccagttgagaccacaggcatgcgccaccatgccctgctactttttgcattttttgtagaggcggggtttcgccatgttgcccaggctagtctggaactcctgagctcaagcagtccacaaagtgctgggattacaggtgtgagctactgtgcccagcctgcaattattctttatattctggaatacctactgttgttttcaatggttagatctttaatgtatctggaatggattcttatgtgtagtgtaaggtcgggtccagtttcattttttttccctatgtataaccagtgatcccagcatcatttattgaatggggcttgctttcaaattgtgagctctttttggtggagtctgtctcaggtccttattaagcactgctgcttgctgattgtgtgaccttggacaaataaaacctcattgcgcctcagtctttaaggataatagtaatctcatagggttttgtgaggattaaatgagtcaatatacataacgtgtaaaacagtgcttggcacctagaacatgctcaataaatattagctgtactttagcactactgttcatttctgattcctcagcacctggtacagagcaggggctcattttgctcaattaaattgccaaattaatttggttttcaggtcaatcagaatggtgagagttgggctgagtgttgcaggagatgcttccaaggagctacttagttttaggggctgccttagattatctgctaggatagaactcttctcacgccatcacttttgcagagaacttctgtagcagaggttgcaaactggcaacctgtggttggatttgacctgtataagtattttgtttggtttacacaatatttttaatgtcttaaaaatgtacacagacctctgagtttctgacttaaccttgaaaaattggaagatctgtcaacagcaagcccatattcatttatagcggtaaccagctgaaacttttaggtcctgggaggaatggagaggggtcccactgactaacttttctgagagtggtcagagagttcttaagcagaattttgatttggctgctgggctgctaccttgaaatccaagccctaaaaatgccagcttctttggacttagaagatgacctggataaatgataaaaattaagaaagagattttgaagttttcttattgtcctcttggcatatgcttctggaataatattcaccatggttttggatgaccttccaaacttagaagacatctatacttccttgtgttcatcaacaatggaagactcagagatggattttgactctggactagaagatgatgacacaaaaagtgatagtattttggaggattccacaatttttgtggccttcaaaggaaatatagatgataaagacttcaaatggaaattagatgcaatattgaaaaacgtgcccaatttgttacacatggagtccagcaagctaaaagtacagaaggtggagccctggaacagcgtgcgtgtgacattcaacatcccccgggaagcagcggagcggctacggatccttgctcagagcaacaaccagcagcttcgggatttagggattctctccgttcagattgaaggggaaggtgctattaacctggctttggctcagaaccgaagccaagatgtgagaatgaatggacccatgggagctggaaattcagttaggatggaggcgggatttcctatggcaagtggtccaggaataataaggatgaacaaccctgccactgttatgatacccccgggtggaaatgtgtcatcttccatgatggcaccaggccccaatccagagctgcagcccaggactcctcgccctgcttctcagtcagatgcaatggatccactcctctctgggctccatatacagcagcaaagtcatccctcaggatctttagctcccccacatcacccaatgcagcctgtctctgtgaacagacaaatgaacccagctaattttccccagctgcagcagcagcagcaacaacaacaacagcagcagcagcagcagcagcagcaacaacagcaacagcagcaacaacagttgcaggcaagacccccacagcaacatcagcagcaacagccacagggaattcgaccccagtttactgccccaactcaggtgcctgttcctccaggctggaaccagctgccttctggagcccttcaacctcctccagcccagggttctctgggcacaatgactgcaaaccaagggtggaagaaggctcccttgcccggcccaatgcaacagcaactccaggcaagaccatccttagccacggtacagacgccttcccaccctccccctccatatccctttggcagccagcaagcctcacaagcccacacaaactttcctcagatgagcaacccaggccagttcacagctcctcagatgaagagtttgcagggagggccctctagggtcccaactcccttgcagcagccccacctcaccaacaagtctcctgcctcctcaccctcctccttccagcagggatcccctgcatcctccccaacggttaaccaaactcagcagcagatgggaccaaggccacctcaaaataacccacttccccagggatttcagcagcctgtcagctctccgggtcggaatcctatggttcaacagggaaatgtgccacctaacttcatggtgatgcagcagcaaccaccaaaccaggggccacagagtttacatccaggcctaggaggaatgcctaaacgcctcccacctggcttctcagcaggacaggccaatccgaactttatgcaaggtcaggtgccttcgaccacagcaaccacccctgggaattcaggagcccctcagctgcaagcaaatcaaaatgtccagcatgcaggtggtcaaggagctggtcctcctcaaaaccagatgcaggtgtcccacgggccgccaaatatgatgcagcccagcctcatgggaattcatggcaacatgaacaatcagcaggctggtacttctggggttcctcaagtgaacctcagcaacatgcaaggccagccccagcagggcccaccatctcagctgatgggcatgcaccagcaaatcgtgccctcccagggccagatggtccagcaacaaggaaccttgaaccctcagaaccctatgatcctttcaagggcccagcttatgccacagggccagatgatggtgaaccccccgagccaaaatcttgggccctcgccccaaaggatgaccccacccaagcagatgctttcccagcagggcccacaaatgatggcgccacataaccagatgatggggcctcaggggcaggttttgctccaacagaacccaatgatagagcagattatgaccaatcaaatgcaggggaataagcagcagtttaacactcagaaccagtccaatgtcatgccgggaccagcccagataatgaggggaccaactccaaacatgcaaggaaatatggtgcagtttacgggacagatgtcaggacagatgctgccccagcaagggcctgtgaacaacagtccatctcaggttatgggcattcagggacaggtcctgcggccaccagggcccagcccacacatggcccagcagcatggtgatcctgctactacagcaaataacgatgtcagtttatctcagatgatgcctgatgttagcattcaacaaaccaacatggtcccccctcatgtgcaggccatgcagggaaacagtgcctcgggaaaccacttctcaggccatgggatgtctttcaatgcacctttcagtggagctcccaatggaaatcagatgtcctgtggtcaaaatccaggcttcccagtcaataaggatgtcacgctaacgagcccattgttggtcaacttattgcagagtgacatatctgcaggccattttggggtaaacaataagcaaaataataccaacgcaaataaaccgaagaagaagaaaccccctcggaagaagaaaaatagtcagcaagatctaaacaccccagatactcgcccagctggtctggaagaggctgatcagccaccgttgcctggagaacaaggaattaacttggataactcaggccctaaactgccagaattttcaaaccggccaccaggttatccttctcaaccagttgaacagaggccacttcagcagatgcctcctcaactcatgcagcatgtggcacccccaccacagccaccacagcagcagccacagccacaactgcctcagcagcagcagccaccacctcccagtcagccacagtctcagcagcagcagcagcagcagcaacaaatgatgatgatgctcatgatgcagcaggatcccaaatcagttaggcttccagtctctcaaaatgtccatcctccaaggggccccctgaaccccgactcccagagaatgcccatgcaacagagtggcagtgtgcctgtcatggtcagtctgcaaggacctgcctccgtgccaccatcacctgataaacaaagaatgccaatgcctgtgaatactcccttgggaagcaattcaaggaaaatggtctatcaggagagcccgcagaatccttccagctcgccactggcggagatggcctcactccctgaagcaagtggcagtgaagcaccatctgtcccaggaggcccaaacaacatgccttcacatgtagtacttccccagaatcagttaatgatgacagggccaaaacctggaccatcgcccctttcagcaactcaaggtgcaactccccagcaaccccctgtaaattccctgcccagctctcacggccaccacttcccaaatgtggctgcgccaacccagacatctaggcccaaaacaccaaacagagccagccccagaccctattatcctcagacacccaacaaccgccctcccagcacagaaccttcagaaatcagtctgtcaccagaaagactcaatgcctccatagcaggactcttccctccacagattaatattcctttacctcctaggccaaatttaaacaggggctttgatcaacaaggcctaaatccaacaactttgaaggccatcgggcaagcaccttcaaatcttaccatgaatccttccaattttgctaccccacaaactcacaaattagattctgtggtagtgaattctggaaagcagtctaattctggagcaacaaaacgggcaagtccaagcaacagtcgcaggtctagtcctgggtccagtaggaaaaccactccaagccctgggaggcaaaattcaaaagcccctaaacttactctggcctctcagacaaatgcagccctattgcagaatgtggagttgccgagaaatgtattggtcagtcccactcctctggccaatccccctgtacctgggagctttcctaacaacagtgggctgaatcctcagaattctactgtgtctgtggctgcagttgggggtgttgttgaggataacaaggagagcttgaatgtgcctcaggacagtgattgccagaattcccagagtaggaaggaacaggtaaacattgaactaaaagcagtccctgcccaagaagttaaaatggttgtccctgaagatcagtccaaaaaggatgggcagccttcggatcctaacaaacttcccagtgtcgaagagaacaaaaatttggtgtctcctgctatgagggaagcaccaacatcgttaagtcaacttcttgacaactctggagctcccaatgtgacaattaaaccccctgggcttacagatctggaagtaacacctccagtagtttctggggaggacctcaaaaaagcatctgtcattcccacactgcaggatctgtcttcttctaaagaaccttctaattccctaaacttacctcacagtaatgagctgtgttcatcccttgtgcatcccgaattgagtgaggtcagttctaacgttgcaccaagcatccctccagtaatgtcaagacctgttagctcttcctccatttccactcccttgcccccaaatcaaataactgtatttgtcacttccaatcccatcacaacttcagctaacacatcagcagctttgccaactcacttgcagtctgcattgatgtcaacagttgtcacaatgcccaatgcgggtagcaaggttatggtttctgagggacagtcagctgctcagtctaatgcccggcctcagttcattacacctgtctttatcaattcatcctcaataattcaggttatgaaaggatcacagccaagcacaattcctgcagccccactgacaaccaactctggcctgatgcctccctctgttgcagttgttggccctttacacatacctcagaacataaaattttcttctgctcctgtaccgcctaatgccctctccagtagtcctgctccaaacatccagacaggtcgacctttggtccttagctcacgagccacccctgttcagcttccttcccctccttgtacgtcttctccagttgtcccttctcatccccctgtgcagcaagtgaaagaattgaatccagatgaggctagccctcaggtgaacacctcagcagatcagaacactcttccctcttcacagtcaaccacaatggtttctccccttttgaccaatagtccagggtcctctggcaaccggcgaagcccagtctcgtctagtaagggcaaaggaaaagtggacaaaattggccaaattttgttgaccaaggcatgtaagaaagttacaggctctcttgagaaaggggaagaacaatatggtgcagatggagagactgaaggccaagggctagacaccacagctccggggctcatgggaacagagcagttatccacagagctggacagtaaaaccccaacgcccccagcacccactctgctaaaaatgacctctagccctgtgggcccgggcactgcctcagcaggacccagcttacctggcggtgctctccccaccagtgtacgctcgatagtaaccactctggtaccctccgagctcatctccgccgtaccgaccacaaaaagcaatcatggtggcatagcatctgagtcacttgcgggtggcctagtggaggagaaggtgggatcccatccagaacttctacccagcatagccccgtcgcagaatttagtctcaaaggaaacttcaaccacagcactgcaggcctctgttgccagaccagagctggaggtaaatgctgccatagtctctggacaaagcagtgagcccaaagagatagttgaaaagtccaaaatcccaggccgaagaaactcccgaactgaagagccaactgtggcctctgaaagtgtggaaaatggacatcgtaaacgatcttctcgacctgcttcagcctccagctctactaaagacataaccagtgcggtgcaatccaagcgaagaaaatccaagtaaacaagcaggactgcgacttgatacttggaaatgtgtgtgacttttacaaagagcaattttgagctgtgacttttttaaatcaatttctgtacagttagtaattttaataatgtggcccttttcctagtccctgcaacctgtttcataaagtgcaatggggaaagcaggactgttgagcccttttggtgttgcgagttgaagttcaaggtttctaaaatgttgtcttgtattgaaaggagctaatgccattataaatgttactagttttcacatttcctaagcagcctagagtacagggtgagcatttttagatctcctaatgatgtattgtgccgtggaagtactgtgtgtgaatagcagtagtgggggcaaaagcaatcttctcatttggaaatgttgtaaataattttattatatagtgttttggatgtatttgttgtagaaatggaccagtgaataaagagaatctaaggatttgtacaatgtgaaataacgtgttaaataaatgtcattgtcatagaacataaagttatgttattggtaaggga

SEQ ID NO: 160775 - DNA, 4082 bp, Homo sapiens
  Payload ID: 11419
  Gene Symbol: NCOA6
  Gene Name: nuclear receptor coactivator 6
  ENST ID: ENST00000612493
  CDS Start-End: 323-3535
gtgaggccctgccgggtcgggctgcgggcggccgggcgcgggcggcgggacagacgggcgcacgcgaggactgacggacggacgcaccgagggcggcgggcacgcacggcccgggccggcgctccaaggcccgcccgggagggccggggccgcgctcagaattttgatttggctgctgggctgctaccttgaaatccaagccctaaaaatgccagcttctttggacttagaagatgacctggataaatgataaaaattaagaaagagattttgaagttttcttattgtcctcttggcatatgcttctggaataatattcaccatggttttggatgaccttccaaacttagaagacatctatacttccttgtgttcatcaacaatggaagactcagagatggattttgactctggactagaagatgatgacacaaaaagtgatagtattttggaggattccacaatttttgtggccttcaaaggaaatatagatgataaagacttcaaatggaaattagatgcaatattgaaaaacgtgcccaatttgttacacatggagtccagcaagctaaaagtacagaaggtggagccctggaacagcgtgcgtgtgacattcaacatcccccgggaagcagcggagcggctacggatccttgctcagagcaacaaccagcagcttcgggatttagggattctctccgttcagattgaaggggaaggtgctattaacctggctttggctcagaaccgaagccaagatgtgagaatgaatggacccatgggagctggaaattcagttaggatggaggcgggatttcctatggcaagtggtccaggaataataaggatgaacaaccctgccactgttatgatacccccgggtggaaatgtgtcatcttccatgatggcaccaggccccaatccagagctgcagcccaggactcctcgccctgcttctcagtcagatgcaatggatccactcctctctgggctccatatacagcagcaaagtcatccctcaggatctttagctcccccacatcacccaatgcagcctgtctctgtgaacagacaaatgaacccagctaattttccccagctgcagcagcagcagcaacaacaacaacagcagcagcagcagcagcagcagcaacaacagcaacagcagcaacaacagttgcaggcaagacccccacagcaacatcagcagcaacagccacagggaattcgaccccagtttactgccccaactcaggtgcctgttcctccaggctggaaccagctgccttctggagcccttcaacctcctccagcccagggttctctgggcacaatgactgcaaaccaagggtggaagaaggctcccttgcccggcccaatgcaacagcaactccaggcaagaccatccttagccacggtacagacgccttcccaccctccccctccatatccctttggcagccagcaagcctcacaagcccacacaaactttcctcagatgagcaacccaggccagttcacagctcctcagatgaagagtttgcagggagggccctctagggtcccaactcccttgcagcagccccacctcaccaacaagtctcctgcctcctcaccctcctccttccagcagggatcccctgcatcctccccaacggttaaccaaactcagcagcagatgggaccaaggccacctcaaaataacccacttccccagggatttcagcagcctgtcagctctccgggtcggaatcctatggttcaacagggaaatgtgccacctaacttcatggtgatgcagcagcaaccaccaaaccaggggccacagagtttacatccaggcctaggaggaatgcctaaacgcctcccacctggcttctcagcaggacaggccaatccgaactttatgcaaggtcaggtgccttcgaccacagcaaccacccctgggaattcaggagcccctcagctgcaagcaaatcaaaatgtccagcatgcaggtggtcaaggagctggtcctcctcaaaaccagatgcaggtgtcccacgggccgccaaatatgatgcagcccagcctcatgggaattcatggcaacatgaacaatcagcaggctggtacttctggggttcctcaagtgaacctcagcaacatgcaaggccagccccagcagggcccaccatctcagctgatgggcatgcaccagcaaatcgtgccctcccagggccagatggtccagcaacaaggaaccttgaaccctcagaaccctatgatcctttcaagggcccagcttatgccacagggccagatgatggtgaaccccccgagccaaaatcttgggccctcgccccaaaggatgaccccacccaagcagatgctttcccagcagggcccacaaatgatggcgccacataaccagatgatggggcctcaggggcaggttttgctccaacagaacccaatgatagagcagattatgaccaatcaaatgcaggggaataagcagcagtttaacactcagaaccagtccaatgtcatgccgggaccagcccagataatgaggggaccaactccaaacatgcaaggaaatatggtgcagtttacgggacagatgtcaggacagatgctgccccagcaagggcctgtgaacaacagtccatctcaggttatgggcattcagggacaggtcctgcggccaccagggcccagcccacacatggcccagcagcatggtgatcctgctactacagcaaataacgatgtcagtttatctcagatgatgcctgatgttagcattcaacaaaccaacatggtcccccctcatgtgcaggccatgcagggaaacagtgcctcgggaaaccacttctcaggccatgggatgtctttcaatgcacctttcagtggagctcccaatggaaatcagatgtcctgtggtcaaaatccaggcttcccagtcaataaggatgtcacgctaacgagcccattgttggtcaacttattgcagagtgacatatctgcaggccattttggggtaaacaataagcaaaataataccaacgcaaataaaccgaagaagaagaaaccccctcggaagaagaaaaatagtcagcaagatctaaacaccccagatactcgcccagctggtctggaagaggctgatcagccaccgttgcctggagaacaaggaattaacttggataactcaggccctaaactgccagaattttcaaaccggccaccagccccgtcgcagaatttagtctcaaaggaaacttcaaccacagcactgcaggcctctgttgccagaccagagctggaggtaaatgctgccatagtctctggacaaagcagtgagcccaaagagatagttgaaaagtccaaaatcccaggccgaagaaactcccgaactgaagagccaactgtggcctctgaaagtgtggaaaatggacatcgtaaacgatcttctcgacctgcttcagcctccagctctactaaagacataaccagtgcggtgcaatccaagcgaagaaaatccaagtaaacaagcaggactgcgacttgatacttggaaatgtgtgtgacttttacaaagagcaattttgagctgtgacttttttaaatcaatttctgtacagttagtaattttaataatgtggcccttttcctagtccctgcaacctgtttcataaagtgcaatggggaaagcaggactgttgagcccttttggtgttgcgagttgaagttcaaggtttctaaaatgttgtcttgtattgaaaggagctaatgccattataaatgttactagttttcacatttcctaagcagcctagagtacagggtgagcatttttagatctcctaatgatgtattgtgccgtggaagtactgtgtgtgaatagcagtagtgggggcaaaagcaatcttctcatttggaaatgttgtaaataattttattatatagtgttttggatgtatttgttgtagaaatggaccagtgaataaagagaatctaaggatttgtacaatgtgaaataacgtgttaaataaatgtcattgtcatagaacataaagttatgttattggtaaggg

SEQ ID NO: 160776 - DNA, 3271 bp, Homo sapiens
  Payload ID: 11419
  Gene Symbol: NCOA6
  Gene Name: nuclear receptor coactivator 6
  ENST ID: ENST00000616167
  CDS Start-End: 323-3271
gtgaggccctgccgggtcgggctgcgggcggccgggcgcgggcggcgggacagacgggcgcacgcgaggactgacggacggacgcaccgagggcggcgggcacgcacggcccgggccggcgctccaaggcccgcccgggagggccggggccgcgctcagaattttgatttggctgctgggctgctaccttgaaatccaagccctaaaaatgccagcttctttggacttagaagatgacctggataaatgataaaaattaagaaagagattttgaagttttcttattgtcctcttggcatatgcttctggaataatattcaccatggttttggatgaccttccaaacttagaagacatctatacttccttgtgttcatcaacaatggaagactcagagatggattttgactctggactagaagatgatgacacaaaaagtgatagtattttggaggattccacaatttttgtggccttcaaaggaaatatagatgataaagacttcaaatggaaattagatgcaatattgaaaaacgtgcccaatttgttacacatggagtccagcaagctaaaagtacagaaggtggagccctggaacagcgtgcgtgtgacattcaacatcccccgggaagcagcggagcggctacggatccttgctcagagcaacaaccagcagcttcgggatttagggattctctccgttcagattgaaggggaaggtgctattaacctggctttggctcagaaccgaagccaagatgtgagaatgaatggacccatgggagctggaaattcagttaggatggaggcgggatttcctatggcaagtggtccaggaataataaggatgaacaaccctgccactgttatgatacccccgggtggaaatgtgtcatcttccatgatggcaccaggccccaatccagagctgcagcccaggactcctcgccctgcttctcagtcagatgcaatggatccactcctctctgggctccatatacagcagcaaagtcatccctcaggatctttagctcccccacatcacccaatgcagcctgtctctgtgaacagacaaatgaacccagctaattttccccagctgcagcagcagcagcaacaacaacaacagcagcagcagcagcagcagcagcaacaacagcaacagcagcaacaacagttgcaggcaagacccccacagcaacatcagcagcaacagccacagggaattcgaccccagtttactgccccaactcaggtgcctgttcctccaggctggaaccagctgccttctggagcccttcaacctcctccagcccagggttctctgggcacaatgactgcaaaccaagggtggaagaaggctcccttgcccggcccaatgcaacagcaactccaggcaagaccatccttagccacggtacagacgccttcccaccctccccctccatatccctttggcagccagcaagcctcacaagcccacacaaactttcctcagatgagcaacccaggccagttcacagctcctcagatgaagagtttgcagggagggccctctagggtcccaactcccttgcagcagccccacctcaccaacaagtctcctgcctcctcaccctcctccttccagcagggatcccctgcatcctccccaacggttaaccaaactcagcagcagatgggaccaaggccacctcaaaataacccacttccccagggatttcagcagcctgtcagctctccgggtcggaatcctatggttcaacagggaaatgtgccacctaacttcatggtgatgcagcagcaaccaccaaaccaggggccacagagtttacatccaggcctaggaggaatgcctaaacgcctcccacctggcttctcagcaggacaggccaatccgaactttatgcaaggtcaggtgccttcgaccacagcaaccacccctgggaattcaggagcccctcagctgcaagcaaatcaaaatgtccagcatgcaggtggtcaaggagctggtcctcctcaaaaccagatgcaggtgtcccacgggccgccaaatatgatgcagcccagcctcatgggaattcatggcaacatgaacaatcagcaggctggtacttctggggttcctcaagtgaacctcagcaacatgcaaggccagccccagcagggcccaccatctcagctgatgggcatgcaccagcaaatcgtgccctcccagggccagatggtccagcaacaaggaaccttgaaccctcagaaccctatgatcctttcaagggcccagcttatgccacagggccagatgatggtgaaccccccgagccaaaatcttgggccctcgccccaaaggatgaccccacccaagcagatgctttcccagcagggcccacaaatgatggcgccacataaccagatgatggggcctcaggggcaggttttgctccaacagaacccaatgatagagcagattatgaccaatcaaatgcaggggaataagcagcagtttaacactcagaaccagtccaatgtcatgccgggaccagcccagataatgaggggaccaactccaaacatgcaaggaaatatggtgcagtttacgggacagatgtcaggacagatgctgccccagcaagggcctgtgaacaacagtccatctcaggttatgggcattcagggacaggtcctgcggccaccagggcccagcccacacatggcccagcagcatggtgatcctgctactacagcaaataacgatgtcagtttatctcagatgatgcctgatgttagcattcaacaaaccaacatggtcccccctcatgtgcaggccatgcagggaaacagtgcctcgggaaaccacttctcaggccatgggatgtctttcaatgcacctttcagtggagctcccaatggaaatcagatgtcctgtggtcaaaatccaggcttcccagtcaataaggatgtcacgctaacgagcccattgttggtcaacttattgcagagtgacatatctgcaggccattttggggtaaacaataagcaaaataataccaacgcaaataaaccgaagaagaagaaaccccctcggaagaagaaaaatagtcagcaagatctaaacaccccagatactcgcccagctggtctggaagaggctgatcagccaccgttgcctggagaacaaggaattaacttggataactcaggccctaaactgccagaattttcaaaccggccaccagctaaaatgcttcgagtgcctaccactgagtggtaa

SEQ ID NO: 160777 - DNA, 660 bp, Homo sapiens
  Payload ID: 11419
  Gene Symbol: NCOA6
  Gene Name: nuclear receptor coactivator 6
  ENST ID: ENST00000628752
  CDS Start-End: 1-660
tccaggcttcccagtcaataaggatgtcacgctaacgagcccattgttggtcaacttattgcagagtgacatatctgcaggccattttggggtaaacaataagcaaaataataccaacgcaaataaaccgaagaagaagaaaccccctcggaagaagaaaaatagtcagcaagatctaaacaccccagatactcgcccagctggtctggaagaggctgatcagccaccgttgcctggagaacaaggaattaacttggataactcaggccctaaactgccagaattttcaaaccggccaccagccccgtcgcagaatttagtctcaaaggaaacttcaaccacagcactgcaggcctctgttgccagaccagagctggaggtaaatgctgccatagtctctggacaaagcagtgagcccaaagagatagttgaaaagtccaaaatcccaggccgaagaaactcccgaactgaagagccaactgtggcctctgaaagtgtggaaaatggacatcgtaaacgatcttctcgacctgcttcagcctccagctctactaaagctggtgctcccatgaaggaccaaatgctatgtgtggagagggccacaagaggaggacccaagagggacctctacaagctgagagttgagagtggtcccctgcc

SEQ ID NO: 160778 - DNA, 2998 bp, Homo sapiens
  Payload ID: 11420
  Gene Symbol: NCOA7
  Gene Name: nuclear receptor coactivator 7
  Uniprot ID: Q8NI08
  ENST ID: ENST00000229634
  CDS Start-End: 259-2742
gatgcgctccccggcgcccagcagcagaggccaccgctcccagaaatgcatgcgaccgatccccttctcccggaccccaggagccggcgcccccgccctgtagggttacgactcactgattaaaaagagggactttttcaaatactttgcacttttgattgtgtattatggataccaaggaagagaagaaggaacggaaacaaagttattttgctcgatgacaatcaaaacaaaacacatgataaaaaagagaagaagatggtggttcagaagccccatgggactatggaatacactgctggaaaccaggacaccctaaactccatagcactgaaatttaacatcactcccaataaattggtggaactgaataaacttttcacacatactattgttccaggccaggtcctttttgtgccagatgccaactctccttccagtaccttaaggctatcatcatccagtcctggtgctactgtctctccttcatcatcagatgcagaatatgataaattgcctgatgctgacttagcacgaaaggccttgaaacccattgaaagagtcttatcgtctacttctgaagaagatgagccaggtgtggtgaaatttttaaaaatgaattgtcgatacttcaccgatggaaagggtgtggttggcggtgttatgatagtgactcctaacaacatcatgtttgaccctcataaatctgatcctctggttattgaaaatgggtgtgaggagtatggtctcatctgccccatggaagaggttgtttccattgcgctctacaatgacatttctcacatgaagatcaaagatgccttgccatcgcctggagaatgggaagacctggcttcagaaaaggatatcaacccattcagtaagttcaaatctatcaacaaggaaaaacgacagcagaatggagagaaaattatgacttcggattccagaccaatagtacctttggagaagtccacaggacatacacctacaaagccctcaggcagctctgtgtcagagaaattaaagaaactggactcctctagggagacatcccatggttctcccacagtgactaagctcagcaaggaaccttccgacacttcttctgcatttgaatctacagccaaagaaaactttctaggggaagatgatgattttgttgacttggaagaactttcttctcaaactggtggtggaatgcacaaaaaagacaccttgaaggagtgcctttctcttgacccagaggaacgaaagaaagctgagtcacaaataaacaattctgccgtggaaatgcaggtgcagtcagccctagcctttttgggaacagagaatgatgttgaactgaagggggcgctagatttagaaacctgtgagaagcaagatataatgccagaagtggacaagcagtctggttcgccagaaagccgagtagaaaacacactgaacatacatgaagatttagataaagttaaactcattgaatattacctgactaagaacaaagaagggccacaggtatctgaaaatttgcagaaaacagaattaagtgatggaaaaagtattgaaccagggggaatagacattacccttagtagttctctttcccaggcgggtgatcccataactgagggcaataaagagccagataagacctgggtgaaaaagggagagcccctcccggtaaaactgaactcttctacagaagcaaatgtgattaaagaggctctagactcctctttggaatctactctggacaacagctgtcaaggtgcacaaatggataataaatctgaagttcagttgtggctgttaaagagaattcaggtacccattgaagatatacttccttcaaaagaagaaaaaagcaagaccccacccatgttcctgtgcatcaaagtgggaaaaccaatgagaaaatcctttgccactcacactgcagccatggtccagcagtacggcaaacggagaaagcagccagagtactggtttgctgttcctcgggagagggtggatcatttgtacacattctttgttcagtggtctcccgatgtctatggaaaagatgccaaagagcaaggctttgtggtggtggagaaggaagaactgaacatgattgacaacttcttcagtgagccaacaaccaagagctgggagatcatcactgttgaagaggcaaagcgcaggaagagcacatgcagctactatgaagacgaggacgaagaggtgctgcctgtcctacggccccacagcgcgctcctggagaatatgcacatcgagcagctggcccgacgccttcctgcaagggtgcaagggtatccatggagactggcctatagcacgttagagcacgggaccagcttaaagacgctctaccggaaatcggcatcactagacagtcctgtcctattggtcatcaaagatatggataatcagatttttggagcatatgcaactcatcctttcaagttcagtgaccactattatggcacaggcgaaacttttctctacacattcagccctcattttaaggtctttaagtggagtggagaaaattcatactttatcaatggagacataagttctttagaacttggtggtggagggggacgatttggtttatggctagatgctgatttataccacggacgaagcaactcttgcagcactttcaataatgatattctttccaaaaaggaagacttcatagttcaggatctggaggtgtgggcatttgattgaaattcagactgccttaaaatataacattaaaaagactgggttcgatcagccctcctaaagctggctggaaaaagaagccccagcccagcctgcctcatcccaccccaatgcttcctttctgccatcatctcagagcatgatcacattgcagaaagattctggaaggtccatgtagagggcagacattgaagaaagaaacttaaaatccaggttgttgaaaagactttgtactcccacttcctccaaatccatacag

SEQ ID NO: 160779 - DNA, 5521 bp, Homo sapiens
  Payload ID: 11420
  Gene Symbol: NCOA7
  Gene Name: nuclear receptor coactivator 7
  Uniprot ID: Q8NI08
  ENST ID: ENST00000368357
  CDS Start-End: 353-3181
agaaaccctcataaagtagatgcagagggcagtaagatataactcaactttgaaaatgtcagccgttatagttgaagaaatctgacccaagagacttcgctccgctgcaagatggaaggaagcttaagtaagacataaatttgtaatgaacttgctcacaacatccgccgccactgtgacttgcagtcatcatccattaccacaaaattagttgcaggatggctactcgtatccctccacacatgatcatcagtatttgcctcctgtgtcccaaccggcctgagtcaaggttacgactcactgattaaaaagagggactttttcaaatactttgcacttttgattgtgtattatggataccaaggaagagaagaaggaacggaaacaaagttattttgctcgactgaaaaagaaaaaacaagccaaacaaaatgcagagacagcctcagctgtagctacaaggactcatactgggaaggaagataataatacagtagttttagagccagacaagtgcaacattgctgtggaagaggaatatatgactgatgagaaaaaaaagagaaaaagtaatcagttaaaggagatcaggcgtacagaactaaagagatattatagtattgatgacaatcaaaacaaaacacatgataaaaaagagaagaagatggtggttcagaagccccatgggactatggaatacactgctggaaaccaggacaccctaaactccatagcactgaaatttaacatcactcccaataaattggtggaactgaataaacttttcacacatactattgttccaggccaggtcctttttgtgccagatgccaactctccttccagtaccttaaggctatcatcatccagtcctggtgctactgtctctccttcatcatcagatgcagaatatgataaattgcctgatgctgacttagcacgaaaggccttgaaacccattgaaagagtcttatcgtctacttctgaagaagatgagccaggtgtggtgaaatttttaaaaatgaattgtcgatacttcaccgatggaaagggtgtggttggcggtgttatgatagtgactcctaacaacatcatgtttgaccctcataaatctgatcctctggttattgaaaatgggtgtgaggagtatggtctcatctgccccatggaagaggttgtttccattgcgctctacaatgacatttctcacatgaagatcaaagatgccttgccatctgacctacctcaggatctttgtcctctgtacaggcctggagaatgggaagacctggcttcagaaaaggatatcaacccattcagtaagttcaaatctatcaacaaggaaaaacgacagcagaatggagagaaaattatgacttcggattccagaccaatagtacctttggagaagtccacaggacatacacctacaaagccctcaggcagctctgtgtcagagaaattaaagaaactggactcctctagggagacatcccatggttctcccacagtgactaagctcagcaaggaaccttccgacacttcttctgcatttgaatctacagccaaagaaaactttctaggggaagatgatgattttgttgacttggaagaactttcttctcaaactggtggtggaatgcacaaaaaagacaccttgaaggagtgcctttctcttgacccagaggaacgaaagaaagctgagtcacaaataaacaattctgccgtggaaatgcaggtgcagtcagccctagcctttttgggaacagagaatgatgttgaactgaagggggcgctagatttagaaacctgtgagaagcaagatataatgccagaagtggacaagcagtctggttcgccagaaagccgagtagaaaacacactgaacatacatgaagatttagataaagttaaactcattgaatattacctgactaagaacaaagaagggccacaggtatctgaaaatttgcagaaaacagaattaagtgatggaaaaagtattgaaccagggggaatagacattacccttagtagttctctttcccaggcgggtgatcccataactgagggcaataaagagccagataagacctgggtgaaaaagggagagcccctcccggtaaaactgaactcttctacagaagcaaatgtgattaaagaggctctagactcctctttggaatctactctggacaacagctgtcaaggtgcacaaatggataataaatctgaagttcagttgtggctgttaaagagaattcaggtacccattgaagatatacttccttcaaaagaagaaaaaagcaagaccccacccatgttcctgtgcatcaaagtgggaaaaccaatgagaaaatcctttgccactcacactgcagccatggtccagcagtacggcaaacggagaaagcagccagagtactggtttgctgttcctcgggagagggtggatcatttgtacacattctttgttcagtggtctcccgatgtctatggaaaagatgccaaagagcaaggctttgtggtggtggagaaggaagaactgaacatgattgacaacttcttcagtgagccaacaaccaagagctgggagatcatcactgttgaagaggcaaagcgcaggaagagcacatgcagctactatgaagacgaggacgaagaggtgctgcctgtcctacggccccacagcgcgctcctggagaatatgcacatcgagcagctggcccgacgccttcctgcaagggtgcaagggtatccatggagactggcctatagcacgttagagcacgggaccagcttaaagacgctctaccggaaatcggcatcactagacagtcctgtcctattggtcatcaaagatatggataatcagatttttggagcatatgcaactcatcctttcaagttcagtgaccactattatggcacaggcgaaacttttctctacacattcagccctcattttaaggtctttaagtggagtggagaaaattcatactttatcaatggagacataagttctttagaacttggtggtggagggggacgatttggtttatggctagatgctgatttataccacggacgaagcaactcttgcagcactttcaataatgatattctttccaaaaaggaagacttcatagttcaggatctggaggtgtgggcatttgattgaaattcagactgccttaaaatataacattaaaaagactgggttcgatcagccctcctaaagctggctggaaaaagaagccccagcccagcctgcctcatcccaccccaatgcttcctttctgccatcatctcagagcatgatcacattgcagaaagattctggaaggtccatgtagagggcagacattgaagaaagaaacttaaaatccaggttgttgaaaagactttgtactcccacttcctccaaatccatacagtgaggaatcagagtgtttatagatatatgagttgaatgcaatttttatttttggtaactgtgaaaaataagatactgtggatatatacatgccttgtgtatttatcagcataattttcattaccaaaatgtacagctattatttgccatggaaaaggttagtctcatttagaaaaatcgaaagtgcacagcacttaaagggaatatatgaggtttttttttttttaaaaaaaaacttttatttattatttgtagtatattgtctgaaatgtgtcggcagttttttttcttttaatgtgtcaaatcttgaaatattaaatgtatacattttgtgctatgttttgggaacaaatctgtttgatttatatagttttatattgaattttttttgccctgattgtttagggtgataggtcttaagcagcatatatctatatatctgtatgtgggtatatagagatatatgtgtgtgtgtatgtatatgtacatatacatatatatgagtgtataattctaaatttctaaaaactcattatgaatgttcatcaatttgactattataggccagctttccatttagtcaataaaagcgtacatttttagttacttaccttgaacatattcgtgtgaaaaagaatacatcatttctcacagtcttaagttgatatttatagaaatgaatacctttgtgaacctagacttagaacaaatcctgcttttgaaaaaaaatgttttgcttcttacaaaatcatttgtgttaataacaaaaactttattttcggagtgttctttgtataacttttccaagcttttacattaacgagcaggcctctgtcttaaaagggactcagtatattaatttctgcattttttaaatcaaatgaaaaacgtcaaattggaccaattgtcttggtttcttgattcatttatttgagaaaaaaacaatacaaagaaatgcattcatatcaaaattggaatagaaaggaaaacctatttttaagatatcaacctattttcacatcataaaacatctattacataaaataaaggtccaggcatagtggctcttgcctgtaatcccagcactttgggaggccgaggcaggtggatcactcaaggtcacaagtttgagaccagtctggccaacatggtgaaaccccatctctactaaaagtacaaatattagccgactatgtggcgggcacctgtaatcccacctactcgggaggctgaggcaggagaattgcttgaatccgggaagcagaggttgtagtgagccaagatcgtgccactgcactctatcctgggtaacagcgagactctgtcttaaaaataataacaataataataataataaagacttacttaaccaatattattgattaccagacttttatgaaagccaaagactgcttgctagtaggaaaaaatttcaaataataaccaaagctgaaaaatggtctgtcataaattatttccccggtaatttttgaaaggaaaaatgtataacaagtactatttacatatctgcatttaaaaaagcaattcttagaatacttcctttacattattctcctattttagacattttgtgaaagagaacaaattgtccagtggcctcctgtcagatcaacaattattatactccttaattccatgcaaatttaaatgaatgctataaaattttaaatctgtagcctgggtgtacgtttcactcaagttctcctactgaggactcttgactaacagcatactggcagtttcaccttaacctgctcgttaaataatgtgttggtgtgagatatcaggaatgtctcatgatatcacgtttaccatttacaccatctgcaaccatatgctattaataaaatggaaaaaaacaaaatggtcattttgcatatacttcactctgacctagtttagtccatgatactataattgtgagagcatatccagatgctgtgttctctatgtaaaacagtattgtccattcagaaatgtgtgacccttcatttatggatattgactatatgtaatgcagtgctatcccaatattttcaataaaggactttatgcattcagtga

SEQ ID NO: 160780 - DNA, 6457 bp, Homo sapiens
  Payload ID: 11420
  Gene Symbol: NCOA7
  Gene Name: nuclear receptor coactivator 7
  Uniprot ID: Q8NI08
  ENST ID: ENST00000392477
  CDS Start-End: 370-3198
atgccctgacggggggcgcagctgcggggctggcgaggcgtcgcgcgtgggaagaggcctaagacaccccgactgcggcggctgcgcacacccgatccggacgcggggccccgcgggcgcgcgcctcggagctcccgcctcctcctcttgctcctcctcggcgtacggtcctcccctgacccctccttccacccgccgagaggatgcgctccccggcgcccagcagcagaggccaccgctcccagaaatgcatgcgaccgatccccttctcccggaccccaggagccggcgcccccgccctgtagggttacgactcactgattaaaaagagggactttttcaaatactttgcacttttgattgtgtattatggataccaaggaagagaagaaggaacggaaacaaagttattttgctcgactgaaaaagaaaaaacaagccaaacaaaatgcagagacagcctcagctgtagctacaaggactcatactgggaaggaagataataatacagtagttttagagccagacaagtgcaacattgctgtggaagaggaatatatgactgatgagaaaaaaaagagaaaaagtaatcagttaaaggagatcaggcgtacagaactaaagagatattatagtattgatgacaatcaaaacaaaacacatgataaaaaagagaagaagatggtggttcagaagccccatgggactatggaatacactgctggaaaccaggacaccctaaactccatagcactgaaatttaacatcactcccaataaattggtggaactgaataaacttttcacacatactattgttccaggccaggtcctttttgtgccagatgccaactctccttccagtaccttaaggctatcatcatccagtcctggtgctactgtctctccttcatcatcagatgcagaatatgataaattgcctgatgctgacttagcacgaaaggccttgaaacccattgaaagagtcttatcgtctacttctgaagaagatgagccaggtgtggtgaaatttttaaaaatgaattgtcgatacttcaccgatggaaagggtgtggttggcggtgttatgatagtgactcctaacaacatcatgtttgaccctcataaatctgatcctctggttattgaaaatgggtgtgaggagtatggtctcatctgccccatggaagaggttgtttccattgcgctctacaatgacatttctcacatgaagatcaaagatgccttgccatctgacctacctcaggatctttgtcctctgtacaggcctggagaatgggaagacctggcttcagaaaaggatatcaacccattcagtaagttcaaatctatcaacaaggaaaaacgacagcagaatggagagaaaattatgacttcggattccagaccaatagtacctttggagaagtccacaggacatacacctacaaagccctcaggcagctctgtgtcagagaaattaaagaaactggactcctctagggagacatcccatggttctcccacagtgactaagctcagcaaggaaccttccgacacttcttctgcatttgaatctacagccaaagaaaactttctaggggaagatgatgattttgttgacttggaagaactttcttctcaaactggtggtggaatgcacaaaaaagacaccttgaaggagtgcctttctcttgacccagaggaacgaaagaaagctgagtcacaaataaacaattctgccgtggaaatgcaggtgcagtcagccctagcctttttgggaacagagaatgatgttgaactgaagggggcgctagatttagaaacctgtgagaagcaagatataatgccagaagtggacaagcagtctggttcgccagaaagccgagtagaaaacacactgaacatacatgaagatttagataaagttaaactcattgaatattacctgactaagaacaaagaagggccacaggtatctgaaaatttgcagaaaacagaattaagtgatggaaaaagtattgaaccagggggaatagacattacccttagtagttctctttcccaggcgggtgatcccataactgagggcaataaagagccagataagacctgggtgaaaaagggagagcccctcccggtaaaactgaactcttctacagaagcaaatgtgattaaagaggctctagactcctctttggaatctactctggacaacagctgtcaaggtgcacaaatggataataaatctgaagttcagttgtggctgttaaagagaattcaggtacccattgaagatatacttccttcaaaagaagaaaaaagcaagaccccacccatgttcctgtgcatcaaagtgggaaaaccaatgagaaaatcctttgccactcacactgcagccatggtccagcagtacggcaaacggagaaagcagccagagtactggtttgctgttcctcgggagagggtggatcatttgtacacattctttgttcagtggtctcccgatgtctatggaaaagatgccaaagagcaaggctttgtggtggtggagaaggaagaactgaacatgattgacaacttcttcagtgagccaacaaccaagagctgggagatcatcactgttgaagaggcaaagcgcaggaagagcacatgcagctactatgaagacgaggacgaagaggtgctgcctgtcctacggccccacagcgcgctcctggagaatatgcacatcgagcagctggcccgacgccttcctgcaagggtgcaagggtatccatggagactggcctatagcacgttagagcacgggaccagcttaaagacgctctaccggaaatcggcatcactagacagtcctgtcctattggtcatcaaagatatggataatcagatttttggagcatatgcaactcatcctttcaagttcagtgaccactattatggcacaggcgaaacttttctctacacattcagccctcattttaaggtctttaagtggagtggagaaaattcatactttatcaatggagacataagttctttagaacttggtggtggagggggacgatttggtttatggctagatgctgatttataccacggacgaagcaactcttgcagcactttcaataatgatattctttccaaaaaggaagacttcatagttcaggatctggaggtgtgggcatttgattgaaattcagactgccttaaaatataacattaaaaagactgggttcgatcagccctcctaaagctggctggaaaaagaagccccagcccagcctgcctcatcccaccccaatgcttcctttctgccatcatctcagagcatgatcacattgcagaaagattctggaaggtccatgtagagggcagacattgaagaaagaaacttaaaatccaggttgttgaaaagactttgtactcccacttcctccaaatccatacagtgaggaatcagagtgtttatagatatatgagttgaatgcaatttttatttttggtaactgtgaaaaataagatactgtggatatatacatgccttgtgtatttatcagcataattttcattaccaaaatgtacagctattatttgccatggaaaaggttagtctcatttagaaaaatcgaaagtgcacagcacttaaagggaatatatgaggtttttttttttttaaaaaaaaacttttatttattatttgtagtatattgtctgaaatgtgtcggcagttttttttcttttaatgtgtcaaatcttgaaatattaaatgtatacattttgtgctatgttttgggaacaaatctgtttgatttatatagttttatattgaattttttttgccctgattgtttagggtgataggtcttaagcagcatatatctatatatctgtatgtgggtatatagagatatatgtgtgtgtgtatgtatatgtacatatacatatatatgagtgtataattctaaatttctaaaaactcattatgaatgttcatcaatttgactattataggccagctttccatttagtcaataaaagcgtacatttttagttacttaccttgaacatattcgtgtgaaaaagaatacatcatttctcacagtcttaagttgatatttatagaaatgaatacctttgtgaacctagacttagaacaaatcctgcttttgaaaaaaaatgttttgcttcttacaaaatcatttgtgttaataacaaaaactttattttcggagtgttctttgtataacttttccaagcttttacattaacgagcaggcctctgtcttaaaagggactcagtatattaatttctgcattttttaaatcaaatgaaaaacgtcaaattggaccaattgtcttggtttcttgattcatttatttgagaaaaaaacaatacaaagaaatgcattcatatcaaaattggaatagaaaggaaaacctatttttaagatatcaacctattttcacatcataaaacatctattacataaaataaaggtccaggcatagtggctcttgcctgtaatcccagcactttgggaggccgaggcaggtggatcactcaaggtcacaagtttgagaccagtctggccaacatggtgaaaccccatctctactaaaagtacaaatattagccgactatgtggcgggcacctgtaatcccacctactcgggaggctgaggcaggagaattgcttgaatccgggaagcagaggttgtagtgagccaagatcgtgccactgcactctatcctgggtaacagcgagactctgtcttaaaaataataacaataataataataataaagacttacttaaccaatattattgattaccagacttttatgaaagccaaagactgcttgctagtaggaaaaaatttcaaataataaccaaagctgaaaaatggtctgtcataaattatttccccggtaatttttgaaaggaaaaatgtataacaagtactatttacatatctgcatttaaaaaagcaattcttagaatacttcctttacattattctcctattttagacattttgtgaaagagaacaaattgtccagtggcctcctgtcagatcaacaattattatactccttaattccatgcaaatttaaatgaatgctataaaattttaaatctgtagcctgggtgtacgtttcactcaagttctcctactgaggactcttgactaacagcatactggcagtttcaccttaacctgctcgttaaataatgtgttggtgtgagatatcaggaatgtctcatgatatcacgtttaccatttacaccatctgcaaccatatgctattaataaaatggaaaaaaacaaaatggtcattttgcatatacttcactctgacctagtttagtccatgatactataattgtgagagcatatccagatgctgtgttctctatgtaaaacagtattgtccattcagaaatgtgtgacccttcatttatggatattgactatatgtaatgcagtgctatcccaatattttcaataaaggactttatgcattcagtgattttctttcccaaagattcattcatcaggtatttactgggtaccagagtgtttatttttgtgagaggatggtgaaatatccaagactaaacaaggtccagagctcatgttttcactgctgccctggaaactccctcttcattccctgtagccaccctcctaattgtctcatcagttcacggaaactgctctcattatggttaccagagacaactcttggctgtatctaccagtctcttctaatctttctagctgtgcaatgaatgacaacctcctcctcttaacatctgtcttaacctacttcataatttccgtaagggacactttactctctgataaattttctttggcatcctgacacctagcccctagatgttgggctagatgaagaccccaagcagtcttcattgcttcataattcctcagttcataagtccatatcaaaggacttgggtgggaggaggcaaccaaatgtttcttcagactctactgaaaatgattagatgcatccccgtgctacaagccaccagagacatcctgcactattataagtatgtcttcccttaatttgatctccctctccttgatgccttttaaagttttagagacacattgatatggtttggctgtgtgtccccaccaacatctcattggaattataatccccacatgttgagggagggacctagtgggatgtgattagaacatgggggcggtttcccccatgctgttctcatgatagtgagggagttttcatgagatctgttttaaaatgtttggcagttccaccctcaccctctcttctgctgccatgtaagatgtgccttgcttcccctttgccttctgccatgattgtaaatttcctgacgcctacccagccatgtgaaactgtgagtccattaaacctcttttctttataa

SEQ ID NO: 160781 - DNA, 3133 bp, Homo sapiens
  Payload ID: 11420
  Gene Symbol: NCOA7
  Gene Name: nuclear receptor coactivator 7
  ENST ID: ENST00000438495
  CDS Start-End: 134-793
aatcatgcaggaaactagatactgagaaaacagttgtagctcagcgtggctacaagtaactgtggtgtggaagcagagtagagagaaaacttgttcctcattagagagagagccacacttctcactgctcacaatgagaggccaaagattacccttggacatccagattttctattgtgccagacctgacgaagagccttttgtgaagatcatcactgttgaagaggcaaagcgcaggaagagcacatgcagctactatgaagacgaggacgaagaggtgctgcctgtcctacggccccacagcgcgctcctggagaatatgcacatcgagcagctggcccgacgccttcctgcaagggtgcaagggtatccatggagactggcctatagcacgttagagcacgggaccagcttaaagacgctctaccggaaatcggcatcactagacagtcctgtcctattggtcatcaaagatatggataatcagatttttggagcatatgcaactcatcctttcaagttcagtgaccactattatggcacaggcgaaacttttctctacacattcagccctcattttaaggtctttaagtggagtggagaaaattcatactttatcaatggagacataagttctttagaacttggtggtggagggggacgatttggtttatggctagatgctgatttataccacggacgaagcaactcttgcagcactttcaataatgatattctttccaaaaaggaagacttcatagttcaggatctggaggtgtgggcatttgattgaaattcagactgccttaaaatataacattaaaaagactgggttcgatcagccctcctaaagctggctggaaaaagaagccccagcccagcctgcctcatcccaccccaatgcttcctttctgccatcatctcagagcatgatcacattgcagaaagattctggaaggtccatgtagagggcagacattgaagaaagaaacttaaaatccaggttgttgaaaagactttgtactcccacttcctccaaatccatacagtgaggaatcagagtgtttatagatatatgagttgaatgcaatttttatttttggtaactgtgaaaaataagatactgtggatatatacatgccttgtgtatttatcagcataattttcattaccaaaatgtacagctattatttgccatggaaaaggttagtctcatttagaaaaatcgaaagtgcacagcacttaaagggaatatatgaggtttttttttttttaaaaaaaaacttttatttattatttgtagtatattgtctgaaatgtgtcggcagttttttttcttttaatgtgtcaaatcttgaaatattaaatgtatacattttgtgctatgttttgggaacaaatctgtttgatttatatagttttatattgaattttttttgccctgattgtttagggtgataggtcttaagcagcatatatctatatatctgtatgtgggtatatagagatatatgtgtgtgtgtatgtatatgtacatatacatatatatgagtgtataattctaaatttctaaaaactcattatgaatgttcatcaatttgactattataggccagctttccatttagtcaataaaagcgtacatttttagttacttaccttgaacatattcgtgtgaaaaagaatacatcatttctcacagtcttaagttgatatttatagaaatgaatacctttgtgaacctagacttagaacaaatcctgcttttgaaaaaaaatgttttgcttcttacaaaatcatttgtgttaataacaaaaactttattttcggagtgttctttgtataacttttccaagcttttacattaacgagcaggcctctgtcttaaaagggactcagtatattaatttctgcattttttaaatcaaatgaaaaacgtcaaattggaccaattgtcttggtttcttgattcatttatttgagaaaaaaacaatacaaagaaatgcattcatatcaaaattggaatagaaaggaaaacctatttttaagatatcaacctattttcacatcataaaacatctattacataaaataaaggtccaggcatagtggctcttgcctgtaatcccagcactttgggaggccgaggcaggtggatcactcaaggtcacaagtttgagaccagtctggccaacatggtgaaaccccatctctactaaaagtacaaatattagccgactatgtggcgggcacctgtaatcccacctactcgggaggctgaggcaggagaattgcttgaatccgggaagcagaggttgtagtgagccaagatcgtgccactgcactctatcctgggtaacagcgagactctgtcttaaaaataataacaataataataataataaagacttacttaaccaatattattgattaccagacttttatgaaagccaaagactgcttgctagtaggaaaaaatttcaaataataaccaaagctgaaaaatggtctgtcataaattatttccccggtaatttttgaaaggaaaaatgtataacaagtactatttacatatctgcatttaaaaaagcaattcttagaatacttcctttacattattctcctattttagacattttgtgaaagagaacaaattgtccagtggcctcctgtcagatcaacaattattatactccttaattccatgcaaatttaaatgaatgctataaaattttaaatctgtagcctgggtgtacgtttcactcaagttctcctactgaggactcttgactaacagcatactggcagtttcaccttaacctgctcgttaaataatgtgttggtgtgagatatcaggaatgtctcatgatatcacgtttaccatttacaccatctgcaaccatatgctattaataaaatggaaaaaaacaaaatggtcattttgcatatacttcactctgacctagtttagtccatgatactataattgtgagagcatatccagatgctgtgttctctatgtaaaacagtattgtccattcagaaatgtgtgacccttcatttatggatattgactatatgtaatgcagtgctatcccaatattttcaataaaggactttatgcattcagtga

SEQ ID NO: 160782 - DNA, 581 bp, Homo sapiens
  Payload ID: 11420
  Gene Symbol: NCOA7
  Gene Name: nuclear receptor coactivator 7
  ENST ID: ENST00000453302
  CDS Start-End: 311-581
gacccctccttccacccgccgagaggatgcgctccccggcgcccagcagcagaggccaccgctcccagaaatgcatgcgaccgatccccttctcccggaccccaggagccggcgcccccgccctgtagattcccactctgtcgcccaggctggagtgcagtgatgtaatctcggctcactgcaacctccacttcccaggttcaagtgattctcctgcctcagcctccagagtagctgggattacagggttacgactcactgattaaaaagagggactttttcaaatactttgcacttttgattgtgtattatggataccaaggaagagaagaaggaacggaaacaaagttattttgctcgactgaaaaagaaaaaacaagccaaacaaaatgcagagacagcctcagctgtagctacaaggactcatactgggaaggaagataataatacagtagttttagagccagacaagtgcaacattgctgtggaagaggaatatatgactgatgagaaaaaaaagagaaaaagtaatcagttaaaggagatcaggcgtacagaactaaagagatattatagtattg

SEQ ID NO: 160783 - DNA, 765 bp, Homo sapiens
  Payload ID: 11420
  Gene Symbol: NCOA7
  Gene Name: nuclear receptor coactivator 7
  ENST ID: ENST00000417494
  CDS Start-End: 193-765
gacccctccttccacccgccgagaggatgcgctccccggcgcccagcagcagaggccaccgctcccagaaatgcatgcgaccgatccccttctcccggaccccaggagccggcgcccccgccctgtagggttacgactcactgattaaaaagagggactttttcaaatactttgcacttttgattgtgtattatggataccaaggaagagaagaaggaacggaaacaaagttattttgctcgactgaaaaagaaaaaacaagccaaacaaaatgcagagacagcctcagctgtagctacaaggactcatactgggaaggaagataataatacagtagttttagagccagacaagtgcaacattgctgtggaagaggaatatatgactgatgagaaaaaaaagagaaaaagtaatcagttaaaggagatcaggcgtacagaactaaagagatattatagtattgatgacaatcaaaacaaaacacatgataaaaaagagaagaagatggtggttcagaagccccatgggactatggaatacactgctggaaaccaggacaccctaaactccatagcactgaaatttaacatcactcccaataaattggtggaactgaataaacttttcacacatactattgttccaggccaggtcctttttgtgccagatgccaactctccttccagtaccttaaggctatcatcatccagtcctggtgctactgtctctccttcatcatcagatgcagaatatgataaattgcct

SEQ ID NO: 160784 - DNA, 548 bp, Homo sapiens
  Payload ID: 11420
  Gene Symbol: NCOA7
  Gene Name: nuclear receptor coactivator 7
  ENST ID: ENST00000428318
  CDS Start-End: 278-548
agaatttgcaagttaagacacatgtacctagccactgggacagggaggtcattgaggacctccagctgtgtgacccacagctgtgtgggtcagtttggtgtagttaaggggtctctgctggttctgttcttttaaatggtgccatgtgtacaaacaaggaacacttttctgatgattcaaaaaatactttgtcttcatcacagctcttttgagggttacgactcactgattaaaaagagggactttttcaaatactttgcacttttgattgtgtattatggataccaaggaagagaagaaggaacggaaacaaagttattttgctcgactgaaaaagaaaaaacaagccaaacaaaatgcagagacagcctcagctgtagctacaaggactcatactgggaaggaagataataatacagtagttttagagccagacaagtgcaacattgctgtggaagaggaatatatgactgatgagaaaaaaaagagaaaaagtaatcagttaaaggagatcaggcgtacagaactaaagagatattatagtattg

SEQ ID NO: 160785 - DNA, 2978 bp, Homo sapiens
  Payload ID: 11420
  Gene Symbol: NCOA7
  Gene Name: nuclear receptor coactivator 7
  ENST ID: ENST00000444128
  CDS Start-End: 53-532
agagaaaacttgttcctcattagagagagagccacacttctcactgctcacaatgagaggccaaagattacccttggacatccagattttctattgtgccagacctgacgaagagccttttgtgaagatcatcactgttgaagaggcaaagcgcaggaagagcacatgcagctactatgaagacgaggacgaagaggtgctgcctgtcctacggccccacagcgcgctcctggagaatatgcacatcgagcagctggcccgacgccttcctgcaagggtgcaagggtatccatggagactggcctatagcacgttagagcacgggaccagcttaaagacgctctaccggaaatcggcatcactagacagtcctgtcctattggtcatcaaagatatggataatcagatttttggagcatatgcaactcatcctttcaagttcagtgaccactattatggcacaggcgaaacttttctctacacattcagccctcattttaaggggacgatttggtttatggctagatgctgatttataccacggacgaagcaactcttgcagcactttcaataatgatattctttccaaaaaggaagacttcatagttcaggatctggaggtgtgggcatttgattgaaattcagactgccttaaaatataacattaaaaagactgggttcgatcagccctcctaaagctggctggaaaaagaagccccagcccagcctgcctcatcccaccccaatgcttcctttctgccatcatctcagagcatgatcacattgcagaaagattctggaaggtccatgtagagggcagacattgaagaaagaaacttaaaatccaggttgttgaaaagactttgtactcccacttcctccaaatccatacagtgaggaatcagagtgtttatagatatatgagttgaatgcaatttttatttttggtaactgtgaaaaataagatactgtggatatatacatgccttgtgtatttatcagcataattttcattaccaaaatgtacagctattatttgccatggaaaaggttagtctcatttagaaaaatcgaaagtgcacagcacttaaagggaatatatgaggtttttttttttttaaaaaaaaacttttatttattatttgtagtatattgtctgaaatgtgtcggcagttttttttcttttaatgtgtcaaatcttgaaatattaaatgtatacattttgtgctatgttttgggaacaaatctgtttgatttatatagttttatattgaattttttttgccctgattgtttagggtgataggtcttaagcagcatatatctatatatctgtatgtgggtatatagagatatatgtgtgtgtgtatgtatatgtacatatacatatatatgagtgtataattctaaatttctaaaaactcattatgaatgttcatcaatttgactattataggccagctttccatttagtcaataaaagcgtacatttttagttacttaccttgaacatattcgtgtgaaaaagaatacatcatttctcacagtcttaagttgatatttatagaaatgaatacctttgtgaacctagacttagaacaaatcctgcttttgaaaaaaaatgttttgcttcttacaaaatcatttgtgttaataacaaaaactttattttcggagtgttctttgtataacttttccaagcttttacattaacgagcaggcctctgtcttaaaagggactcagtatattaatttctgcattttttaaatcaaatgaaaaacgtcaaattggaccaattgtcttggtttcttgattcatttatttgagaaaaaaacaatacaaagaaatgcattcatatcaaaattggaatagaaaggaaaacctatttttaagatatcaacctattttcacatcataaaacatctattacataaaataaaggtccaggcatagtggctcttgcctgtaatcccagcactttgggaggccgaggcaggtggatcactcaaggtcacaagtttgagaccagtctggccaacatggtgaaaccccatctctactaaaagtacaaatattagccgactatgtggcgggcacctgtaatcccacctactcgggaggctgaggcaggagaattgcttgaatccgggaagcagaggttgtagtgagccaagatcgtgccactgcactctatcctgggtaacagcgagactctgtcttaaaaataataacaataataataataataaagacttacttaaccaatattattgattaccagacttttatgaaagccaaagactgcttgctagtaggaaaaaatttcaaataataaccaaagctgaaaaatggtctgtcataaattatttccccggtaatttttgaaaggaaaaatgtataacaagtactatttacatatctgcatttaaaaaagcaattcttagaatacttcctttacattattctcctattttagacattttgtgaaagagaacaaattgtccagtggcctcctgtcagatcaacaattattatactccttaattccatgcaaatttaaatgaatgctataaaattttaaatctgtagcctgggtgtacgtttcactcaagttctcctactgaggactcttgactaacagcatactggcagtttcaccttaacctgctcgttaaataatgtgttggtgtgagatatcaggaatgtctcatgatatcacgtttaccatttacaccatctgcaaccatatgctattaataaaatggaaaaaaacaaaatggtcattttgcatatacttcactctgacctagtttagtccatgatactataattgtgagagcatatccagatgctgtgttctctatgtaaaacagtattgtccattcagaaatgtgtgacccttcatttatggatattgactatatgtaatgcagtgctatcccaatattttcaataaaggactttatgcattcagtga

SEQ ID NO: 160786 - DNA, 488 bp, Homo sapiens
  Payload ID: 11420
  Gene Symbol: NCOA7
  Gene Name: nuclear receptor coactivator 7
  ENST ID: ENST00000419660
  CDS Start-End: 138-488
actccattttatttttcacattggccagtgtaaacttttaagtttacagttgctttgttatcttttcttacagggttacgactcactgattaaaaagagggactttttcaaatactttgcacttttgattgtgtattatggataccaaggaagagaagaaggaacggaaacaaagttattttgctcgactgaaaaagaaaaaacaagccaaacaaaatgcagagacagcctcagctgtagctacaaggactcatactgggaaggaagataataatacagtagttttagagccagacaagtgcaacattgctgtggaagaggaatatatgactgatgagaaaaaaaagagaaaaagtaatcagttaaaggagatcaggcgtacagaactaaagagatattatagtattgatgacaatcaaaacaaaacacatgataaaaaagagaagaagatggtggttcagaagccccatgggactatggaatacact

SEQ ID NO: 160787 - DNA, 10720 bp, Homo sapiens
  Payload ID: 11421
  Gene Symbol: NCOR1
  Gene Name: nuclear receptor corepressor 1
  Uniprot ID: O75376
  ENST ID: ENST00000268712
  CDS Start-End: 259-7581
ggagggagaggggttgagtcaagatggcggccaaggtggcgaagcagcagccgcggcggcggcggcggctggagtgagcgtccgactcgccgcgccgaacgaggtcccggtgtagggccgcgcgccgtggccgcgtcccactcctcaggccggggcgcacgtcggctcccacgcttagccagctcccggtggtttcctagaaacatgattgtttattggcattgatctcacagtctggtgaggacttctttactgataatgtcaagttcaggttatcctcccaaccaaggagcattcagcacagaacaaagtcgttatcctcctcactctgtccagtatacatttcccaacacccgccaccagcaggagttcgcagtccctgattatcgttcctctcatcttgaagtgagtcaggcatcacagcttttgcagcaacagcagcagcaacagcttcgaaggcgaccttccttgctttcagaatttcacccaggttctgacaggcctcaagaaaggagaactagttatgaaccgtttcatccaggcccatccccagtggatcatgattcactggaatcgaagcgaccacgtctggaacaggtttctgattctcattttcagcgtgtcagtgctgcggttttgcctttagtgcacccgctgccagaagggctgagggcttctgcagatgctaagaaggatccagcattcggaggcaaacatgaagctccatcctctccaatttcggggcaaccatgtggagatgatcaaaatgcttcaccttcaaaactctcaaaggaagagttaatacagagtatggatcgtgtagatcgagaaattgcaaaagtagaacagcagatccttaaactgaaaaagaaacaacaacagcttgaagaagaggcagctaaacctcctgagcctgagaagcccgtgtcccctcctcctgtggagcagaaacaccgcagtattgtccaaattatttatgatgagaatcggaaaaaagcagaagaagctcataaaatttttgaaggtcttggcccaaaagttgaactgccactgtataaccagccatcagataccaaggtgtaccatgagaacatcaagacaaaccaggtgatgaggaaaaaactcattttattttttaaaagaagaaatcatgcaagaaaacaaagggaacaaaaaatctgccagcgttatgatcagctcatggaggcatgggagaaaaaagtggacagaatagaaaataatcctcggaggaaagctaaagaaagcaaaacaagggaatactatgaaaagcagtttccagaaattcgaaaacaaagagaacagcaagaaagatttcagcgagttgggcagaggggagctggtctttcagccaccattgctaggagtgagcatgagatttctgaaattattgatgggctctctgagcaggagaataatgagaaacaaatgcggcagctctctgtgattccacctatgatgtttgatgcagaacaaagacgagtcaagttcattaacatgaatgggcttatggaggaccctatgaaagtgtataaagataggcagtttatgaatgtttggactgaccatgaaaaggagatctttaaggacaagtttatccagcatccaaaaaactttggactaattgcatcatacttggagaggaagagtgttcctgattgtgttttgtattactatttaaccaagaaaaatgagaattataaagccctcgtcagaaggaattatgggaaacgcagaggcagaaaccagcaaattgctcgaccctcgcaagaagaaaaagtagaagaaaaagaagaggataaagcagaaaaaacagaaaaaaaagaagaagaaaagaaagatgaagaggaaaaagatgaaaaagaagactccaaagaaaataccaaggaaaaggacaagatagatggtacagcagaagaaactgaggaaagagagcaagccacaccccgggggcgaaagactgccaacagtcagggccgccgtaagggccggatcaccaggtccatgacaaacgaagctgcagctgccagtgctgcagccgcagcggctactgaagagcccccaccacctctgccaccgccaccagaacccatttctacagagcctgtggagacctctcgatggacagaagaagaaatggaagttgctaaaaaaggtctagtagaacatggtcgtaactgggcagcaattgctaaaatggtgggaacgaaaagtgaagctcaatgtaaaaacttctattttaactataaaaggcgacacaatcttgacaacctcttacagcagcataaacagaaaacttcacgaaaacctcgtgaagagcgagatgtgtctcaatgtgaaagtgtcgcttccactgtttctgctcaggaggatgaagatattgaagcctccaatgaagaagaaaatccagaagacagcgaagttgaagctgtcaagcccagcgaggacagtcctgaaaatgctacttctcgaggaaacacagaacctgcggttgagcttgagcccaccacggaaactgcacccagtacatctccctccttagcagttccaagtacaaaaccagctgaagatgaaagtgtggagacccaggtgaatgacagcatcagtgctgagacagcagagcagatggatgtagatcagcaggagcacagtgctgaagagggttctgtttgtgatcccccacccgctaccaaagctgactctgtggacgttgaagtgagggtgccagaaaaccatgcatctaaagttgaaggtgataataccaaagaaagagacttggatagagccagtgagaaggtggaacctagagatgaagatttggtggtagctcagcaaataaatgcccaaaggcccgagccccagtcagacaatgattccagtgccacgtgcagcgctgatgaggatgtggatggagagccagagaggcagagaatgtttcctatggactcaaagccttcactgttaaaccccactggatctatactcgtctcatctccgttaaaaccaaatccactggatctgccacagcttcagcatcgagctgctgttatcccaccaatggtatcctgcaccccatgtaacataccaattggaaccccagtgagcggctatgctctctaccagcgacacattaaagcaatgcatgagtcagcactcctggaggagcagcggcagagacaagaacagatagatttggaatgtagaagttctacaagtccatgtggcacatccaagagtccaaacagagagtgggaagtccttcagcctgctccacatcaagtgataactaatctccctgaaggcgttcggcttccgacaactcgaccaaccaggccaccgccccctctcatcccgtcatccaaaaccacagtggcttcagaaaaaccatcttttataatgggaggctccatctcacagggaacaccaggcacttatttgacttctcataatcaggcttcctacactcaagaaacacccaagccgtcagtgggatctatctctcttggactgccacggcaacaggaatctgccaaatcagctactttgccctacatcaagcaggaagaattttctccccgaagccaaaactcacaacctgagggtctgttggtcagggcccaacatgaaggtgtagtcagaggtaccgcaggagccatacaagaaggaagtataactcggggaactccaaccagcaaaatttcagtggagagcattccatccctacggggctctatcactcagggcaccccggctctgccccagactggcataccaacagaggctttggtgaaggggtccatttcgagaatgcccattgaagacagcagtcctgagaaaggcagagaggaagctgcatccaaaggccatgttatttatgaaggcaaaagtggacatatcttgtcatatgataatattaagaatgcccgagaagggactaggagtccaagaacagctcatgaaatcagtttaaagagaagctatgaatcagtggaaggaaatataaagcaagggatgtcaatgagggagtctcctgtatcagcaccgttagaggggctgatatgccgagcattacccagggggagtcctcattctgacctcaaagaaaggactgtattgtctggctccataatgcaggggacaccaagagcaacaactgaaagctttgaagatggccttaaatatcccaaacaaattaaaagggaaagtcctcccatacgagcatttgaaggtgccattaccaaaggaaaaccatatgatggcatcaccaccatcaaagaaatggggcgttccattcatgagattccaaggcaagatattttaactcaggaaagtcggaaaactccagaagtggtccagagcacacggccgataattgagggttccatttcccagggcacaccaataaagtttgacaacaactcaggtcaatctgccatcaaacacaatgtcaaatccttaatcacggggcctagcaaactatcccgtggaatgcctccgctggaaattgtgccagagaacataaaagtggtagaacggggaaaatatgaggatgtgaaagcaggcgagaccgtgcgttcccggcacacgtcagtggtaagctctggcccctccgttcttaggtccacactgcatgaagctcccaaagcacaactgagccctgggatttatgatgacaccagtgcacggaggacccctgtgagttatcaaaacaccatgtccagaggctcacccatgatgaacagaacttctgatgttacaatttcttctaacaagtctaccaatcatgaaaggaaatcgacactgacccctacccagagggaaagtatcccagcgaagtctccagtgcctggggtggaccctgtcgtgagccacagtccgtttgatccccatcacagaggcagcactgcaggcgaggtttatcggagccacctgcccacgcacttggatccagccatgccttttcacagggctttggatcctgcagcggctgcttacctgtttcagagacagctttcaccaactccaggttacccaagtcagtatcagctttacgcaatggagaacacaagacagacaatcttaaatgattacattacctcacaacagatgcaagtgaacttgcgtccagatgtggccagaggactctccccaagagagcagccactgggtctcccatacccagcaacgagaggaatcattgacctgaccaatatgcctccaacaattttagtgcctcatccagggggaacaagcactcctcccatggacagaatcacttatattcctggtacacagattactttccctcccaggccgtacaactctgcttccatgtctccaggacacccaacacaccttgcagctgctgcaagtgctgagagggaacgggaacgggagcgggagaaggagcgggagcgggaacggattgctgcagcttcctccgacctctacctgcggccaggctcagaacagcctggccgacctggcagtcatggatatgttcgctccccttccccttcagtaagaactcaggagaccatgttgcaacagagacccagtgttttccaaggaaccaatggaaccagtgtaatcacacctttggatccaactgctcagctacgaatcatgccactgcctgctgggggcccttcaataagccaaggcctgccagcctcccgttacaacactgctgcggatgccctggctgctcttgtggatgctgcagcttctgcaccccagatggatgtgtccaaaacaaaagagagtaagcatgaagctgccaggttagaagaaaatttgagaagcaggtcagcagcagttagtgaacagcagcagctagagcagaaaaccctggaggtggagaagagatctgttcagtgtttatacacttcttcagcctttccaagtggcaagccccagcctcattcttcagtagtttattctgaggctgggaaagataaagggcctcctccaaaatccagatatgaggaagagctaaggaccagagggaagactaccattactgcagctaacttcatagacgtgatcatcacccggcaaattgcctcggacaaggatgcgagggaacgtggctctcaaagttcagactcttctagtagcttatcttctcacaggtatgaaacacctagcgatgctattgaggtgataagtcctgccagctcacctgcgccaccccaggagaaactgcagacctatcagccagaggttgttaaggcaaatcaagcggaaaatgatcctaccagacaatatgaaggaccattacatcactatcgaccacagcaggaatcaccatctccccaacaacagctgcccccttcttcacaggcagagggaatggggcaagtgcccaggacccatcggctgatcacacttgctgatcacatctgtcaaattatcacacaagattttgctagaaatcaagtttcctcgcagactccccagcagcctcctacttctacattccagaactcaccttctgctttggtatctacacctgtgaggactaaaacatcaaaccgttacagcccagaatcccaggctcagtctgtccatcatcaaagaccaggttcaagggtctctccagaaaatcttgtggacaaatccaggggaagtaggcctggaaaatccccagagaggagtcacgtctcttcggagccctacgagcccatctccccaccccaggttccggttgtgcatgagaaacaggacagcttgctgctcttgtctcagaggggcgcagagcctgcagagcagaggaatgatgcccgctcaccagggagtataagctacttgccttcattcttcaccaagcttgaaaatacatcacccatggttaaatcaaagaagcaggagatttttcgtaagttgaactcctctggtggaggtgactctgatatggcagctgctcagccaggaactgagatctttaatctgccagcagttactacgtcaggctcagttagctctagaggccattcttttgctgatcctgccagtaatcttgggctggaagacattatcaggaaggctctcatgggaagctttgatgacaaagttgaggatcatggagttgtcatgtcccagcctatgggagtagtgcctggtactgccaacacctcagttgtgaccagtggtgagacacgaagagaggaaggggacccatcacctcattcaggaggagtttgcaaaccaaagctgatcagcaagtcaaacagcaggaaatctaagtctcctatacctgggcaaggctacttaggaacggaacggccctcttcagtctcctctgtacattcagaaggggattaccataggcagacgccagggtgggcctgggaagacaggccctcttcaacaggctcaactcagtttccttataaccctctgactatgcggatgctcagcagtactccaccaacaccgattgcatgtgctccctctgcggtgaaccaagcagctcctcaccaacagaacaggatctgggagcgagagcctgccccactgctctcagcacagtacgagaccctgtcggatagtgatgactgaactgcacaaagtgaggggaacagggtgcaggagagggatctctagtttttgtggtttaatttttagtagcaggtcaaaaacctgccctcctgtgacttattccctgagacttttcaggagagccagcccacagatgatgaagaaatgatggaagttcatttggagagtcaaatgggaaaaaaacaaacaaaaaactgcctttgatacaggcaattcagtggactataataatagtggagggttgagatgtagagtttttaaaaagtgaacagttgctgttcttacatctgtaaagaaaaccataatgtctttaaatcactcttctgtaaatagatgacctttttgcagtgtatatccccttgctgtagtatctggtgtacttatgttcaaatcagcgcatcaactttgggggtgatttttaaaaatctttttgtctatctatctttttaaccctagccttctaaacaacctcatacagcccagttacataatgttggctgtcacgggcattgtacttttatctgatattgtttcctctaaattcagctttccagtgatgtttaaaatcttgtgaaaatgtttagatttttaacacagaccctgtcataaaatctgtacattagggtcaaaaggtaaaagtaacaaattctgccatattgtaaatttccagtgcaggctttaatttttttttttcattagtagcactgaaaaaatattactgcatgggtatgttctagttcagtttataaagttttaaaggcttatttgaggcatacctcactgttacgcacactggtaatttaaccatgcccctaagtattccttttctcctgcatttgatgcagcccaacaaagcttttgttttgaaataaatttgactaccctgtccatagctacagtagattatttgtggtttaaggctcctggtgtctcaggttccaaaggaaaagcttacatatttttcccttagtttgaatatatgattggttgggttaaaagataatgatctgtgtagtatttagataagctttatgctgcatcctgaaaaactcatggtgaacacagtcctttttccccatcactatggaccagcatttactctcactttgctcccttgggacaagagtttactgttaaatgttttcatttcacagagtctcaaggtgcaaataatttaaaagactgaattctaaactaattatggtactagagggccagttttatctttcattaagaattgcttgctgaattttaaagtttttttcatacaatttatcatagcatttaagtatctttctataacatagatactaacagttttgggagaatgccactggtaactggaaaggggagaaacagatctctcaggatgataaaaattagcactttacagactttcaagtagacctaaacttttaaacaaaagtactcaaggcttttaaggaagcagctctgtgattagctactgaccaagaccctcctatcactggtgtctaatccctatgttacagatgaagacacaggtttagtactttgcccatatagttaaattagtgacagagataggccataagcccacatttgtcttcagtcaaagctttcactcctgtccctgttccactcctgtatacctgaggtccccaacataaactttagatcaggcttagtggtcagcattcctagtacttggaaagttggtattttttacaacagatatatgtaaacatataaaaatttcaaaatgaatgaaaaacagtgactaaatgttccacttcacagttttctgctgaatttttttttttcaggtactggtaatattttagagtttgttaataatttatattgccaacctaccataaaagagattatgatggtatttttctatgaccctgagggtcttaagctattctgagtcagaatacagttgacccttgaacaacacgggtttgaactgtgtgggtccacttatacatggattttcttccacctctgccacccaagatagcaagaccaaccccttctcatcctcagcctattcaacatgaagatgacaaggatgaagaccttcatgatgatccacttccacttaatgaatagtaaatatattttctcttccttataatcttaacaaacattttctcttctctagcttactttattgtaagaatacagtatataatacatatacaaaatatgtgtcaatcgactatgttatccgtaagacttctggtcagcagtaggccatgagtagttaagttttggaggagtcaaagttagatgtggatttttgactacttagggggtctatgcccctaactcctgcattatttgaaggtcaaccgtatagtttctgagaacatgtcagatcagagcctaacttcttactcttgcagttctacctgaggacccgaaggtgaggtgctgtgaaccactccctccatcctcatcataatgcatgtgcgtattactttatttaccatcacctggagaagaaatctcagaatgagagttaaaatccaataatagttcttggttcaaaataaatgaaaggacagaattctcacatggtttacctatggaggttcaccttatcatgatttaagtggtaagcacagagcagcactgacaacttactgtggttcactgcaaaccaaaacatgatattctttgtagacttagatttcagtgttctgacactatatccttacacgtgatttttttagcacccagaactaaattaaggtcttcctaatactcttcataaaagtattctgacagccagttttccactgcatgtttatgactgcaaatttcataatgcttttaattttggtacactgagtgattctattttaaaaatatttatgcccagaaaactccagtgaccattggacagttaaaaaattttaatgacacgattttaaccaattcacttttgaatttagaccaatcagtaaaggagatcagtcctccttttgcttcagtaccttattttacaacagtgtaaatgaactgtaatgaaaacacccacatgaagagactgtcctgaaaactcctagtgtttccaacaacgagaccatgagctgagtcactgtggatgatttaaaattaataaataaataaaacttggaatgaaaaa

SEQ ID NO: 160788 - DNA, 3106 bp, Homo sapiens
  Payload ID: 11421
  Gene Symbol: NCOR1
  Gene Name: nuclear receptor corepressor 1
  Uniprot ID: O75376
  ENST ID: ENST00000395848
  CDS Start-End: 71-2815
gtggtttcctagaaacatgattgtttattggcattgatctcacagtctggtgaggacttctttactgataatgtcaagttcaggttatcctcccaaccaaggagcattcagcacagaacaaagtcgttatcctcctcactctgtccagtatacatttcccaacacccgccaccagcaggatccagcattcggaggcaaacatgaagctccatcctctccaatttcggggcaaccatgtggagatgatcaaaatgcttcaccttcaaaactctcaaaggaagagttaatacagagtatggatcgtgtagatcgagaaattgcaaaagtagaacagcagatccttaaactgaaaaagaaacaacaacagcttgaagaagaggcagctaaacctcctgagcctgagaagcccgtgtcccctcctcctgtggagcagaaacaccgcagtattgtccaaattatttatgatgagaatcggaaaaaagcagaagaagctcataaaatttttgaaggtcttggcccaaaagttgaactgccactgtataaccagccatcagataccaaggtgtaccatgagaacatcaagacaaaccaggtgatgaggaaaaaactcattttattttttaaaagaagaaatcatgcaagaaaacaaagggaacaaaaaatctgccagcgttatgatcagctcatggaggcatgggagaaaaaagtggacagaatagaaaataatcctcggaggaaagctaaagaaagcaaaacaagggaatactatgaaaagcagtttccagaaattcgaaaacaaagagaacagcaagaaagatttcagcgagttgggcagaggggagctggtctttcagccaccattgctaggagtgagcatgagatttctgaaattattgatgggctctctgagcaggagaataatgagaaacaaatgcggcagctctctgtgattccacctatgatgtttgatgcagaacaaagacgagtcaagttcattaacatgaatgggcttatggaggaccctatgaaagtgtataaagataggcagtttatgaatgtttggactgaccatgaaaaggagatctttaaggacaagtttatccagcatccaaaaaactttggactaattgcatcatacttggagaggaagagtgttcctgattgtgttttgtattactatttaaccaagaaaaatgagaattataaagccctcgtcagaaggaattatgggaaacgcagaggcagaaaccagcaaattgctcgaccctcgcaagaagaaaaagtagaagaaaaagaagaggataaagcagaaaaaacagaaaaaaaagaagaagaaaagaaagatgaagaggaaaaagatgaaaaagaagactccaaagaaaataccaaggaaaaggacaagatagatggtacagcagaagaaactgaggaaagagagcaagccacaccccgggggcgaaagactgccaacagtcagggccgccgtaagggccggatcaccaggtccatgacaaacgaagctgcagctgccagtgctgcagccgcagcggctactgaagagcccccaccacctctgccaccgccaccagaacccatttctacagagcctgtggagacctctcgatggacagaagaagaaatggaagttgctaaaaaaggtctagtagaacatggtcgtaactgggcagcaattgctaaaatggtgggaacgaaaagtgaagctcaatgtaaaaacttctattttaactataaaaggcgacacaatcttgacaacctcttacagcagcataaacagaaaacttcacgaaaacctcgtgaagagcgagatgtgtctcaatgtgaaagtgtcgcttccactgtttctgctcaggaggatgaagatattgaagcctccaatgaagaagaaaatccagaagacagcgaaggtgcagaaaatagttctgatacagaaagtgctccttctccttcaccagttgaagctgtcaagcccagcgaggacagtcctgaaaatgctacttctcgaggaaacacagaacctgcggttgagcttgagcccaccacggaaactgcacccagtacatctccctccttagcagttccaagtacaaaaccagctgaagatgaaagtgtggagacccaggtgaatgacagcatcagtgctgagacagcagagcagatggatgtagatcagcaggagcacagtgctgaagagggttctgtttgtgatcccccacccgctaccaaagctgactctgtggacgttgaagtgagggtgccagaaaaccatgcatctaaagttgaaggtgataataccaaagaaagagacttggatagagccagtgagaaggtggaacctagagatgaagatttggtggtagctcagcaaataaatgcccaaaggcccgagccccagtcagacaatgattccagtgccacgtgcagcgctgatgaggatgtggatggagagccagagaggcagagaatgtttcctatggactcaaagccttcactgttaaaccccactggatctatactcgtctcatctccgttaaaaccaaatccactggatctgccacagcttcagcatcgagctgctgttatcccaccaatggtatcctgcaccccatgtaacataccaattggaaccccagtgagcggctatgctctctaccagcgacacattaaagcaatgcatgagtcagcactcctggaggagcagcggcagagacaagaacagatagatttggaatgtagaagttctacaagtccatgtggcacatccaagagtccaaacagagagtgggaaggtaggtagatagagctatcaccaagagaacttttatgaagggaaataaagctaaacccaaaagcagtgtccattgtgctttgtaagttgtcagcctcccaactgattattatatttgtcctaacagacacagttccttaaattgaccttaaactatgaagaaatgttagtattattaactactaaaggatgccagtaacatttttaatagcattctagttaatgtgaattttctgatattcatctttgtgctggaagacattataaataaagttatgctttatgttccgttcatctgaa

SEQ ID NO: 160789 - DNA, 3419 bp, Homo sapiens
  Payload ID: 11421
  Gene Symbol: NCOR1
  Gene Name: nuclear receptor corepressor 1
  ENST ID: ENST00000395849
  CDS Start-End: 1-3215
tttcagtggagagcattccatccctacggggctctatcactcagggcacaccaataaagtttgacaacaactcaggtcaatctgccatcaaacacaatgtcaaatccttaatcacggggcctagcaaactatcccgtggaatgcctccgctggaaattgtgccagagaacataaaagtggtagaacggggaaaatatgaggatgtgaaagcaggcgagaccgtgcgttcccggcacacgtcagtggtaagctctggcccctccgttcttaggtccacactgcatgaagctcccaaagcacaactgagccctgggatttatgatgacaccagtgcacggaggacccctgtgagttatcaaaacaccatgtccagaggctcacccatgatgaacagaacttctgatgttacaatttcttctaacaagtctaccaatcatgaaaggaaatcgacactgacccctacccagagggaaagtatcccagcgaagtctccagtgcctggggtggaccctgtcgtgagccacagtccgtttgatccccatcacagaggcagcactgcaggcgaggtttatcggagccacctgcccacgcacttggatccagccatgccttttcacagggctttggatcctgcagcggctgcttacctgtttcagagacagctttcaccaactccaggttacccaagtcagtatcagctttacgcaatggagaacacaagacagacaatcttaaatgattacattacctcacaacagatgcaagtgaacttgcgtccagatgtggccagaggactctccccaagagagcagccactgggtctcccatacccagcaacgagaggaatcattgacctgaccaatatgcctccaacaattttagtgcctcatccagggggaacaagcactcctcccatggacagaatcacttatattcctggtacacagattactttccctcccaggccgtacaactctgcttccatgtctccaggacacccaacacaccttgcagctgctgcaagtgctgagagggaacgggaacgggagcgggagaaggagcgggagcgggaacggattgctgcagcttcctccgacctctacctgcggccaggctcagaacagcctggccgacctggcagtcatggatatgttcgctccccttccccttcagtaagaactcaggagaccatgttgcaacagagacccagtgttttccaaggaaccaatggaaccagtgtaatcacacctttggatccaactgctcagctacgaatcatgccactgcctgctgggggcccttcaataagccaaggcctgccagcctcccgttacaacactgctgcggatgccctggctgctcttgtggatgctgcagcttctgcaccccagatggatgtgtccaaaacaaaagagagtaagcatgaagctgccaggttagaagaaaatttgagaagcaggtcagcagcagttagtgaacagcagcagctagagcagaaaaccctggaggtggagaagagatctgttcagtgtttatacacttcttcagcctttccaagtggcaagccccagcctcattcttcagtagtttattctgaggctgggaaagataaagggcctcctccaaaatccagatatgaggaagagctaaggaccagagggaagactaccattactgcagctaacttcatagacgtgatcatcacccggcaaattgcctcggacaaggatgcgagggaacgtggctctcaaagttcagactcttctagtagcttatcttctcacaggtatgaaacacctagcgatgctattgaggtgataagtcctgccagctcacctgcgccaccccaggagaaactgcagacctatcagccagaggttgttaaggcaaatcaagcggaaaatgatcctaccagacaatatgaaggaccattacatcactatcgaccacagcaggaatcaccatctccccaacaacagctgcccccttcttcacaggcagagggaatggggcaagtgcccaggacccatcggctgatcacacttgctgatcacatctgtcaaattatcacacaagattttgctagaaatcaagtttcctcgcagactccccagcagcctcctacttctacattccagaactcaccttctgctttggtatctacacctgtgaggactaaaacatcaaaccgttacagcccagaatcccaggctcagtctgtccatcatcaaagaccaggttcaagggtctctccagaaaatcttgtggacaaatccaggggaagtaggcctggaaaatccccagagaggagtcacgtctcttcggagccctacgagcccatctccccaccccaggttccggttgtgcatgagaaacaggacagcttgctgctcttgtctcagaggggcgcagagcctgcagagcagaggaatgatgcccgctcaccagggagtataagctacttgccttcattcttcaccaagcttgaaaatacatcacccatggttaaatcaaagaagcaggagatttttcgtaagttgaactcctctggtggaggtgactctgatatggcagctgctcagccaggaactgagatctttaatctgccagcagttactacgtcaggctcagttagctctagaggccattcttttgctgatcctgccagtaatcttgggctggaagacattatcaggaaggctctcatgggaagctttgatgacaaagttgaggatcatggagttgtcatgtcccagcctatgggagtagtgcctggtactgccaacacctcagttgtgaccagtggtgagacacgaagagaggaaggggacccatcacctcattcaggaggagtttgcaaaccaaagctgatcagcaagtcaaacagcaggaaatctaagtctcctatacctgggcaaggctacttaggaacggaacggccctcttcagtctcctctgtacattcagaaggggattaccataggcagacgccagggtgggcctgggaagacaggccctcttcaacaggctcaactcagtttccttataaccctctgactatgcggatgctcagcagtactccaccaacaccgattgcatgtgctccctctgcggtgaaccaagcagctcctcaccaacagaacaggatctgggagcgagagcctgccccactgctctcagcacagtacgagaccctgtcggatagtgatgactgaactgcacaaagtgaggggaacagggtgcaggagagggatctctagtttttgtggtttaatttttagtagcaggtcaaaaacctgccctcctgtgacttattccctgagacttttcaggagagccagcccacagatgatgaagaaatgatggaagttcatttggagagtcaaatgggaaaaaaacaaacaaaaaactgcctttga

SEQ ID NO: 160790 - DNA, 7950 bp, Homo sapiens
  Payload ID: 11421
  Gene Symbol: NCOR1
  Gene Name: nuclear receptor corepressor 1
  Uniprot ID: O75376
  ENST ID: ENST00000395851
  CDS Start-End: 45-7058
attggcattgatctcacagtctggtgaggacttctttactgataatgtcaagttcaggttatcctcccaaccaaggagcattcagcacagaacaaagtcgttatcctcctcactctgtccagtatacatttcccaacacccgccaccagcaggagttcgcagtccctgattatcgttcctctcatcttgaagtgagtcaggcatcacagcttttgcagcaacagcagcagcaacagcttcgaaggcgaccttccttgctttcagaatttcacccaggttctgacaggcctcaagaaaggagaactagttatgaaccgtttcatccaggcccatccccagtggatcatgattcactggaatcgaagcgaccacgtctggaacaggtttctgattctcattttcagcgtgtcagtgctgcggttttgcctttagtgcacccgctgccagaagggctgagggcttctgcagatgctaagaaggatccagcattcggaggcaaacatgaagctccatcctctccaatttcggggcaaccatgtggagatgatcaaaatgcttcaccttcaaaactctcaaaggaagagttaatacagagtatggatcgtgtagatcgagaaattgcaaaagtagaacagcagatccttaaactgaaaaagaaacaacaacagcttgaagaagaggcagctaaacctcctgagcctgagaagcccgtgtcccctcctcctgtggagcagaaacaccgcagtattgtccaaattatttatgatgagaatcggaaaaaagcagaagaagctcataaaatttttgaaggtcttggcccaaaagttgaactgccactgtataaccagccatcagataccaaggtgtaccatgagaacatcaagacaaaccaggtgatgaggaaaaaactcattttattttttaaaagaagaaatcatgcaagaaaacaaagggaacaaaaaatctgccagcgttatgatcagctcatggaggcatgggagaaaaaagtggacagaatagaaaataatcctcggaggaaagctaaagaaagcaaaacaagggaatactatgaaaagcagtttccagaaattcgaaaacaaagagaacagcaagaaagatttcagcgagttgggcagaggggagctggtctttcagccaccattgctaggagtgagcatgagatttctgaaattattgatgggctctctgagcaggagaataatgagaaacaaatgcggcagctctctgtgattccacctatgatgtttgatgcagaacaaagacgagtcaagttcattaacatgaatgggcttatggaggaccctatgaaagtgtataaagataggcagtttatgaatgtttggactgaccatgaaaaggagatctttaaggacaagtttatccagcatccaaaaaactttggactaattgcatcatacttggagaggaagagtgttcctgattgtgttttgtattactatttaaccaagaaaaatgagaattataaagccctcgtcagaaggaattatgggaaacgcagaggcagaaaccagcaaattgctcgaccctcgcaagaagaaaaagtagaagaaaaagaagaggataaagcagaaaaaacagaaaaaaaagaagaagaaaagaaagatgaagaggaaaaagatgaaaaagaagactccaaagaaaataccaaggaaaaggacaagatagatggtacagcagaagaaactgaggaaagagagcaagccacaccccgggggcgaaagactgccaacagtcagggccgccgtaagggccggatcaccaggtccatgacaaacgaagctgcagctgccagtgctgcagccgcagcggctactgaagagcccccaccacctctgccaccgccaccagaacccatttctacagagcctgtggagacctctcgatggacagaagaagaaatggaagttgctaaaaaaggtctagtagaacatggtcgtaactgggcagcaattgctaaaatggtgggaacgaaaagtgaagctcaatgtaaaaacttctattttaactataaaaggcgacacaatcttgacaacctcttacagcagcataaacagaaaacttcacgaaaacctcgtgaagagcgagatgtgtctcaatgtgaaagtgtcgcttccactgtttctgctcaggaggatgaagatattgaagcctccaatgaagaagaaaatccagaagacagcgaaggtgcagaaaatagttctgatacagaaagtgctccttctccttcaccagttgaagctgtcaagcccagcgaggacagtcctgaaaatgctacttctcgaggaaacacagaacctgcggttgagcttgagcccaccacggaaactgcacccagtacatctccctccttagcagttccaagtacaaaaccagctgaagatgaaagtgtggagacccaggtgaatgacagcatcagtgctgagacagcagagcagatggatgtagatcagcaggagcacagtgctgaagagggttctgtttgtgatcccccacccgctaccaaagctgactctgtggacgttgaagtgagggtgccagaaaaccatgcatctaaagttgaaggtgataataccaaagaaagagacttggatagagccagtgagaaggtggaacctagagatgaagatttggtggtagctcagcaaataaatgcccaaaggcccgagccccagtcagacaatgattccagtgccacgtgcagcgctgatgaggatgtggatggagagccagagaggcagagaatgtttcctatggactcaaagccttcactgttaaaccccactggatctatactcgtctcatctccgttaaaaccaaatccactggatctgccacagcttcagcatcgagctgctgttatcccaccaatggtatcctgcaccccatgtaacataccaattggaaccccagtgagcggctatgctctctaccagcgacacattaaagcaatgcatgagtcagcactcctggaggagcagcggcagagacaagaacagatagatttggaatgtagaagttctacaagtccatgtggcacatccaagagtccaaacagagagtgggaagtccttcagcctgctccacatcaagtgataactaatctccctgaaggcgttcggcttccgacaactcgaccaaccaggccaccgccccctctcatcccgtcatccaaaaccacagtggcttcagaaaaaccatcttttataatgggaggctccatctcacagggaacaccaggcacttatttgacttctcataatcaggcttcctacactcaagaaacacccaagccgtcagtgggatctatctctcttggactgccacggcaacaggaatctgccaaatcagctactttgccctacatcaagcaggaagaattttctccccgaagccaaaactcacaacctgagggtctgttggtcagggcccaacatgaaggtgtagtcagaggtaccgcaggagccatacaagaaggaagtataactcggggaactccaaccagcaaaatttcagtggagagcattccatccctacggggctctatcactcagggcaccccggctctgccccagactggcataccaacagaggctttggtgaaggggtccatttcgagaatgcccattgaagacagcagtcctgagaaaggcagagaggaagctgcatccaaaggccatgttatttatgaaggcaaaagtggacatatcttgtcatatgataatattaagaatgcccgagaagggactaggagtccaagaacagctcatgaaatcagtttaaagagaagctatgaatcagtggaaggaaatataaagcaagggatgtcaatgagggagtctcctgtatcagcaccgttagaggggctgatatgccgagcattacccagggggagtcctcattctgacctcaaagaaaggactgtattgtctggctccataatgcaggggacaccaagagcaacaactgaaagctttgaagatggccttaaatatcccaaacaaattaaaagggaaagtcctcccatacgagcatttgaaggtgccattaccaaaggaaaaccatatgatggcatcaccaccatcaaagaaatggggcgttccattcatgagattccaaggcaagatattttaactcaggaaagtcggaaaactccagaagtggtccagagcacacggccgataattgagggttccatttcccagggcacaccaataaagtttgacaacaactcaggtcaatctgccatcaaacacaatgtcaaatccttaatcacggggcctagcaaactatcccgtggaatgcctccgctggaaattgtgccagagaacataaaagtggtagaacggggaaaatatgaggatgtgaaagcaggcgagaccgtgcgttcccggcacacgtcagtggtaagctctggcccctccgttcttaggtccacactgcatgaagctcccaaagcacaactgagccctgggatttatgatgacaccagtgcacggaggacccctgtgagttatcaaaacaccatgtccagaggctcacccatgatgaacagaacttctgatgttacaatttcttctaacaagtctaccaatcatgaaaggaaatcgacactgacccctacccagagggaaagtatcccagcgaagtctccagtgcctggggtggaccctgtcgtgagccacagtccgtttgatccccatcacagaggcagcactgcaggcgaggtttatcggagccacctgcccacgcacttggatccagccatgccttttcacagggctttggatcctgcagcggctgcttacctgtttcagagacagctttcaccaactccaggttacccaagtcagtatcagctttacgcaatggagaacacaagacagacaatcttaaatgattacattacctcacaacagatgcaagtgaacttgcgtccagatgtggccagaggactctccccaagagagcagccactgggtctcccatacccagcaacgagaggaatcattgacctgaccaatatgcctccaacaattttagtgcctcatccagggggaacaagcactcctcccatggacagaatcacttatattcctggtacacagattactttccctcccaggccgtacaactctgcttccatgtctccaggacacccaacacaccttgcagctgctgcaagtgctgagagggaacgggaacgggagcgggagaaggagcgggagcgggaacggattgctgcagcttcctccgacctctacctgcggccaggctcagaacagcctggccgacctggcagtcatggatatgttcgctccccttccccttcagtaagaactcaggagaccatgttgcaacagagacccagtgttttccaaggaaccaatggaaccagtgtaatcacacctttggatccaactgctcagctacgaatcatgccactgcctgctgggggcccttcaataagccaaggcctgccagcctcccgttacaacactgctgcggatgccctggctgctcttgtggatgctgcagcttctgcaccccagatggatgtgtccaaaacaaaagagatatcttctcacaggtatgaaacacctagcgatgctattgaggtgataagtcctgccagctcacctgcgccaccccaggagaaactgcagacctatcagccagaggttgttaaggcaaatcaagcggaaaatgatcctaccagacaatatgaaggaccattacatcactatcgaccacagcaggaatcaccatctccccaacaacagctgcccccttcttcacaggcagagggaatggggcaagtgcccaggacccatcggctgatcacacttgctgatcacatctgtcaaattatcacacaagattttgctagaaatcaagtttcctcgcagactccccagcagcctcctacttctacattccagaactcaccttctgctttggtatctacacctgtgaggactaaaacatcaaaccgttacagcccagaatcccaggctcagtctgtccatcatcaaagaccaggttcaagggtctctccagaaaatcttgtggacaaatccaggggaagtaggcctggaaaatccccagagaggagtcacgtctcttcggagccctacgagcccatctccccaccccaggttccggttgtgcatgagaaacaggacagcttgctgctcttgtctcagaggggcgcagagcctgcagagcagaggaatgatgcccgctcaccagggagtataagctacttgccttcattcttcaccaagcttgaaaatacatcacccatggttaaatcaaagaagcaggagatttttcgtaagttgaactcctctggtggaggtgactctgatatggcagctgctcagccaggaactgagatctttaatctgccagcagttactacgtcaggctcagttagctctagaggccattcttttgctgatcctgccagtaatcttgggctggaagacattatcaggaaggctctcatgggaagctttgatgacaaagttgaggatcatggagttgtcatgtcccagcctatgggagtagtgcctggtactgccaacacctcagttgtgaccagtggtgagacacgaagagaggaaggggacccatcacctcattcaggaggagtttgcaaaccaaagctgatcagcaagtcaaacagcaggaaatctaagtctcctatacctgggcaaggctacttaggaacggaacggccctcttcagtctcctctgtacattcagaaggggattaccataggcagacgccagggtgggcctgggaagacaggccctcttcaacaggctcaactcagtttccttataaccctctgactatgcggatgctcagcagtactccaccaacaccgattgcatgtgctccctctgcggtgaaccaagcagctcctcaccaacagaacaggatctgggagcgagagcctgccccactgctctcagcacagtacgagaccctgtcggatagtgatgactgaactgcacaaagtgaggggaacagggtgcaggagagggatctctagtttttgtggtttaatttttagtagcaggtcaaaaacctgccctcctgtgacttattccctgagacttttcaggagagccagcccacagatgatgaagaaatgatggaagttcatttggagagtcaaatgggaaaaaaacaaacaaaaaactgcctttgatacaggcaattcagtggactataataatagtggagggttgagatgtagagtttttaaaaagtgaacagttgctgttcttacatctgtaaagaaaaccataatgtctttaaatcactcttctgtaaatagatgacctttttgcagtgtatatccccttgctgtagtatctggtgtacttatgttcaaatcagcgcatcaactttgggggtgatttttaaaaatctttttgtctatctatctttttaaccctagccttctaaacaacctcatacagcccagttacataatgttggctgtcacgggcattgtacttttatctgatattgtttcctctaaattcagctttccagtgatgtttaaaatcttgtgaaaatgtttagatttttaacacagaccctgtcataaaatctgtacattagggtcaaaaggtaaaagtaacaaattctgccatattgtaaatttccagtgcaggctttaatttttttttttcattagtagcactgaaaaaatattactgcatgggtatgttctagttcagtttataaagttttaaaggcttatttgaggcatacctcactgttacgcacactggtaatttaaccatgcccctaagtattccttttctcctgcatttgatgcagcccaacaaagcttttgttttgaaataaatttgactaccctgtccata

SEQ ID NO: 160791 - DNA, 9501 bp, Homo sapiens
  Payload ID: 11421
  Gene Symbol: NCOR1
  Gene Name: nuclear receptor corepressor 1
  ENST ID: ENST00000395857
  CDS Start-End: 270-7301
gcgggctggggggagggagaggggttgagtcaagatggcggccaaggtggcgaagcagcagccgcggcggcggcggcggctggagtgagcgtccgactcgccgcgccgaacgaggtcccggtgtagggccgcgcgccgtggccgcgtcccactcctcaggccggggcgcacgtcggctcccacgcttagccagctcccggtggtttcctagaaacatgattgtttattggcattgatctcacagtctggtgaggacttctttactgataatgtcaagttcaggttatcctcccaaccaaggagcattcagcacagaacaaagtcgttatcctcctcactctgtccagtatacatttcccaacacccgccaccagcaggatccagcattcggaggcaaacatgaagctccatcctctccaatttcggggcaaccatgtggagatgatcaaaatgcttcaccttcaaaactctcaaaggaagagttaatacagagtatggatcgtgtagatcgagaaattgcaaaagtagaacagcagatccttaaactgaaaaagaaacaacaacagcttgaagaagaggcagctaaacctcctgagcctgagaagcccgtgtcccctcctcctgtggagcagaaacaccgcagtattgtccaaattatttatgatgagaatcggaaaaaagcagaagaagctcataaaatttttgaaggtcttggcccaaaagttgaactgccactgtataaccagccatcagataccaaggtgtaccatgagaacatcaagacaaaccaggtgatgaggaaaaaactcattttattttttaaaagaagaaatcatgcaagaaaacaaagggaacaaaaaatctgccagcgttatgatcagctcatggaggcatgggagaaaaaagtggacagaatagaaaataatcctcggaggaaagctaaagaaagcaaaacaagggaatactatgaaaagcagtttccagaaattcgaaaacaaagagaacagcaagaaagatttcagcgagttgggcagaggggagctggtctttcagccaccattgctaggagtgagcatgagatttctgaaattattgatgggctctctgagcaggagaataatgagaaacaaatgcggcagctctctgtgattccacctatgatgtttgatgcagaacaaagacgagtcaagttcattaacatgaatgggcttatggaggaccctatgaaagtgtataaagataggcagtttatgaatgtttggactgaccatgaaaaggagatctttaaggacaagtttatccagcatccaaaaaactttggactaattgcatcatacttggagaggaagagtgttcctgattgtgttttgtattactatttaaccaagaaaaatgagaattataaagccctcgtcagaaggaattatgggaaacgcagaggcagaaaccagcaaattgctcgaccctcgcaagaagaaaaagtagaagaaaaagaagaggataaagcagaaaaaacagaaaaaaaagaagaagaaaagaaagatgaagaggaaaaagatgaaaaagaagactccaaagaaaataccaaggaaaaggacaagatagatggtacagcagaagaaactgaggaaagagagcaagccacaccccgggggcgaaagactgccaacagtcagggccgccgtaagggccggatcaccaggtccatgacaaacgaagctgcagctgccagtgctgcagccgcagcggctactgaagagcccccaccacctctgccaccgccaccagaacccatttctacagagcctgtggagacctctcgatggacagaagaagaaatggaagttgctaaaaaaggtctagtagaacatggtcgtaactgggcagcaattgctaaaatggtgggaacgaaaagtgaagctcaatgtaaaaacttctattttaactataaaaggcgacacaatcttgacaacctcttacagcagcataaacagaaaacttcacgaaaacctcgtgaagagcgagatgtgtctcaatgtgaaagtgtcgcttccactgtttctgctcaggaggatgaagatattgaagcctccaatgaagaagaaaatccagaagacagcgaaggtgcagaaaatagttctgatacagaaagtgctccttctccttcaccagttgaagctgtcaagcccagcgaggacagtcctgaaaatgctacttctcgaggaaacacagaacctgcggttgagcttgagcccaccacggaaactgcacccagtacatctccctccttagcagttccaagtacaaaaccagctgaagatgaaagtgtggagacccaggtgaatgacagcatcagtgctgagacagcagagcagatggatgtagatcagcaggagcacagtgctgaagagggttctgtttgtgatcccccacccgctaccaaagctgactctgtggacgttgaagtgagggtgccagaaaaccatgcatctaaagttgaaggtgataataccaaagaaagagacttggatagagccagtgagaaggtggaacctagagatgaagatttggtggtagctcagcaaataaatgcccaaaggcccgagccccagtcagacaatgattccagtgccacgtgcagcgctgatgaggatgtggatggagagccagagaggcagagaatgtttcctatggactcaaagccttcactgttaaaccccactggatctatactcgtctcatctccgttaaaaccaaatccactggatctgccacagcttcagcatcgagctgctgttatcccaccaatggtatcctgcaccccatgtaacataccaattggaaccccagtgagcggctatgctctctaccagcgacacattaaagcaatgcatgagtcagcactcctggaggagcagcggcagagacaagaacagatagatttggaatgtagaagttctacaagtccatgtggcacatccaagagtccaaacagagagtgggaagtccttcagcctgctccacatcaagtgataactaatctccctgaaggcgttcggcttccgacaactcgaccaaccaggccaccgccccctctcatcccgtcatccaaaaccacagtggcttcagaaaaaccatcttttataatgggaggctccatctcacagggaacaccaggcacttatttgacttctcataatcaggcttcctacactcaagaaacacccaagccgtcagtgggatctatctctcttggactgccacggcaacaggaatctgccaaatcagctactttgccctacatcaagcaggaagaattttctccccgaagccaaaactcacaacctgagggtctgttggtcagggcccaacatgaaggtgtagtcagaggtaccgcaggagccatacaagaaggaagtataactcggggaactccaaccagcaaaatttcagtggagagcattccatccctacggggctctatcactcagggcaccccggctctgccccagactggcataccaacagaggctttggtgaaggggtccatttcgagaatgcccattgaagacagcagtcctgagaaaggcagagaggaagctgcatccaaaggccatgttatttatgaaggcaaaagtggacatatcttgtcatatgataatattaagaatgcccgagaagggactaggagtccaagaacagctcatgaaatcagtttaaagagaagctatgaatcagtggaaggaaatataaagcaagggatgtcaatgagggagtctcctgtatcagcaccgttagaggggctgatatgccgagcattacccagggggagtcctcattctgacctcaaagaaaggactgtattgtctggctccataatgcaggggacaccaagagcaacaactgaaagctttgaagatggccttaaatatcccaaacaaattaaaagggaaagtcctcccatacgagcatttgaaggtgccattaccaaaggaaaaccatatgatggcatcaccaccatcaaagaaatggggcgttccattcatgagattccaaggcaagatattttaactcaggaaagtcggaaaactccagaagtggtccagagcacacggccgataattgagggttccatttcccagggcacaccaataaagtttgacaacaactcaggtcaatctgccatcaaacacaatgtcaaatccttaatcacggggcctagcaaactatcccgtggaatgcctccgctggaaattgtgccagagaacataaaagtggtagaacggggaaaatatgaggatgtgaaagcaggcgagaccgtgcgttcccggcacacgtcagtggtaagctctggcccctccgttcttaggtccacactgcatgaagctcccaaagcacaactgagccctgggatttatgatgacaccagtgcacggaggacccctgtgagttatcaaaacaccatgtccagaggctcacccatgatgaacagaacttctgatgtttcttctaacaagtctaccaatcatgaaaggaaatcgacactgacccctacccagagggaaagtatcccagcgaagtctccagtgcctggggtggaccctgtcgtgagccacagtccgtttgatccccatcacagaggcagcactgcaggcgaggtttatcggagccacctgcccacgcacttggatccagccatgccttttcacagggctttggatcctgcggctgcttacctgtttcagagacagctttcaccaactccaggttacccaagtcagtatcagctttacgcaatggagaacacaagacagacaatcttaaatgattacattacctcacaacagatgcaagtgaacttgcgtccagatgtggccagaggactctccccaagagagcagccactgggtctcccatacccagcaacgagaggaatcattgacctgaccaatatgcctccaacaattttagtgcctcatccagggggaacaagcactcctcccatggacagaatcacttatattcctggtacacagattactttccctcccaggccgtacaactctgcttccatgtctccaggacacccaacacaccttgcagctgctgcaagtgctgagagggaacgggaacgggagcgggagaaggagcgggagcgggaacggattgctgcagcttcctccgacctctacctgcggccaggctcagaacagcctggccgacctggcagtcatggatatgttcgctccccttccccttcagtaagaactcaggagaccatgttgcaacagagacccagtgttttccaaggaaccaatggaaccagtgtaatcacacctttggatccaactgctcagctacgaatcatgccactgcctgctgggggcccttcaataagccaaggcctgccagcctcccgttacaacactgctgcggatgccctggctgctcttgtggatgctgcagcttctgcaccccagatggatgtgtccaaaacaaaagagagtaagcatgaagctgccaggttagaagaaaatttgagaagcaggtcagcagcagttagtgaacagcagcagctagagcagaaaaccctggaggtggagaagagatctgttcagtgtttatacacttcttcagcctttccaagtggcaagccccagcctcattcttcagtagtttattctgaggctgggaaagataaagggcctcctccaaaatccagatatgaggaagagctaaggaccagagggaagactaccattactgcagctaacttcatagacgtgatcatcacccggcaaattgcctcggacaaggatgcgagggaacgtggctctcaaagttcagactcttctagtagcttatcttctcacaggtatgaaacacctagcgatgctattgaggtgataagtcctgccagctcacctgcgccaccccaggagaaactgcagacctatcagccagaggttgttaaggcaaatcaagcggaaaatgatcctaccagacaatatgaaggaccattacatcactatcgaccacagcaggaatcaccatctccccaacaacagctgcccccttcttcacaggcagagggaatggggcaagtgcccaggacccatcggctgatcacacttgctgatcacatctgtcaaattatcacacaagattttgctagaaatcaagtttcctcgcagactccccagcagcctcctacttctacattccagaactcaccttctgctttggtatctacacctgtgaggactaaaacatcaaaccgttacagcccagaatcccaggctcagtctgtccatcatcaaagaccaggttcaagggtctctccagaaaatcttgtggacaaatccaggggaagtaggcctggaaaatccccagagaggagtcacgtctcttcggagccctacgagcccatctccccaccccaggttccggttgtgcatgagaaacaggacagcttgctgctcttgtctcagaggggcgcagagcctgcagagcagaggaatgatgcccgctcaccagggagtataagctacttgccttcattcttcaccaagcttgaaaatacatcacccatggttaaatcaaagaagcaggagatttttcgtaagttgaactcctctggtggaggtgactctgatatggcagctgctcagccaggaactgagatctttaatctgccagcagttactacgtcaggctcagttagctctagaggccattcttttgctgatcctgccagtaatcttgggctggaagacattatcaggaaggctctcatgggaagctttgatgacaaagttgaggatcatggagttgtcatgtcccagcctatgggagtagtgcctggtactgccaacacctcagttgtgaccagtggtgagacacgaagagaggaaggggacccatcacctcattcaggagtttgcaaaccaaagctgatcagcaagtcaaacagcaggaaatctaagtctcctatacctgggcaaggctacttaggaacggaacggccctcttcagtctcctctgtacattcagaaggggattaccataggcagacgccagggtgggcctgggaagacaggccctcttcaacaggctcaactcagtttccttataaccctctgactatgcggatgctcagcagtactccaccaacaccgattgcatgtgctccctctgcggtgaaccaagcagctcctcaccaacagaacaggatctgggagcgagagcctgccccactgctctcagcacagtacgagaccctgtcggatagtgatgactgaactgcacaaagtgaggggaacagggtgcaggagagggatctctagtttttgtggtttaatttttagtagcaggtcaaaaacctgccctcctgtgacttattccctgagacttttcaggagagccagcccacagatgatgaagaaatgatggaagttcatttggagagtcaaatgggaaaaaaacaaacaaaaaactgcctttgatacaggcaattcagtggactataataatagtggagggttgagatgtagagtttttaaaaagtgaacagttgctgttcttacatctgtaaagaaaaccataatgtctttaaatcactcttctgtaaatagatgacctttttgcagtgtatatccccttgctgtagtatctggtgtacttatgttcaaatcagcgcatcaactttgggggtgatttttaaaaatctttttgtctatctatctttttaaccctagccttctaaacaacctcatacagcccagttacataatgttggctgtcacgggcattgtacttttatctgatattgtttcctctaaattcagctttccagtgatgtttaaaatcttgtgaaaatgtttagatttttaacacagaccctgtcataaaatctgtacattagggtcaaaaggtaaaagtaacaaattctgccatattgtaaatttccagtgcaggctttaatttttttttttcattagtagcactgaaaaaatattactgcatgggtatgttctagttcagtttataaagttttaaaggcttatttgaggcatacctcactgttacgcacactggtaatttaaccatgcccctaagtattccttttctcctgcatttgatgcagcccaacaaagcttttgttttgaaataaatttgactaccctgtccatagctacagtagattatttgtggtttaaggctcctggtgtctcaggttccaaaggaaaagcttacatatttttcccttagtttgaatatatgattggttgggttaaaagataatgatctgtgtagtatttagataagctttatgctgcatcctgaaaaactcatggtgaacacagtcctttttccccatcactatggaccagcatttactctcactttgctcccttgggacaagagtttactgttaaatgttttcatttcacagagtctcaaggtgcaaataatttaaaagactgaattctaaactaattatggtactagagggccagttttatctttcattaagaattgcttgctgaattttaaagtttttttcatacaatttatcatagcatttaagtatctttctataacatagatactaacagttttgggagaatgccactggtaactggaaaggggagaaacagatctctcaggatgataaaaattagcactttacagactttcaagtagacctaaacttttaaacaaaagtactcaaggcttttaaggaagcagctctgtgattagctactgaccaagaccctcctatcactggtgtctaatccctatgttacagatgaagacacaggtttagtactttgcccatatagttaaattagtgacagagataggccataagcccacatttgtcttcagtcaaagctttcactcctgtccctgttccactcctgtatacctgaggtccccaacataaactttagatcaggcttagtggtcagcattcctagtacttggaaagttggtattttttacaacagatatatgtaaacatataaaaatttcaaaatgaatgaaaaacagtgactaaatgttccacttcacagttttctgctgaatttttttttttcaggtactggtaatattttagagtttgttaataatttatattgccaacctaccataaaagagattatgatggtatttttctatgaccctgagggtcttaagctattctgagtcagaatacagttgacccttgaacaacacgggtttgaactgtgtgggtccacttatacatggattttcttccacctctgccacccaagatagcaagaccaaccccttctcatcctcagcctattcaacatgaagatgacaaggatgaagaccttcatgatgatccacttccacttaatgaatagtaaatatattttctcttccttataatcttaacaaacattttctcttctctagcttactttattgtaagaatacagtatataatacatatacaaaatatgtgtc

SEQ ID NO: 160792 - DNA, 1969 bp, Homo sapiens
  Payload ID: 11421
  Gene Symbol: NCOR1
  Gene Name: nuclear receptor corepressor 1
  ENST ID: ENST00000436828
  CDS Start-End: 359-1969
caagatggcggccaaggtggcgaagcagcagccgcggcggcggcggcggctggagtgagcgtccgactcgccgcgccgaacgaggtcccggtgtagggccgcgcgccgtggccgcgtcccactcctcaggccggggcgcacgtcggctcccacgcttagccagctcccgagtttcactcttgttgcccaggctggagtgcaatggcacgatctcggctcaccgcaacctctgcctcttgggttcaagcgattctcctgcctcagcctctcgagtagctgggattacaggtggtttcctagaaacatgattgtttattggcattgatctcacagtctggtgaggacttctttactgataatgtcaagttcaggttatcctcccaaccaaggagcattcagcacagaacaaagtcgttatcctcctcactctgtccagtatacatttcccaacacccgccaccagcaggagttcgcagtccctgattatcgttcctctcatcttgaagtgagtcaggcatcacagcttttgcagcaacagcagcagcaacagcttcgaaggcgaccttccttgctttcagaatttcacccaggttctgacaggcctcaagaaaggagaactagttatgaaccgtttcatccaggcccatccccagtggatcatgattcactggaatcgaagcgaccacgtctggaacaggtttctgattctcattttcagcgtgtcagtgctgcggttttgcctttagtgcacccgctgccagaagggctgagggcttctgcagatgctaagaaggatccagcattcggaggcaaacatgaagctccatcctctccaatttcggggcaaccatgtggagatgatcaaaatgcttcaccttcaaaactctcaaaggaagagttaatacagagtatggatcgtgtagatcgagaaattgcaaaagtagaacagcagatccttaaactgaaaaagaaacaacaacagcttgaagaagaggcagctaaacctcctgagcctgagaagcccgtgtcccctcctcctgtggagcagaaacaccgcagtattgtccaaattatttatgatgagaatcggaaaaaagcagaagaagctcataaaatttttgaaggtcttggcccaaaagttgaactgccactgtataaccagccatcagataccaaggtgtaccatgagaacatcaagactggagtacctgcaaggcgcatgatgaaaaaccaggtgatgaggaaaaaactcattttattttttaaaagaagaaatcatgcaagaaaacaaagggaacaaaaaatctgccagcgttatgatcagctcatggaggcatgggagaaaaaagtggacagaatagaaaataatcctcggaggaaagctaaagaaagcaaaacaagggaatactatgaaaagcagtttccagaaattcgaaaacaaagagaacagcaagaaagatttcagcgagttgggcagaggggagctggtctttcagccaccattgctaggagtgagcatgagatttctgaaattattgatgggctctctgagcaggagaataatgagaaacaaatgcggcagctctctgtgattccacctatgatgtttgatgcagaacaaagacgagtcaagttcattaacatgaatgggcttatggaggaccctatgaaagtgtataaagataggcagtttatgaatgtttggactgaccatgaaaaggagatctttaaggacaagtttatccagcatccaaaaaactttggactaattgcatcatacttggagaggaagagtgttcctgattgtgttttgtattactatttaaccaagaaaaatgagaattataaagccctcgtcagaaggaattatgggaaacgcagaggcagaaaccagcaaattgctcgaccctcgcaagaagaaaaagtagaagaaaaagaagaggataaagcagaaaaaacagaaaaaaaa

SEQ ID NO: 160793 - DNA, 274 bp, Homo sapiens
  Payload ID: 11421
  Gene Symbol: NCOR1
  Gene Name: nuclear receptor corepressor 1
  ENST ID: ENST00000436068
  CDS Start-End: 1-274
tagaagttctacaagtccatgtggcacatccaagagtccaaacagagagtgggaaggaaaatcagtcgcctatatgccttatgctgaggtcaaacgtgctctagaacaggaagcacagatgcacaatactgcagcaaggtcagcctcaccgtgtaggctttctccaagagaagtcagtaaagccgctccacagcctgatatgagtgcagcccgctatagtgtcccgccagtccttcagcctgctccacatcaagtgataactaatctccctgaa

SEQ ID NO: 160794 - DNA, 1883 bp, Homo sapiens
  Payload ID: 11421
  Gene Symbol: NCOR1
  Gene Name: nuclear receptor corepressor 1
  ENST ID: ENST00000411510
  CDS Start-End: 247-1883
gttgagtcaagatggcggccaaggtggcgaagcagcagccgcggcggcggcggcggctggagtgagcgtccgactcgccgcgccgaacgaggtcccggtgtagggccgcgcgccgtggccgcgtcccactcctcaggccggggcgcacgtcggctcccacgcttagccagctcccggtggtttcctagaaacatgattgtttattggcattgatctcacagtctggtgaggacttctttactgataatgtcaagttcaggttatcctcccaaccaaggagcattcagcacagaacaaagtcgttatcctcctcactctgtccagtatacatttcccaacacccgccaccagcaggagttcgcagtccctgattatcgttcctctcatcttgaagtgagtcaggcatcacagcttttgcagcaacagcagcagcaacagcttcgaaggcgaccttccttgctttcagaatttcacccaggttctgacaggcctcaagaaaggagaactagttatgaaccgtttcatccaggcccatccccagtggatcatgattcactggaatcgaagcgaccacgtctggaacaggtttctgattctcattttcagcgtgtcagtgctgcggttttgcctttagtgcacccgctgccagaagggctgagggcttctgcagatgctaagaaggatccagcattcggaggcaaacatgaagctccatcctctccaatttcggggcaaccatgtggagatgatcaaaatgcttcaccttcaaaactctcaaaggaagagttaatacagagtatggatcgtgtagatcgagaaattgcaaaagtagaacagcagatccttaaactgaaaaagaaacaacaacagcttgaagaagaggcagctaaacctcctgagcctgagaagcccgtgtcccctcctcctgtggagcagaaacaccgcagtattgtccaaattatttatgatgagaatcggaaaaaagcagaagaagctcataaaatttttgaaggtcttggcccaaaagttgaactgccactgtataaccagccatcagataccaaggtgtaccatgagaacatcaagacaaaccaggtgatgaggaaaaaactcattttattttttaaaagaagaaatcatgcaagaaaacaaagggaacaaaaaatctgccagcgttatgatcagctcatggaggcatgggagaaaaaagtggacagaatagaaaataatcctcggaggaaagctaaagaaagcaaaacaagggaatactatgaaaagcagtttccagaaattcgaaaacaaagagaacagcaagaaagatttcagcgagttgggcagaggggagctggtctttcagccaccattgctaggagtgagcatgagatttctgaaattattgatgggctctctgagcaggagaataatgagaaacaaatgcggcagctctctgtgattccacctatgatgtttgatgcagaacaaagacgagtcaagttcattaacatgaatgggcttatggaggaccctatgaaagtgtataaagataggcagtttatgaatgtttggactgaccatgaaaaggagatctttaaggacaagtttatccagcatccaaaaaactttggactaattgcatcatacttggagaggaagagtgttcctgattgtgttttgtattactatttaaccaagaaaaatgagaattataaagccctcgtcagaaggaattatgggaaacgcagaggcagaaaccagcagcaaattgctcgaccctcgcaagaagaaaaagtagaagaaaaagaagaggataaagcagaaaaaacagaaaaaaaagaagaagaaaagaaagatgaagaggaaaaagatgaaaaagaagactccaa

SEQ ID NO: 160795 - DNA, 1204 bp, Homo sapiens
  Payload ID: 11421
  Gene Symbol: NCOR1
  Gene Name: nuclear receptor corepressor 1
  ENST ID: ENST00000430577
  CDS Start-End: 830-1204
tatactttgacatgccataaaattcacccattgtatgtgtacaattcaattacttcatttatacaactgttcaattatcaccatattccagcttaatggtcaatatttgctttgtcatttgatcttttctctatggtaagcaaaaatctattatttgaaaggttccttcactgaaagctgggtggagttgaactctaaaattacctacaaaattactttctatctagtcatctatgtctaattcttcaatttgacacatgcatgttactagcacaagctgcattttaaaggcagcaggaaggtcttttactatcattagaagttaaggagcaacatcgtggacaaatcggcctcgcccagcatttcagtgagggcttggtgcgaattccagccagagccctagaaagtatcttgggcaggtcgaaatgcacccctccagctcccagccacgaggggaccggcttccctgtacgcagctccggccagaggaggccgccgccgccccaccacgccgcggaggggtttgcagggtcccttccacggcctggagtttttccttttcccacgcctgaggaaggcctcgggcgcgcggaacagacgggcaggcggggggcgcacaagcccagggcacgatggcagcagcgctggatccggctgggcgctgctcggccccgtatccgtccgagaggaccgccgctgccaggcctagaggagacatgaagagaccgggcgcagcgcgacccgggaagctccgccgaggtggtttcctagaaacatgattgtttattggcattgatctcacagtctggtgaggacttctttactgataatgtcaagttcaggttatcctcccaaccaaggagcattcagcacagaacaaagtcgttatcctcctcactctgtccagtatacatttcccaacacccgccaccagcaggagttcgcagtccctgattatcgttcctctcatcttgaagtgagtcaggcatcacagcttttgcagcaacagcagcagcaacagcttcgaaggcgaccttccttgctttcagaatttcacccaggttctgacaggcctcaagaaaggagaactagttatgaaccgtttcatccaggcccatccccagtggatcatgattcactggaatcgaagcgaccacgtctggaacaggtttctgattctcattttcagcgtgtcagtgctgcg

SEQ ID NO: 160796 - DNA, 549 bp, Homo sapiens
  Payload ID: 11421
  Gene Symbol: NCOR1
  Gene Name: nuclear receptor corepressor 1
  ENST ID: ENST00000579573
  CDS Start-End: 1-549
gaaaatacatcacccatggttaaatcaaagaagcaggagatttttcgtaagttgaactcctctggtggaggtgactctgatatggctgctcagccaggaactgagatctttaatctgccagcagttactacgtcaggctcagttagctctagaggccattcttttgctgatcctgccagtaatcttgggctggaagacattatcaggaaggctctcatgggaagctttgatgacaaagttgaggatcatggagttgtcatgtcccagcctatgggagtagtgcctggtactgccaacacctcagttgtgaccagtggtgagacacgaagagaggaaggggacccatcacctcattcaggaggagtttgcaaaccaaagctgatcagcaagtcaaacagcaggaaatctaagtctcctatacctgggcaaggctacttaggaacggaacggccctcttcagtctcctctgtacattcagaaggggattaccataggcagacgccagggtgggcctgggaagacaggccctcttcaacaggctcaactcag

SEQ ID NO: 160797 - DNA, 551 bp, Homo sapiens
  Payload ID: 11421
  Gene Symbol: NCOR1
  Gene Name: nuclear receptor corepressor 1
  ENST ID: ENST00000579606
  CDS Start-End: 1-551
tcacacaagattttgctagaaatcaagtttcctcgcagactccccagcagcctcctacttctacattccagaactcaccttctgctttggtatctacacctgtgaggactaaaacatcaaaccgttacagcccagaatcccaggctcagtctgtccatcatcaaagaccaggttcaagggtctctccagaaaatcttgtggacaaatccaggggaaggcctggaaaatccccagagaggagtcacgtctcttcggagccctacgagcccatctccccaccccaggttccggttgtgcatgagaaacaggacagcttgctgctcttgtctcagaggggcgcagagcctgcagagcagaggaatgatgcccgctcaccagggagtataagctacttgccttcattcttcaccaagcttgaaaatacatcacccatggttaaatcaaagaagcaggagatttttcgtaagttgaactcctctggtggaggtgactctgatatggcagctgctcagccaggaactgagatctttaatctgccagcagttactacg

SEQ ID NO: 160798 - DNA, 1877 bp, Homo sapiens
  Payload ID: 11421
  Gene Symbol: NCOR1
  Gene Name: nuclear receptor corepressor 1
  ENST ID: ENST00000582357
  CDS Start-End: 239-1877
aagatggcggccaaggtggcgaagcagcagccgcggcggcggcggcggctggagtgagcgtccgactcgccgcgccgaacgaggtcccggtgtagggccgcgcgccgtggccgcgtcccactcctcaggccggggcgcacgtcggctcccacgcttagccagctcccggtggtttcctagaaacatgattgtttattggcattgatctcacagtctggtgaggacttctttactgataatgtcaagttcaggttatcctcccaaccaaggagcattcagcacagaacaaagtcgttatcctcctcactctgtccagtatacatttcccaacacccgccaccagcaggagttcgcagtccctgattatcgttcctctcatcttgaagtgagtcaggcatcacagcttttgcagcaacagcagcagcaacagcttcgaaggcgaccttccttgctttcagaatttcacccaggttctgacaggcctcaagaaaggagaactagttatgaaccgtttcatccaggcccatccccagtggatcatgattcactggaatcgaagcgaccacgtctggaacaggtttctgattctcattttcagcgtgtcagtgctgcggttttgcctttagtgcacccgctgccagaagggctgagggcttctgcagatgctaagaaggatccagcattcggaggcaaacatgaagctccatcctctccaatttcggggcaaccatgtggagatgatcaaaatgcttcaccttcaaaactctcaaaggaagagttaatacagagtatggatcgtgtagatcgagaaattgcaaaagtagaacagcagatccttaaactgaaaaagaaacaacaacagcttgaagaagaggcagctaaacctcctgagcctgagaagcccgtgtcccctcctcctgtggagcagaaacaccgcagtattgtccaaattatttatgatgagaatcggaaaaaagcagaagaagctcataaaatttttgaaggtcttggcccaaaagttgaactgccactgtataaccagccatcagataccaaggtgtaccatgagaacatcaagactggagtacctgcaaggcgcatgatgaaaaaccaggtgatgaggaaaaaactcattttattttttaaaagaagaaatcatgcaagaaaacaaagggaacaaaaaatctgccagcgttatgatcagctcatggaggcatgggagaaaaaagtggacagaatagaaaataatcctcggaggaaagctaaagaaagcaaaacaagggaatactatgaaaagcagtttccagaaattcgaaaacaaagagaacagcaagaaagatttcagcgagttgggcagaggggagctggtctttcagccaccattgctaggagtgagcatgagatttctgaaattattgatgggctctctgagcaggagaataatgagaaacaaatgcggcagctctctgtgattccacctatgatgtttgatgcagaacaaagacgagtcaagttcattaacatgaatgggcttatggaggaccctatgaaagtgtataaagataggcagtttatgaatgtttggactgaccatgaaaaggagatctttaaggacaagtttatccagcatccaaaaaactttggactaattgcatcatacttggagaggaagagtgttcctgattgtgttttgtattactatttaaccaagaaaaatgagaattataaagccctcgtcagaaggaattatgggaaacgcagaggcagaaaccagcagcaaattgctcgaccctcgcaagaagaaaaagtagaagaaaaagaagaggataaagcagaaaaaacagaaaaaaaagaagaagaaaagaaagatgaagagg

SEQ ID NO: 160799 - DNA, 1848 bp, Homo sapiens
  Payload ID: 11421
  Gene Symbol: NCOR1
  Gene Name: nuclear receptor corepressor 1
  ENST ID: ENST00000460276
  CDS Start-End: 240-506
caagatggcggccaaggtggcgaagcagcagccgcggcggcggcggcggctggagtgagcgtccgactcgccgcgccgaacgaggtcccggtgtagggccgcgcgccgtggccgcgtcccactcctcaggccggggcgcacgtcggctcccacgcttagccagctcccggtggtttcctagaaacatgattgtttattggcattgatctcacagtctggtgaggacttctttactgataatgtcaagttcaggttatcctcccaaccaaggagcattcagcacagaacaaagtcgttatcctcctcactctgtccagtatacatttcccaacacccgccaccagcaggagttcgcagtccctgattatcgttcctctcatcttgaagtgagtcaggcatcacagcttttgcagcaacagcagcagcaacagcttcgaaggcgaccttccttgctttcagaatttcacccaggttctgacagtgtttattttctttgtatgtattaggcctcaagaaaggagaactagttatgaaccgtttcatccaggcccatccccagtggatcatgattcactggaatcgaagcgaccacgtctggaacaggtttctgattctcattttcagcgtgtcagtgctgcggttttgcctttagtgcacccgctgccagaagggctgagggcttctgcagatgctaagaaggatccagcattcggaggcaaacatgaagctccatcctctccaatttcggggcaaccatgtggagatgatcaaaatgcttcaccttcaaaactctcaaaggaagagttaatacagagtatggatcgtgtagatcgagaaattgcaaaagtagaacagcagatccttaaactgaaaaagaaacaacaacagcttgaagaagaggcagctaaacctcctgagcctgagaagcccgtgtcccctcctcctgtggagcagaaacaccgcagtattgtccaaattatttatgatgagaatcggaaaaaagcagaagaagctcataaaatttttgaaggtcttggcccaaaagttgaactgccactgtataaccagccatcagataccaaggtgtaccatgagaacatcaagacaaaccaggtgatgaggaaaaaactcattttattttttaaaagaagaaatcatgcaagaaaacaaagggaacaaaaaatctgccagcgttatgatcagctcatggaggcatgggagaaaaaagtggacagaatagaaaataatcctcggaggaaagctaaagaaagcaaaacaagggaatactatgaaaagcagtttccagaaattcgaaaacaaagagaacagcaagaaagatttcagcgagttgggcagaggggagctggtctttcagccaccattgctaggagtgagcatgagatttctgaaattattgatgggctctctgagcaggagaataatgagaaacaaatgcggcagctctctgtgattccacctatgatgtttgatgcagaacaaagacgagtcaagttcattaacatgaatgggcttatggaggaccctatgaaagtgtataaagataggcagtttatgaatgtttggactgaccatgaaaaggagatctttaaggacaagtttatccagcatccaaaaaactttggactaattgcatcatacttggagaggaagagtgttcctgattgtgttttgtattactatttaaccaagaaaaatgagaattataaagccctcgtcagaaggaattatgggaaacgcagaggcagaaaccagcaaattgctcgaccctcgcaagaagaaaaagtagaagaaaaagaagaggataaagcagaaaaaacagaaaaaaaa

SEQ ID NO: 160800 - DNA, 650 bp, Homo sapiens
  Payload ID: 11421
  Gene Symbol: NCOR1
  Gene Name: nuclear receptor corepressor 1
  ENST ID: ENST00000580554
  CDS Start-End: 1-650
agattttgctagaaatcaagtttcctcgcagactccccagcagcctcctacttctacattccagaactcaccttctgctttggtatctacacctgtgaggactaaaacatcaaaccgttacagcccagaatcccaggctcagtctgtccatcatcaaagaccaggttcaagggtctctccagaaaatcttgtggacaaatccaggggaagtaggcctggaaaatccccagagaggagtcacgtctcttcggagccctacgagcccatctccccaccccaggttccggttgtgcatgagaaacaggacagcttgctgctcttgtctcagaggggcgcagagcctgcagagcagaggaatgatgcccgctcaccagggagtataagctacttgccttcattcttcaccaagcttgaaaatacatcacccatggttaaatcaaagaagcaggagatttttccagctgctcagccaggaactgagatctttaatctgccagcagttactacgtcaggctcagttagctctagaggccattcttttgctgatcctgccagtaatcttgggctggaagacattatcaggaaggctctcatgggaagctttgatgacaaagttgaggatcatggagttgtcatgtcccagcctatgg

SEQ ID NO: 160801 - DNA, 247 bp, Homo sapiens
  Payload ID: 11421
  Gene Symbol: NCOR1
  Gene Name: nuclear receptor corepressor 1
  ENST ID: ENST00000603989
  CDS Start-End: 1-174
cgaagagaggaaggggacccatcacctcattcaggtacagctttcattttagtgcttttctgctgcttttccccaaaaaagccagtttatttcccaaattctgatgcatcactaagacatttcatttatgtctttatgtgctcagagtcacctcttagggtttccgttacttaaaaaaggtttttgaaaacctacccagacattataatatgaacagaaataaaatggaagaaaatttttacccaaa

SEQ ID NO: 160802 - DNA, 7226 bp, Homo sapiens
  Payload ID: 11422
  Gene Symbol: NCOR2
  Gene Name: nuclear receptor corepressor 2
  Uniprot ID: Q9Y618
  ENST ID: ENST00000356219
  CDS Start-End: 1-6240
ttcatgcagcatcccaagaactttggcctgatcgcatcattcctggagaggaagacagtggctgagtgcgtcctctattactacctgactaagaagaatgagaactataagagcctggtgagacggagctatcggcgccgcggcaagagccagcagcagcaacaacagcagcagcagcagcagcagcagcagcagcagcagcccatgccccgcagcagccaggaggagaaagatgagaaggagaaggaaaaggaggcggagaaggaggaggagaagccggaggtggagaacgacaaggaagacctcctcaaggagaagacagacgacacctcaggggaggacaacgacgagaaggaggctgtggcctccaaaggccgcaaaactgccaacagccagggaagacgcaaaggccgcatcacccgctcaatggctaatgaggccaacagcgaggaggccatcaccccccagcagagcgccgagctggcctccatggagctgaatgagagttctcgctggacagaagaagaaatggaaacagccaagaaaggtctcctggaacacggccgcaactggtcggccatcgcccggatggtgggctccaagactgtgtcgcagtgtaagaacttctacttcaactacaagaagaggcagaacctcgatgagatcttgcagcagcacaagctgaagatggagaaggagaggaacgcgcggaggaagaagaagaaagcgccggcggcggccagcgaggaggctgcattcccgcccgtggtggaggatgaggagatggaggcgtcgggcgtgagcggaaatgaggaggagatggtggaggaggctgaagccttacatgcctctgggaatgaggtgcccagaggggaatgcagtggcccagccactgtcaacaacagctcagacaccgagagcatcccctctcctcacactgaggccgccaaggacacagggcagaatgggcccaagcccccagccaccctgggcgccgacgggccacccccagggccacccaccccaccaccggaggacatcccggcccccactgagcccaccccggcctctgaagccaccggagcccctacgcccccaccagcacccccatcgccctctgcacctcctcctgtggtccccaaggaggagaaggaggaggagaccgcagcagcgcccccagtggaggagggggaggagcagaagccccccgcggctgaggagctggcagtggacacagggaaggccgaggagcccgtcaagagcgagtgcacggaggaagccgaggaggggccggccaagggcaaggacgcggaggccgctgaggccacggccgagggggcgctcaaggcagagaagaaggagggcgggagcggcagggccaccacagccaagagctcgggcgccccccaggacagcgactccagtgctacctgcagtgcagacgaggtggatgaggccgagggcggcgacaagaaccggctgctgtccccaaggcccagcctcctcaccccgactggcgacccccgggccaatgcctcaccccagaagccactggacctgaagcagctgaagcagcgagcggctgccatcccccccatccaggtcaccaaagtccatgagcccccccgggaggacgcagctcccaccaagccagctcccccagccccaccgccaccgcaaaacctgcagccggagagcgacgcccctcagcagcctggcagcagcccccggggcaagagcaggagcccggcaccccccgccgacaaggaggcagagaagcctgtgttcttcccagccttcgcagccgaggcccagaagctgcctggggaccccccttgctggacttccggcctgcccttccccgtgcccccccgtgaggtgatcaaggcctccccgcatgccccggacccctcagccttctcctacgctccacctggtcacccactgcccctgggcctccatgacactgcccggcccgtcctgccgcgcccacccaccatctccaacccgcctcccctcatctcctctgccaagcaccccagcgtcctcgagaggcaaataggtgccatctcccaaggaatgtcggtccagctccacgtcccgtactcagagcatgccaaggccccggtgggccctgtcaccatggggctgcccctgcccatggaccccaaaaagctggcacccttcagcggagtgaagcaggagcagctgtccccacggggccaggctgggccaccggagagcctgggggtgcccacagcccaggaggcgtccgtgctgagagggacagctctgggctcagttccgggcggaagcatcaccaaaggcattcccagcacacgggtgccctcggacagcgccatcacataccgcggctccatcacccacggcacgccagctgacgtcctgtacaagggcaccatcaccaggatcatcggcgaggacagcccgagtcgcttggaccgcggccgggaggacagcctgcccaagggccacgtcatctacgaaggcaagaagggccacgtcttgtcctatgagggtggcatgtctgtgacccagtgctccaaggaggacggcagaagcagctcaggacccccccatgagacggccgcccccaagcgcacctatgacatgatggagggccgcgtgggcagagccatctcctcagccagcatcgaaggtctcatgggccgtgccatcccgccggagcgacacagcccccaccacctcaaagagcagcaccacatccgcgggtccatcacacaagggatccctcggtcctacgtggaggcacaggaggactacctgcgtcgggaggccaagctcctaaagcgggagggcacgcctccgcccccaccgccctcacgggacctgaccgaggcctacaagacgcaggccctgggccccctgaagctgaagccggcccatgagggcctggtggccacggtgaaggaggcgggccgctccatccatgagatcccgcgcgaggagctgcggcacacgcccgagctgcccctggccccgcggccgctcaaggagggctccatcacgcagggcaccccgctcaagtacgacaccggcgcgtccaccactggctccaaaaagcacgacgtacgctccctcatcggcagccccggccggacgttcccacccgtgcacccgctggatgtgatggccgacgcccgggcactggaacgtgcctgctacgaggagagcctgaagagccggccagggaccgccagcagctcggggggctccattgcgcgcggcgccccggtcattgtgcctgagctgggtaagccgcggcagagccccctgacctatgaggaccacggggcaccctttgccggccacctcccacgaggttcgcccgtgaccacgcgggagcccacgccgcgcctgcaggagggcagcctttcgtccagcaaggcatcccaggaccgaaagctgacgtcgacgcctcgtgagatcgccaagtccccgcacagcaccgtgcccgagcaccacccacaccccatctcgccctatgagcacctgcttcggggcgtgagtggcgtggacctgtatcgcagccacatccccctggccttcgaccccacctccataccccgcggcatccctctggacgcagccgctgcctactacctgccccgacacctggcccccaaccccacctacccgcacctgtacccaccctacctcatccgcggctaccccgacacggcggcgctggagaaccggcagaccatcatcaatgactacatcacctcgcagcagatgcaccacaacgcggccaccgccatggcccagcgagctgatatgctgaggggcctctcgccccgcgagtcctcgctggcactcaactacgctgcgggtccccgaggcatcatcgacctgtcccaagtgccacacctgcctgtgctcgtgcccccgacaccaggcaccccagccaccgccatggaccgccttgcctacctccccaccgcgccccagcccttcagcagccgccacagcagctccccactctccccaggaggtccaacacacttgacaaaaccaaccaccacgtcctcgtccgagcgggagcgagaccgggatcgagagcgggaccgggatcgggagcgggaaaagtccatcctcacgtccaccacgacggtggagcacgcacccatctggagacctggtacagagcagagcagcggcagcagcggcgggggtgggggcagcagcagccgccccgcctcccactcccatgcccaccagcactcgcccatctcccctcggacccaggatgccctccagcagagacccagtgtgcttcacaacacaggcatgaagggtatcatcaccgctgtggagcccagcacgcccacggtcctgaggtccacctccacctcctcacccgttcgcccggctgccacattcccacctgccacccactgcccactgggcggcaccctcgatggggtctaccctaccctcatggagcccgtcttgctgcccaaggaggccccccgggtcgcccggccagagcggccccgagcagacaccggccatgccttcctcgccaagcccccagcccgctccgggctggagcccgcctcctcccccagcaagggctcggagccccggcccctagtgcctcctgtctctggccacgccaccatcgcccgcacccctgcgaagaacctcgcacctcaccacgccagcccggacccgccggcgccacctgcctcggcctcggacccgcaccgggaaaagactcaaagtaaacccttttccatccaggaactggaactccgttctctgggttaccacggcagcagctacagccccgaaggggtggagcccgtcagccctgtgagctcacccagtctgacccacgacaaggggctccccaagcacctggaagagctcgacaagagccacctggagggggagctgcggcccaagcagccaggccccgtgaagcttggcggggaggccgcccacctcccacacctgcggccgctgcctgagagccagccctcgtccagcccgctgctccagaccgccccaggggtcaaaggtcaccagcgggtggtcaccctggcccagcacatcagtgaggtcatcacacaggactacacccggcaccacccacagcagctcagcgcacccctgcccgcccccctctactccttccctggggccagctgccccgtcctggacctccgccgcccacccagtgacctctacctcccgcccccggaccatggtgccccggcccgtggctccccccacagcgaagggggcaagaggtctccagagccaaacaagacgtcggtcttgggtggtggtgaggacggtattgaacctgtgtccccaccggagggcatgacggagccagggcactcccggagtgctgtgtacccgctgctgtaccgggatggggaacagacggagcccagcaggatgggctccaagtctccaggcaacaccagccagccgccagccttcttcagcaagctgaccgagagcaactccgccatggtcaagtccaagaagcaagagatcaacaagaagctgaacacccacaaccggaatgagcctgaatacaatatcagccagcctgggacggagatcttcaatatgcccgccatcaccggaacaggccttatgacctatagaagccaggcggtgcaggaacatgccagcaccaacatggggctggaggccataattagaaaggcactcatgggtaaatatgaccagtgggaagagtccccgccgctcagcgccaatgcttttaaccctctgaatgccagtgccagcctgcccgctgctatgcccataaccgctgctgacggacggagtgaccacacactcacctcgccaggtggcggcgggaaggccaaggtctctggcagacccagcagccgaaaagccaagtccccggccccgggcctggcatctggggaccggccaccctctgtctcctcagtgcactcggagggagactgcaaccgccggacgccgctcaccaaccgcgtgtgggaggacaggccctcgtccgcaggttccacgccattcccctacaaccccctgatcatgcggctgcaggcgggtgtcatggcttccccacccccaccgggcctccccgcgggcagcgggcccctcgctggcccccaccacgcctgggacgaggagcccaagccactgctctgctcgcagtacgagacactctccgacagcgagtgactcagaacagggcgggggggggggcggtgtcaggtcccagcgagccacaggaacggccctgcaggagcagggcggctgccgactcccccaaccaaggaaggagcccctgagtccgcctgcgcctccatccatctgtccgtccagagccggcatccttgcctgtctaaagccttaactaagactcccgccccgggctggccctgtgcagaccttactcaggggatgtttacctggtgctcgggaagggaggggaaggggccggggagggggcacggcaggcgtgtggcagccacacgcaggcggccagggcggccagggacccaaagcaggatgaccacgcacctccacgccactgcctcccccgaatgcatttggaaccaaagtctaaactgagctcgcagcccccgcgccctccctccgcctcccatcccgcttagcgctctggacagatggacgcaggccctgtccagcccccagtgcgctcgttccggtccccacagactgccccagccaacgagattgctggaaaccaagtcaggccaggtgggcggacaaaagggccaggtgcggcctggggggaacggatgctccgaggactggactgtttttttcacacatcgttgccgcagcggtgggaaggaaaggcagatgtaaatgatgtgttggtttacagggtatatttttgataccttcaatgaattaattcagatgttttacgcaaggaaggacttacccagtattactgctgctgtgcttttgatctctgcttaccgttcaagaggcgtgtgcaggccgacagtcggtgaccccatcactcgcaggaccaagggggcggggactgctggctcacgccccgctgtgtcctccctccctcccttccttgggcagaatgaattcgatgcgtattctgtggccgccatctgcgcagggtggtggtattctgtcatttacacacgtcgttctaattaaaaagcgaattatactcc

SEQ ID NO: 160803 - DNA, 8533 bp, Homo sapiens
  Payload ID: 11422
  Gene Symbol: NCOR2
  Gene Name: nuclear receptor corepressor 2
  ENST ID: ENST00000405201
  CDS Start-End: 2-7546
catgtcgggatccacacagcctgtggcacagacgtggagggccactgagccccgctacccgccccacagcctttcctacccagtgcagatcgcccggacgcacacggacgtcgggctcctggagtaccagcaccactcccgcgactatgcctcccacctgtcgcccggctccatcatccagccccagcggcggaggccctccctgctgtctgagttccagcccgggaatgaacggtcccaggagctccacctgcggccagagtcccactcatacctgcccgagctggggaagtcagagatggagttcattgaaagcaagcgccctcggctagagctgctgcctgaccccctgctgcgaccgtcacccctgctggccacgggccagcctgcgggatctgaagacctcaccaaggaccgtagcctgacgggcaagctggaaccggtgtctccccccagccccccgcacactgaccctgagctggagctggtgccgccacggctgtccaaggaggagctgatccagaacatggaccgcgtggaccgagagatcaccatggtagagcagcagatctctaagctgaagaagaagcagcaacagctggaggaggaggctgccaagccgcccgagcctgagaagcccgtgtcaccgccgcccatcgagtcgaagcaccgcagcctggtgcagatcatctacgacgagaaccggaagaaggctgaagctgcacatcggattctggaaggcctggggccccaggtggagctgccgctgtacaaccagccctccgacacccggcagtatcatgagaacatcaaaataaaccaggcgatgcggaagaagctaatcttgtacttcaagaggaggaatcacgctcggaaacaatgggagcagaagttctgccagcgctatgaccagctcatggaggcctgggagaagaaggtggagcgcatcgagaacaacccccggcggcgggccaaggagagcaaggtgcgcgagtactacgagaagcagttccctgagatccgcaagcagcgcgagctgcaggagcgcatgcagagcagggtgggccagcggggcagtgggctgtccatgtcggccgcccgcagcgagcacgaggtgtcagagatcatcgatggcctctcagagcaggagaacctggagaagcagatgcgccagctggccgtgatcccgcccatgctgtacgacgctgaccagcagcgcatcaagttcatcaacatgaacgggcttatggccgaccccatgaaggtgtacaaagaccgccaggtcatgaacatgtggagtgagcaggagaaggagaccttccgggagaagttcatgcagcatcccaagaactttggcctgatcgcatcattcctggagaggaagacagtggctgagtgcgtcctctattactacctgactaagaagaatgagaactataagagcctggtgagacggagctatcggcgccgcggcaagagccagcagcagcaacaacagcagcagcagcagcagcagcagcagcagcagcagcccatgccccgcagcagccaggaggagaaagatgagaaggagaaggaaaaggaggcggagaaggaggaggagaagccggaggtggagaacgacaaggaagacctcctcaaggagaagacagacgacacctcaggggaggacaacgacgagaaggaggctgtggcctccaaaggccgcaaaactgccaacagccagggaagacgcaaaggccgcatcacccgctcaatggctaatgaggccaacagcgaggaggccatcaccccccagcagagcgccgagctggcctccatggagctgaatgagagttctcgctggacagaagaagaaatggaaacagccaagaaaggtctcctggaacacggccgcaactggtcggccatcgcccggatggtgggctccaagactgtgtcgcagtgtaagaacttctacttcaactacaagaagaggcagaacctcgatgagatcttgcagcagcacaagctgaagatggagaaggagaggaacgcgcggaggaagaagaagaaagcgccggcggcggccagcgaggaggctgcattcccgcccgtggtggaggatgaggagatggaggcgtcgggcgtgagcggaaatgaggaggagatggtggaggaggctgaagccttacatgcctctgggaatgaggtgcccagaggggaatgcagtggcccagccactgtcaacaacagctcagacaccgagagcatcccctctcctcacactgaggccgccaaggacacagggcagaatgggcccaagcccccagccaccctgggcgccgacgggccacccccagggccacccaccccaccaccggaggacatcccggcccccactgagcccaccccggcctctgaagccaccggagcccctacgcccccaccagcacccccatcgccctctgcacctcctcctgtggtccccaaggaggagaaggaggaggagaccgcagcagcgcccccagtggaggagggggaggagcagaagccccccgcggctgaggagctggcagtggacacagggaaggccgaggagcccgtcaagagcgagtgcacggaggaagccgaggaggggccggccaagggcaaggacgcggaggccgctgaggccacggccgagggggcgctcaaggcagagaagaaggagggcgggagcggcagggccaccacagccaagagctcgggcgccccccaggacagcgactccagtgctacctgcagtgcagacgaggtggatgaggccgagggcggcgacaagaaccggctgctgtccccaaggcccagcctcctcaccccgactggcgacccccgggccaatgcctcaccccagaagccactggacctgaagcagctgaagcagcgagcggctgccatcccccccatccaggtcaccaaagtccatgagcccccccgggaggacgcagctcccaccaagccagctcccccagccccaccgccaccgcaaaacctgcagccggagagcgacgcccctcagcagcctggcagcagcccccggggcaagagcaggagcccggcaccccccgccgacaaggaggccttcgcagccgaggcccagaagctgcctggggaccccccttgctggacttccggcctgcccttccccgtgcccccccgtgaggtgatcaaggcctccccgcatgccccggacccctcagccttctcctacgctccacctggtcacccactgcccctgggcctccatgacactgcccggcccgtcctgccgcgcccacccaccatctccaacccgcctcccctcatctcctctgccaagcaccccagcgtcctcgagaggcaaataggtgccatctcccaaggaatgtcggtccagctccacgtcccgtactcagagcatgccaaggccccggtgggccctgtcaccatggggctgcccctgcccatggaccccaaaaagctggcacccttcagcggagtgaagcaggagcagctgtccccacggggccaggctgggccaccggagagcctgggggtgcccacagcccaggaggcgtccgtgctgagagggacagctctgggctcagttccgggcggaagcatcaccaaaggcattcccagcacacgggtgccctcggacagcgccatcacataccgcggctccatcacccacggcacgccagctgacgtcctgtacaagggcaccatcaccaggatcatcggcgaggacagcccgagtcgcttggaccgcggccgggaggacagcctgcccaagggccacgtcatctacgaaggcaagaagggccacgtcttgtcctatgagggtggcatgtctgtgacccagtgctccaaggaggacggcagaagcagctcaggacccccccatgagacggccgcccccaagcgcacctatgacatgatggagggccgcgtgggcagagccatctcctcagccagcatcgaaggtctcatgggccgtgccatcccgccggagcgacacagcccccaccacctcaaagagcagcaccacatccgcgggtccatcacacaagggatccctcggtcctacgtggaggcacaggaggactacctgcgtcgggaggccaagctcctaaagcgggagggcacgcctccgcccccaccgccctcacgggacctgaccgaggcctacaagacgcaggccctgggccccctgaagctgaagccggcccatgagggcctggtggccacggtgaaggaggcgggccgctccatccatgagatcccgcgcgaggagctgcggcacacgcccgagctgcccctggccccgcggccgctcaaggagggctccatcacgcagggcaccccgctcaagtacgacaccggcgcgtccaccactggctccaaaaagcacgacgtacgctccctcatcggcagccccggccggacgttcccacccgtgcacccgctggatgtgatggccgacgcccgggcactggaacgtgcctgctacgaggagagcctgaagagccggccagggaccgccagcagctcggggggctccattgcgcgcggcgccccggtcattgtgcctgagctgggtaagccgcggcagagccccctgacctatgaggaccacggggcaccctttgccggccacctcccacgaggttcgcccgtgaccacgcgggagcccacgccgcgcctgcaggagggcagcctttcgtccagcaaggcatcccaggaccgaaagctgacgtcgacgcctcgtgagatcgccaagtccccgcacagcaccgtgcccgagcaccacccacaccccatctcgccctatgagcacctgcttcggggcgtgagtggcgtggacctgtatcgcagccacatccccctggccttcgaccccacctccataccccgcggcatccctctggacgcagccgctgcctactacctgccccgacacctggcccccaaccccacctacccgcacctgtacccaccctacctcatccgcggctaccccgacacggcggcgctggagaaccggcagaccatcatcaatgactacatcacctcgcagcagatgcaccacaacgcggccaccgccatggcccagcgagctgatatgctgaggggcctctcgccccgcgagtcctcgctggcactcaactacgctgcgggtccccgaggcatcatcgacctgtcccaagtgccacacctgcctgtgctcgtgcccccgacaccaggcaccccagccaccgccatggaccgccttgcctacctccccaccgcgccccagcccttcagcagccgccacagcagctccccactctccccaggaggtccaacacacttgacaaaaccaaccaccacgtcctcgtccgagcgggagcgagaccgggatcgagagcgggaccgggatcgggagcgggaaaagtccatcctcacgtccaccacgacggtggagcacgcacccatctggagacctggtacagagcagagcagcggcagcagcggcgggggtgggggcagcagcagccgccccgcctcccactcccatgcccaccagcactcgcccatctcccctcggacccaggatgccctccagcagagacccagtgtgcttcacaacacaggcatgaagggtatcatcaccgctgtggagcccagcacgcccacggtcctgaggtccacctccacctcctcacccgttcgcccggctgccacattcccacctgccacccactgcccactgggcggcaccctcgatggggtctaccctaccctcatggagcccgtcttgctgcccaaggaggccccccgggtcgcccggccagagcggccccgagcagacaccggccatgccttcctcgccaagcccccagcccgctccgggctggagcccgcctcctcccccagcaagggctcggagccccggcccctagtgcctcctgtctctggccacgccaccatcgcccgcacccctgcgaagaacctcgcacctcaccacgccagcccggacccgccggcgccacctgcctcggcctcggacccgcaccgggaaaagactcaaagtaaacccttttccatccaggaactggaactccgttctctgggttaccacggcagcagctacagccccgaaggggtggagcccgtcagccctgtgagctcacccagtctgacccacgacaaggggctccccaagcacctggaagagctcgacaagagccacctggagggggagctgcggcccaagcagccaggccccgtgaagcttggcggggaggccgcccacctcccacacctgcggccgctgcctgagagccagccctcgtccagcccgctgctccagaccgccccaggggtcaaaggtcaccagcgggtggtcaccctggcccagcacatcagtgaggtcatcacacaggactacacccggcaccacccacagcagctcagcgcacccctgcccgcccccctctactccttccctggggccagctgccccgtcctggacctccgccgcccacccagtgacctctacctcccgcccccggaccatggtgccccggcccgtggctccccccacagcgaagggggcaagaggtctccagagccaaacaagacgtcggtcttgggtggtggtgaggacggtattgaacctgtgtccccaccggagggcatgacggagccagggcactcccggagtgctgtgtacccgctgctgtaccgggatggggaacagacggagcccagcaggatgggctccaagtctccaggcaacaccagccagccgccagccttcttcagcaagctgaccgagagcaactccgccatggtcaagtccaagaagcaagagatcaacaagaagctgaacacccacaaccggaatgagcctgaatacaatatcagccagcctgggacggagatcttcaatatgcccgccatcaccggaacaggccttatgacctatagaagccaggcggtgcaggaacatgccagcaccaacatggggctggaggccataattagaaaggcactcatgggtaaatatgaccagtgggaagagtccccgccgctcagcgccaatgcttttaaccctctgaatgccagtgccagcctgcccgctgctatgcccataaccgctgctgacggacggagtgaccacacactcacctcgccaggtggcggcgggaaggccaaggtctctggcagacccagcagccgaaaagccaagtccccggccccgggcctggcatctggggaccggccaccctctgtctcctcagtgcactcggagggagactgcaaccgccggacgccgctcaccaaccgcgtgtgggaggacaggccctcgtccgcaggttccacgccattcccctacaaccccctgatcatgcggctgcaggcgggtgtcatggcttccccacccccaccgggcctccccgcgggcagcgggcccctcgctggcccccaccacgcctgggacgaggagcccaagccactgctctgctcgcagtacgagacactctccgacagcgagtgactcagaacagggcgggggggggggcggtgtcaggtcccagcgagccacaggaacggccctgcaggagcagggcggctgccgactcccccaaccaaggaaggagcccctgagtccgcctgcgcctccatccatctgtccgtccagagccggcatccttgcctgtctaaagccttaactaagactcccgccccgggctggccctgtgcagaccttactcaggggatgtttacctggtgctcgggaagggaggggaaggggccggggagggggcacggcaggcgtgtggcagccacacgcaggcggccagggcggccagggacccaaagcaggatgaccacgcacctccacgccactgcctcccccgaatgcatttggaaccaaagtctaaactgagctcgcagcccccgcgccctccctccgcctcccatcccgcttagcgctctggacagatggacgcaggccctgtccagcccccagtgcgctcgttccggtccccacagactgccccagccaacgagattgctggaaaccaagtcaggccaggtgggcggacaaaagggccaggtgcggcctggggggaacggatgctccgaggactggactgtttttttcacacatcgttgccgcagcggtgggaaggaaaggcagatgtaaatgatgtgttggtttacagggtatatttttgataccttcaatgaattaattcagatgttttacgcaaggaaggacttacccagtattactgctgctgtgcttttgatctctgcttaccgttcaagaggcgtgtgcaggccgacagtcggtgaccccatcactcgcaggaccaagggggcggggactgctggctcacgccccgctgtgtcctccctccctcccttccttgggcagaatgaattcgatgcgtattctgtggccgccatctgcgcagggtggtggtattctgtcatttacacacgtcgttctaattaaaaagcgaattatactcca

SEQ ID NO: 160804 - DNA, 8520 bp, Homo sapiens
  Payload ID: 11422
  Gene Symbol: NCOR2
  Gene Name: nuclear receptor corepressor 2
  ENST ID: ENST00000404621
  CDS Start-End: 157-7533
gagtctttgaggacacagcctcgctggaggcagtttctggtgccagtgacggggtggcccgtgagctgatgacgaggactggcttttaatccttggtggtgattaagagaaagcttattggggcctgggagcagctccccgccgacccccaccaccatgtcgggatccacacagcctgtggcacagacgtggagggccactgagccccgctacccgccccacagcctttcctacccagtgcagatcgcccggacgcacacggacgtcgggctcctggagtaccagcaccactcccgcgactatgcctcccacctgtcgcccggctccatcatccagccccagcggcggaggccctccctgctgtctgagttccagcccgggaatgaacggtcccaggagctccacctgcggccagagtcccactcatacctgcccgagctggggaagtcagagatggagttcattgaaagcaagcgccctcggctagagctgctgcctgaccccctgctgcgaccgtcacccctgctggccacgggccagcctgcgggatctgaagacctcaccaaggaccgtagcctgacgggcaagctggaaccggtgtctccccccagccccccgcacactgaccctgagctggagctggtgccgccacggctgtccaaggaggagctgatccagaacatggaccgcgtggaccgagagatcaccatggtagagcagcagatctctaagctgaagaagaagcagcaacagctggaggaggaggctgccaagccgcccgagcctgagaagcccgtgtcaccgccgcccatcgagtcgaagcaccgcagcctggtgcagatcatctacgacgagaaccggaagaaggctgaagctgcacatcggattctggaaggcctggggccccaggtggagctgccgctgtacaaccagccctccgacacccggcagtatcatgagaacatcaaaataaaccaggcgatgcggaagaagctaatcttgtacttcaagaggaggaatcacgctcggaaacaatgggagcagaagttctgccagcgctatgaccagctcatggaggcctgggagaagaaggtggagcgcatcgagaacaacccccggcggcgggccaaggagagcaaggtgcgcgagtactacgagaagcagttccctgagatccgcaagcagcgcgagctgcaggagcgcatgcagagggtgggccagcggggcagtgggctgtccatgtcggccgcccgcagcgagcacgaggtgtcagagatcatcgatggcctctcagagcaggagaacctggagaagcagatgcgccagctggccgtgatcccgcccatgctgtacgacgctgaccagcagcgcatcaagttcatcaacatgaacgggcttatggccgaccccatgaaggtgtacaaagaccgccaggtcatgaacatgtggagtgagcaggagaaggagaccttccgggagaagttcatgcagcatcccaagaactttggcctgatcgcatcattcctggagaggaagacagtggctgagtgcgtcctctattactacctgactaagaagaatgagaactataagagcctggtgagacggagctatcggcgccgcggcaagagccagcagcagcaacaacagcagcagcagcagcagcagcagcagcagcagcagcccatgccccgcagcagccaggaggagaaagatgagaaggagaaggaaaaggaggcggagaaggaggaggagaagccggaggtggagaacgacaaggaagacctcctcaaggagaagacagacgacacctcaggggaggacaacgacgagaaggaggctgtggcctccaaaggccgcaaaactgccaacagccagggaagacgcaaaggccgcatcacccgctcaatggctaatgaggccaacagcgaggaggccatcaccccccagcagagcgccgagctggcctccatggagctgaatgagagttctcgctggacagaagaagaaatggaaacagccaagaaaggtctcctggaacacggccgcaactggtcggccatcgcccggatggtgggctccaagactgtgtcgcagtgtaagaacttctacttcaactacaagaagaggcagaacctcgatgagatcttgcagcagcacaagctgaagatggagaaggagaggaacgcgcggaggaagaagaagaaagcgccggcggcggccagcgaggaggctgcattcccgcccgtggtggaggatgaggagatggaggcgtcgggcgtgagcggaaatgaggaggagatggtggaggaggctgaagccactgtcaacaacagctcagacaccgagagcatcccctctcctcacactgaggccgccaaggacacagggcagaatgggcccaagcccccagccaccctgggcgccgacgggccacccccagggccacccaccccaccaccggaggacatcccggcccccactgagcccaccccggcctctgaagccaccggagcccctacgcccccaccagcacccccatcgccctctgcacctcctcctgtggtccccaaggaggagaaggaggaggagaccgcagcagcgcccccagtggaggagggggaggagcagaagccccccgcggctgaggagctggcagtggacacagggaaggccgaggagcccgtcaagagcgagtgcacggaggaagccgaggaggggccggccaagggcaaggacgcggaggccgctgaggccacggccgagggggcgctcaaggcagagaagaaggagggcgggagcggcagggccaccacagccaagagctcgggcgccccccaggacagcgactccagtgctacctgcagtgcagacgaggtggatgaggccgagggcggcgacaagaaccggctgctgtccccaaggcccagcctcctcaccccgactggcgacccccgggccaatgcctcaccccagaagccactggacctgaagcagctgaagcagcgagcggctgccatcccccccatccaggtcaccaaagtccatgagcccccccgggaggacgcagctcccaccaagccagctcccccagccccaccgccaccgcaaaacctgcagccggagagcgacgcccctcagcagcctggcagcagcccccggggcaagagcaggagcccggcaccccccgccgacaaggaggcagagaagcctgtgttcttcccagccttcgcagccgaggcccagaagctgcctggggaccccccttgctggacttccggcctgcccttccccgtgcccccccgtgaggtgatcaaggcctccccgcatgccccggacccctcagccttctcctacgctccacctggtcacccactgcccctgggcctccatgacactgcccggcccgtcctgccgcgcccacccaccatctccaacccgcctcccctcatctcctctgccaagcaccccagcgtcctcgagaggcaaataggtgccatctcccaaggaatgtcggtccagctccacgtcccgtactcagagcatgccaaggccccggtgggccctgtcaccatggggctgcccctgcccatggaccccaaaaagctggcacccttcagcggagtgaagcaggagcagctgtccccacggggccaggctgggccaccggagagcctgggggtgcccacagcccaggaggcgtccgtgctgagagggacagctctgggctcagttccgggcggaagcatcaccaaaggcattcccagcacacgggtgccctcggacagcgccatcacataccgcggctccatcacccacggcacgccagctgacgtcctgtacaagggcaccatcaccaggatcatcggcgaggacagcccgagtcgcttggaccgcggccgggaggacagcctgcccaagggccacgtcatctacgaaggcaagaagggccacgtcttgtcctatgagggtggcatgtctgtgacccagtgctccaaggaggacggcagaagcagctcaggacccccccatgagacggccgcccccaagcgcacctatgacatgatggagggccgcgtgggcagagccatctcctcagccagcatcgaaggtctcatgggccgtgccatcccgccggagcgacacagcccccaccacctcaaagagcagcaccacatccgcgggtccatcacacaagggatccctcggtcctacgtggaggcacaggaggactacctgcgtcgggaggccaagctcctaaagcgggagggcacgcctccgcccccaccgccctcacgggacctgaccgaggcctacaagacgcaggccctgggccccctgaagctgaagccggcccatgagggcctggtggccacggtgaaggaggcgggccgctccatccatgagatcccgcgcgaggagctgcggcacacgcccgagctgcccctggccccgcggccgctcaaggagggctccatcacgcagggcaccccgctcaagtacgacaccggcgcgtccaccactggctccaaaaagcacgacgtacgctccctcatcggcagccccggccggacgttcccacccgtgcacccgctggatgtgatggccgacgcccgggcactggaacgtgcctgctacgaggagagcctgaagagccggccagggaccgccagcagctcggggggctccattgcgcgcggcgccccggtcattgtgcctgagctgggtaagccgcggcagagccccctgacctatgaggaccacggggcaccctttgccggccacctcccacgaggttcgcccgtgaccacgcgggagcccacgccgcgcctgcaggagggcagcctttcgtccagcaaggcatcccaggaccgaaagctgacgtcgacgcctcgtgagatcgccaagtccccgcacagcaccgtgcccgagcaccacccacaccccatctcgccctatgagcacctgcttcggggcgtgagtggcgtggacctgtatcgcagccacatccccctggccttcgaccccacctccataccccgcggcatccctctggacgcagccgctgcctactacctgccccgacacctggcccccaaccccacctacccgcacctgtacccaccctacctcatccgcggctaccccgacacggcggcgctggagaaccggcagaccatcatcaatgactacatcacctcgcagcagatgcaccacaacgcggccaccgccatggcccagcgagctgatatgctgaggggcctctcgccccgcgagtcctcgctggcactcaactacgctgcgggtccccgaggcatcatcgacctgtcccaagtgccacacctgcctgtgctcgtgcccccgacaccaggcaccccagccaccgccatggaccgccttgcctacctccccaccgcgccccagcccttcagcagccgccacagcagctccccactctccccaggaggtccaacacacttgacaaaaccaaccaccacgtcctcgtccgagcgggagcgagaccgggatcgagagcgggaccgggatcgggagcgggaaaagtccatcctcacgtccaccacgacggtggagcacgcacccatctggagacctggtacagagcagagcagcggcagcagcggcgggggtgggggcagcagcagccgccccgcctcccactcccatgcccaccagcactcgcccatctcccctcggacccaggatgccctccagcagagacccagtgtgcttcacaacacaggcatgaagggtatcatcaccgctgtggagcccagcacgcccacggtcctgaggtccacctccacctcctcacccgttcgcccggctgccacattcccacctgccacccactgcccactgggcggcaccctcgatggggtctaccctaccctcatggagcccgtcttgctgcccaaggaggccccccgggtcgcccggccagagcggccccgagcagacaccggccatgccttcctcgccaagcccccagcccgctccgggctggagcccgcctcctcccccagcaagggctcggagccccggcccctagtgcctcctgtctctggccacgccaccatcgcccgcacccctgcgaagaacctcgcacctcaccacgccagcccggacccgccggcgccacctgcctcggcctcggacccgcaccgggaaaagactcaaagtaaacccttttccatccaggaactggaactccgttctctgggttaccacggcagcagctacagccccgaaggggtggagcccgtcagccctgtgagctcacccagtctgacccacgacaaggggctccccaagcacctggaagagctcgacaagagccacctggagggggagctgcggcccaagcagccaggccccgtgaagcttggcggggaggccgcccacctcccacacctgcggccgctgcctgagagccagccctcgtccagcccgctgctccagaccgccccaggggtcaaaggtcaccagcgggtggtcaccctggcccagcacatcagtgaggtcatcacacaggactacacccggcaccacccacagcagctcagcgcacccctgcccgcccccctctactccttccctggggccagctgccccgtcctggacctccgccgcccacccagtgacctctacctcccgcccccggaccatggtgccccggcccgtggctccccccacagcgaagggggcaagaggtctccagagccaaacaagacgtcggtcttgggtggtggtgaggacggtattgaacctgtgtccccaccggagggcatgacggagccagggcactcccggagtgctgtgtacccgctgctgtaccgggatggggaacagacggagcccagcaggatgggctccaagtctccaggcaacaccagccagccgccagccttcttcagcaagctgaccgagagcaactccgccatggtcaagtccaagaagcaagagatcaacaagaagctgaacacccacaaccggaatgagcctgaatacaatatcagccagcctgggacggagatcttcaatatgcccgccatcaccggaacaggccttatgacctatagaagccaggcggtgcaggaacatgccagcaccaacatggggctggaggccataattagaaaggcactcatgggtggcggcgggaaggccaaggtctctggcagacccagcagccgaaaagccaagtccccggccccgggcctggcatctggggaccggccaccctctgtctcctcagtgcactcggagggagactgcaaccgccggacgccgctcaccaaccgcgtgtgggaggacaggccctcgtccgcaggttccacgccattcccctacaaccccctgatcatgcggctgcaggcgggtgtcatggcttccccacccccaccgggcctccccgcgggcagcgggcccctcgctggcccccaccacgcctgggacgaggagcccaagccactgctctgctcgcagtacgagacactctccgacagcgagtgactcagaacagggcgggggggggggcggtgtcaggtcccagcgagccacaggaacggccctgcaggagcagggcggctgccgactcccccaaccaaggaaggagcccctgagtccgcctgcgcctccatccatctgtccgtccagagccggcatccttgcctgtctaaagccttaactaagactcccgccccgggctggccctgtgcagaccttactcaggggatgtttacctggtgctcgggaagggaggggaaggggccggggagggggcacggcaggcgtgtggcagccacacgcaggcggccagggcggccagggacccaaagcaggatgaccacgcacctccacgccactgcctcccccgaatgcatttggaaccaaagtctaaactgagctcgcagcccccgcgccctccctccgcctcccatcccgcttagcgctctggacagatggacgcaggccctgtccagcccccagtgcgctcgttccggtccccacagactgccccagccaacgagattgctggaaaccaagtcaggccaggtgggcggacaaaagggccaggtgcggcctggggggaacggatgctccgaggactggactgtttttttcacacatcgttgccgcagcggtgggaaggaaaggcagatgtaaatgatgtgttggtttacagggtatatttttgataccttcaatgaattaattcagatgttttacgcaaggaaggacttacccagtattactgctgctgtgcttttgatctctgcttaccgttcaagaggcgtgtgcaggccgacagtcggtgaccccatcactcgcaggaccaagggggcggggactgctggctcacgccccgctgtgtcctccctccctcccttccttgggcagaatgaattcgatgcgtattctgtggccgccatctgcgcagggtggtggtattctgtcatttacacacgtcgttctaattaaaaagcgaattatactcca

SEQ ID NO: 160805 - DNA, 7175 bp, Homo sapiens
  Payload ID: 11422
  Gene Symbol: NCOR2
  Gene Name: nuclear receptor corepressor 2
  ENST ID: ENST00000404121
  CDS Start-End: 1-6189
ttcatgcagcatcccaagaactttggcctgatcgcatcattcctggagaggaagacagtggctgagtgcgtcctctattactacctgactaagaagaatgagaactataagagcctggtgagacggagctatcggcgccgcggcaagagccagcagcagcaacaacagcagcagcagcagcagcagcagcagcagcagcagcccatgccccgcagcagccaggaggagaaagatgagaaggagaaggaaaaggaggcggagaaggaggaggagaagccggaggtggagaacgacaaggaagacctcctcaaggagaagacagacgacacctcaggggaggacaacgacgagaaggaggctgtggcctccaaaggccgcaaaactgccaacagccagggaagacgcaaaggccgcatcacccgctcaatggctaatgaggccaacagcgaggaggccatcaccccccagcagagcgccgagctggcctccatggagctgaatgagagttctcgctggacagaagaagaaatggaaacagccaagaaaggtctcctggaacacggccgcaactggtcggccatcgcccggatggtgggctccaagactgtgtcgcagtgtaagaacttctacttcaactacaagaagaggcagaacctcgatgagatcttgcagcagcacaagctgaagatggagaaggagaggaacgcgcggaggaagaagaagaaagcgccggcggcggccagcgaggaggctgcattcccgcccgtggtggaggatgaggagatggaggcgtcgggcgtgagcggaaatgaggaggagatggtggaggaggctgaagccactgtcaacaacagctcagacaccgagagcatcccctctcctcacactgaggccgccaaggacacagggcagaatgggcccaagcccccagccaccctgggcgccgacgggccacccccagggccacccaccccaccaccggaggacatcccggcccccactgagcccaccccggcctctgaagccaccggagcccctacgcccccaccagcacccccatcgccctctgcacctcctcctgtggtccccaaggaggagaaggaggaggagaccgcagcagcgcccccagtggaggagggggaggagcagaagccccccgcggctgaggagctggcagtggacacagggaaggccgaggagcccgtcaagagcgagtgcacggaggaagccgaggaggggccggccaagggcaaggacgcggaggccgctgaggccacggccgagggggcgctcaaggcagagaagaaggagggcgggagcggcagggccaccacagccaagagctcgggcgccccccaggacagcgactccagtgctacctgcagtgcagacgaggtggatgaggccgagggcggcgacaagaaccggctgctgtccccaaggcccagcctcctcaccccgactggcgacccccgggccaatgcctcaccccagaagccactggacctgaagcagctgaagcagcgagcggctgccatcccccccatccaggtcaccaaagtccatgagcccccccgggaggacgcagctcccaccaagccagctcccccagccccaccgccaccgcaaaacctgcagccggagagcgacgcccctcagcagcctggcagcagcccccggggcaagagcaggagcccggcaccccccgccgacaaggaggcagagaagcctgtgttcttcccagccttcgcagccgaggcccagaagctgcctggggaccccccttgctggacttccggcctgcccttccccgtgcccccccgtgaggtgatcaaggcctccccgcatgccccggacccctcagccttctcctacgctccacctggtcacccactgcccctgggcctccatgacactgcccggcccgtcctgccgcgcccacccaccatctccaacccgcctcccctcatctcctctgccaagcaccccagcgtcctcgagaggcaaataggtgccatctcccaaggaatgtcggtccagctccacgtcccgtactcagagcatgccaaggccccggtgggccctgtcaccatggggctgcccctgcccatggaccccaaaaagctggcacccttcagcggagtgaagcaggagcagctgtccccacggggccaggctgggccaccggagagcctgggggtgcccacagcccaggaggcgtccgtgctgagagggacagctctgggctcagttccgggcggaagcatcaccaaaggcattcccagcacacgggtgccctcggacagcgccatcacataccgcggctccatcacccacggcacgccagctgacgtcctgtacaagggcaccatcaccaggatcatcggcgaggacagcccgagtcgcttggaccgcggccgggaggacagcctgcccaagggccacgtcatctacgaaggcaagaagggccacgtcttgtcctatgagggtggcatgtctgtgacccagtgctccaaggaggacggcagaagcagctcaggacccccccatgagacggccgcccccaagcgcacctatgacatgatggagggccgcgtgggcagagccatctcctcagccagcatcgaaggtctcatgggccgtgccatcccgccggagcgacacagcccccaccacctcaaagagcagcaccacatccgcgggtccatcacacaagggatccctcggtcctacgtggaggcacaggaggactacctgcgtcgggaggccaagctcctaaagcgggagggcacgcctccgcccccaccgccctcacgggacctgaccgaggcctacaagacgcaggccctgggccccctgaagctgaagccggcccatgagggcctggtggccacggtgaaggaggcgggccgctccatccatgagatcccgcgcgaggagctgcggcacacgcccgagctgcccctggccccgcggccgctcaaggagggctccatcacgcagggcaccccgctcaagtacgacaccggcgcgtccaccactggctccaaaaagcacgacgtacgctccctcatcggcagccccggccggacgttcccacccgtgcacccgctggatgtgatggccgacgcccgggcactggaacgtgcctgctacgaggagagcctgaagagccggccagggaccgccagcagctcggggggctccattgcgcgcggcgccccggtcattgtgcctgagctgggtaagccgcggcagagccccctgacctatgaggaccacggggcaccctttgccggccacctcccacgaggttcgcccgtgaccacgcgggagcccacgccgcgcctgcaggagggcagcctttcgtccagcaaggcatcccaggaccgaaagctgacgtcgacgcctcgtgagatcgccaagtccccgcacagcaccgtgcccgagcaccacccacaccccatctcgccctatgagcacctgcttcggggcgtgagtggcgtggacctgtatcgcagccacatccccctggccttcgaccccacctccataccccgcggcatccctctggacgcagccgctgcctactacctgccccgacacctggcccccaaccccacctacccgcacctgtacccaccctacctcatccgcggctaccccgacacggcggcgctggagaaccggcagaccatcatcaatgactacatcacctcgcagcagatgcaccacaacgcggccaccgccatggcccagcgagctgatatgctgaggggcctctcgccccgcgagtcctcgctggcactcaactacgctgcgggtccccgaggcatcatcgacctgtcccaagtgccacacctgcctgtgctcgtgcccccgacaccaggcaccccagccaccgccatggaccgccttgcctacctccccaccgcgccccagcccttcagcagccgccacagcagctccccactctccccaggaggtccaacacacttgacaaaaccaaccaccacgtcctcgtccgagcgggagcgagaccgggatcgagagcgggaccgggatcgggagcgggaaaagtccatcctcacgtccaccacgacggtggagcacgcacccatctggagacctggtacagagcagagcagcggcagcagcggcgggggtgggggcagcagcagccgccccgcctcccactcccatgcccaccagcactcgcccatctcccctcggacccaggatgccctccagcagagacccagtgtgcttcacaacacaggcatgaagggtatcatcaccgctgtggagcccagcacgcccacggtcctgaggtccacctccacctcctcacccgttcgcccggctgccacattcccacctgccacccactgcccactgggcggcaccctcgatggggtctaccctaccctcatggagcccgtcttgctgcccaaggaggccccccgggtcgcccggccagagcggccccgagcagacaccggccatgccttcctcgccaagcccccagcccgctccgggctggagcccgcctcctcccccagcaagggctcggagccccggcccctagtgcctcctgtctctggccacgccaccatcgcccgcacccctgcgaagaacctcgcacctcaccacgccagcccggacccgccggcgccacctgcctcggcctcggacccgcaccgggaaaagactcaaagtaaacccttttccatccaggaactggaactccgttctctgggttaccacggcagcagctacagccccgaaggggtggagcccgtcagccctgtgagctcacccagtctgacccacgacaaggggctccccaagcacctggaagagctcgacaagagccacctggagggggagctgcggcccaagcagccaggccccgtgaagcttggcggggaggccgcccacctcccacacctgcggccgctgcctgagagccagccctcgtccagcccgctgctccagaccgccccaggggtcaaaggtcaccagcgggtggtcaccctggcccagcacatcagtgaggtcatcacacaggactacacccggcaccacccacagcagctcagcgcacccctgcccgcccccctctactccttccctggggccagctgccccgtcctggacctccgccgcccacccagtgacctctacctcccgcccccggaccatggtgccccggcccgtggctccccccacagcgaagggggcaagaggtctccagagccaaacaagacgtcggtcttgggtggtggtgaggacggtattgaacctgtgtccccaccggagggcatgacggagccagggcactcccggagtgctgtgtacccgctgctgtaccgggatggggaacagacggagcccagcaggatgggctccaagtctccaggcaacaccagccagccgccagccttcttcagcaagctgaccgagagcaactccgccatggtcaagtccaagaagcaagagatcaacaagaagctgaacacccacaaccggaatgagcctgaatacaatatcagccagcctgggacggagatcttcaatatgcccgccatcaccggaacaggccttatgacctatagaagccaggcggtgcaggaacatgccagcaccaacatggggctggaggccataattagaaaggcactcatgggtaaatatgaccagtgggaagagtccccgccgctcagcgccaatgcttttaaccctctgaatgccagtgccagcctgcccgctgctatgcccataaccgctgctgacggacggagtgaccacacactcacctcgccaggtggcggcgggaaggccaaggtctctggcagacccagcagccgaaaagccaagtccccggccccgggcctggcatctggggaccggccaccctctgtctcctcagtgcactcggagggagactgcaaccgccggacgccgctcaccaaccgcgtgtgggaggacaggccctcgtccgcaggttccacgccattcccctacaaccccctgatcatgcggctgcaggcgggtgtcatggcttccccacccccaccgggcctccccgcgggcagcgggcccctcgctggcccccaccacgcctgggacgaggagcccaagccactgctctgctcgcagtacgagacactctccgacagcgagtgactcagaacagggcgggggggggggcggtgtcaggtcccagcgagccacaggaacggccctgcaggagcagggcggctgccgactcccccaaccaaggaaggagcccctgagtccgcctgcgcctccatccatctgtccgtccagagccggcatccttgcctgtctaaagccttaactaagactcccgccccgggctggccctgtgcagaccttactcaggggatgtttacctggtgctcgggaagggaggggaaggggccggggagggggcacggcaggcgtgtggcagccacacgcaggcggccagggcggccagggacccaaagcaggatgaccacgcacctccacgccactgcctcccccgaatgcatttggaaccaaagtctaaactgagctcgcagcccccgcgccctccctccgcctcccatcccgcttagcgctctggacagatggacgcaggccctgtccagcccccagtgcgctcgttccggtccccacagactgccccagccaacgagattgctggaaaccaagtcaggccaggtgggcggacaaaagggccaggtgcggcctggggggaacggatgctccgaggactggactgtttttttcacacatcgttgccgcagcggtgggaaggaaaggcagatgtaaatgatgtgttggtttacagggtatatttttgataccttcaatgaattaattcagatgttttacgcaaggaaggacttacccagtattactgctgctgtgcttttgatctctgcttaccgttcaagaggcgtgtgcaggccgacagtcggtgaccccatcactcgcaggaccaagggggcggggactgctggctcacgccccgctgtgtcctccctccctcccttccttgggcagaatgaattcgatgcgtattctgtggccgccatctgcgcagggtggtggtattctgtcatttacacacgtcgttctaattaaaaagcgaattatactcc

SEQ ID NO: 160806 - DNA, 563 bp, Homo sapiens
  Payload ID: 11422
  Gene Symbol: NCOR2
  Gene Name: nuclear receptor corepressor 2
  ENST ID: ENST00000418829
  CDS Start-End: 1-389
cccacaaccggaatgagcctgaatacaatatcagccagcctgggacggagatcttcaatatgcccgccatcaccggaacaggccttatgacctatagaagccaggcggtgcaggaacatgccagcaccaacatggggctggaggccataattagaaaggcactcatgggtggcggcgggaaggccaaggtctctggcagacccagcagccgaaaagccaagtccccggccccgggcctggcatctggggaccggccaccctctgtctcctcagtgcactcggagggagactgcaaccgccggacgccgctcaccaaccgcgtgtgggaggacaggccctcgtccgcaggtgggcaccaggttccacgccattcccctacaaccccctgatcatgcggctgcaggcgggtgtcatggcttccccacccccaccgggcctccccgcgggcagcgggcccctcgctggcccccaccacgcctgggacgaggagcccaagccactgctctgctcgcagtacgagacactctccgacagcgagtgactcagaacagggcggggggggg

SEQ ID NO: 160807 - DNA, 467 bp, Homo sapiens
  Payload ID: 11422
  Gene Symbol: NCOR2
  Gene Name: nuclear receptor corepressor 2
  ENST ID: ENST00000440187
  CDS Start-End: 1-467
cgagtcctcgctggcactcaactacgctgcgggtccccgaggaggtccaacacacttgacaaaaccaaccaccacgtcctcgtccgagcgggagcgagaccgggatcgagagcgggaccgggatcgggagcgggaaaagtccatcctcacgtccaccacgacggtggagcacgcacccatctggagacctggtacagagcagagcagcggcagcagcggcgggggtgggggcagcagcagccgccccgcctcccactcccatgcccaccagcactcgcccatctcccctcggacccaggatgccctccagcagagacccagtgtgcttcacaacacaggcatgaagggtatcatcaccgctgtggagcccagcacgcccacggtcctgaggtccacctccacctcctcacccgttcgcccggctgccacattcccacctgccacccactgcccactgggcggcaccc

SEQ ID NO: 160808 - DNA, 956 bp, Homo sapiens
  Payload ID: 11422
  Gene Symbol: NCOR2
  Gene Name: nuclear receptor corepressor 2
  ENST ID: ENST00000440337
  CDS Start-End: 1-404
cggtcttgggtggtggtgaggacggtattgaacctgtgtccccaccggagggcatgacggagccagggcactcccggagtgctgtgtacccgctgctgtaccgggatggggaacagacggagcccagcaggatgggctccaagtctccaggcaacaccagccagccgccagccttcttcagcaagctgaccgagagcaactccgccatggtcaagtccaagaagcaagagatcaacaagaagctgaacacccacaaccggaatgagcctgaatacaatatcagccagcctgggacggagatcttcaatatgcccgccatcaccggaacagttttagtccacaagaagaaattttccaggctccagtctttgccactcaacctgtgtcagacttcacctttataaatggagatcgttaagcctggagccagctccatcaggtcacggactcgtggccttgggtagaaggcccagtcgcgctgctgtgatttcagcactcacccttgttggaaatgttgctttttcttcatgcacatggctgttttttcaaaagtgctgcagaaatgtggccaagacagcagaaaaggtgtgagcatccctggctacaaacgtatttgaaaccaaaagggaaaagaaaacgcaggcagccagcagttgctacagaaacgtgattttcaaagcatctgcatcacccgcaacctcatggaagcctcggtttggtttacaaaggagcgagtggtcggaaagacgatttgaccactttgtattcgtatgattcattcggagcagaagtttaaaactccatgaaacacttgccccgtggtgggcacggtggaatggggcttcactgggggcttttgaaagcaaaggctggtttaacaaaagttctgaaaagacagcacctctggggggtgtgcaaaggcccccacctccacgtggttcacaagaaagaaaaaa

SEQ ID NO: 160809 - DNA, 8475 bp, Homo sapiens
  Payload ID: 11422
  Gene Symbol: NCOR2
  Gene Name: nuclear receptor corepressor 2
  ENST ID: ENST00000429285
  CDS Start-End: 157-7671
gagtctttgaggacacagcctcgctggaggcagtttctggtgccagtgacggggtggcccgtgagctgatgacgaggactggcttttaatccttggtggtgattaagagaaagcttattggggcctgggagcagctccccgccgacccccaccaccatgtcgggatccacacagcctgtggcacagacgtggagggccactgagccccgctacccgccccacagcctttcctacccagtgcagatcgcccggacgcacacggacgtcgggctcctggagtaccagcaccactcccgcgactatgcctcccacctgtcgcccggctccatcatccagccccagcggcggaggccctccctgctgtctgagttccagcccgggaatgaacggtcccaggagctccacctgcggccagagtcccactcatacctgcccgagctggggaagtcagagatggagttcattgaaagcaagcgccctcggctagagctgctgcctgaccccctgctgcgaccgtcacccctgctggccacgggccagcctgcgggatctgaagacctcaccaaggaccgtagcctgacgggcaagctggaaccggtgtctccccccagccccccgcacactgaccctgagctggagctggtgccgccacggctgtccaaggaggagctgatccagaacatggaccgcgtggaccgagagatcaccatggtagagcagcagatctctaagctgaagaagaagcagcaacagctggaggaggaggctgccaagccgcccgagcctgagaagcccgtgtcaccgccgcccatcgagtcgaagcaccgcagcctggtgcagatcatctacgacgagaaccggaagaaggctgaagctgcacatcggattctggaaggcctggggccccaggtggagctgccgctgtacaaccagccctccgacacccggcagtatcatgagaacatcaaaataaaccaggcgatgcggaagaagctaatcttgtacttcaagaggaggaatcacgctcggaaacaatgggagcagaagttctgccagcgctatgaccagctcatggaggcctgggagaagaaggtggagcgcatcgagaacaacccccggcggcgggccaaggagagcaaggtgcgcgagtactacgagaagcagttccctgagatccgcaagcagcgcgagctgcaggagcgcatgcagagggtgggccagcggggcagtgggctgtccatgtcggccgcccgcagcgagcacgaggtgtcagagatcatcgatggcctctcagagcaggagaacctggagaagcagatgcgccagctggccgtgatcccgcccatgctgtacgacgctgaccagcagcgcatcaagttcatcaacatgaacgggcttatggccgaccccatgaaggtgtacaaagaccgccaggtcatgaacatgtggagtgagcaggagaaggagaccttccgggagaagttcatgcagcatcccaagaactttggcctgatcgcatcattcctggagaggaagacagtggctgagtgcgtcctctattactacctgactaagaagaatgagaactataagagcctggtgagacggagctatcggcgccgcggcaagagccagcagcagcaacaacagcagcagcagcagcagcagcagcagcagcagcagcccatgccccgcagcagccaggaggagaaagatgagaaggagaaggaaaaggaggcggagaaggaggaggagaagccggaggtggagaacgacaaggaagacctcctcaaggagaagacagacgacacctcaggggaggacaacgacgagaaggaggctgtggcctccaaaggccgcaaaactgccaacagccagggaagacgcaaaggccgcatcacccgctcaatggctaatgaggccaacagcgaggaggccatcaccccccagcagagcgccgagctggcctccatggagctgaatgagagttctcgctggacagaagaagaaatggaaacagccaagaaaggtctcctggaacacggccgcaactggtcggccatcgcccggatggtgggctccaagactgtgtcgcagtgtaagaacttctacttcaactacaagaagaggcagaacctcgatgagatcttgcagcagcacaagctgaagatggagaaggagaggaacgcgcggaggaagaagaagaaagcgccggcggcggccagcgaggaggctgcattcccgcccgtggtggaggatgaggagatggaggcgtcgggcgtgagcggaaatgaggaggagatggtggaggaggctgaagccactgtcaacaacagctcagacaccgagagcatcccctctcctcacactgaggccgccaaggacacagggcagaatgggcccaagcccccagccaccctgggcgccgacgggccacccccagggccacccaccccaccaccggaggacatcccggcccccactgagcccaccccggcctctgaagccaccggagcccctacgcccccaccagcacccccatcgccctctgcacctcctcctgtggtccccaaggaggagaaggaggaggagaccgcagcagcgcccccagtggaggagggggaggagcagaagccccccgcggctgaggagctggcagtggacacagggaaggccgaggagcccgtcaagagcgagtgcacggaggaagccgaggaggggccggccaagggcaaggacgcggaggccgctgaggccacggccgagggggcgctcaaggcagagaagaaggagggcgggagcggcagggccaccacagccaagagctcgggcgccccccaggacagcgactccagtgctacctgcagtgcagacgaggtggatgaggccgagggcggcgacaagaaccggctgctgtccccaaggcccagcctcctcaccccgactggcgacccccgggccaatgcctcaccccagaagccactggacctgaagcagctgaagcagcgagcggctgccatcccccccatccaggtcaccaaagtccatgagcccccccgggaggacgcagctcccaccaagccagctcccccagccccaccgccaccgcaaaacctgcagccggagagcgacgcccctcagcagcctggcagcagcccccggggcaagagcaggagcccggcaccccccgccgacaaggaggcagagaagcctgtgttcttcccagccttcgcagccgaggcccagaagctgcctggggaccccccttgctggacttccggcctgcccttccccgtgcccccccgtgaggtgatcaaggcctccccgcatgccccggacccctcagccttctcctacgctccacctggtcacccactgcccctgggcctccatgacactgcccggcccgtcctgccgcgcccacccaccatctccaacccgcctcccctcatctcctctgccaagcaccccagcgtcctcgagaggcaaataggtgccatctcccaaggaatgtcggtccagctccacgtcccgtactcagagcatgccaaggccccggtgggccctgtcaccatggggctgcccctgcccatggaccccaaaaagctggcacccttcagcggagtgaagcaggagcagctgtccccacggggccaggctgggccaccggagagcctgggggtgcccacagcccaggaggcgtccgtgctgagagggacagctctgggctcagttccgggcggaagcatcaccaaaggcattcccagcacacgggtgccctcggacagcgccatcacataccgcggctccatcacccacggcacgccagctgacgtcctgtacaagggcaccatcaccaggatcatcggcgaggacagcccgagtcgcttggaccgcggccgggaggacagcctgcccaagggccacgtcatctacgaaggcaagaagggccacgtcttgtcctatgagggtggcatgtctgtgacccagtgctccaaggaggacggcagaagcagctcaggacccccccatgagacggccgcccccaagcgcacctatgacatgatggagggccgcgtgggcagagccatctcctcagccagcatcgaaggtctcatgggccgtgccatcccgccggagcgacacagcccccaccacctcaaagagcagcaccacatccgcgggtccatcacacaagggatccctcggtcctacgtggaggcacaggaggactacctgcgtcgggaggccaagctcctaaagcgggagggcacgcctccgcccccaccgccctcacgggacctgaccgaggcctacaagacgcaggccctgggccccctgaagctgaagccggcccatgagggcctggtggccacggtgaaggaggcgggccgctccatccatgagatcccgcgcgaggagctgcggcacacgcccgagctgcccctggccccgcggccgctcaaggagggctccatcacgcagggcaccccgctcaagtacgacaccggcgcgtccaccactggctccaaaaagcacgacgtacgctccctcatcggcagccccggccggacgttcccacccgtgcacccgctggatgtgatggccgacgcccgggcactggaacgtgcctgctacgaggagagcctgaagagccggccagggaccgccagcagctcggggggctccattgcgcgcggcgccccggtcattgtgcctgagctgggtaagccgcggcagagccccctgacctatgaggaccacggggcaccctttgccggccacctcccacgaggttcgcccgtgaccacgcgggagcccacgccgcgcctgcaggagggcagcctttcgtccagcaaggcatcccaggaccgaaagctgacgtcgacgcctcgtgagatcgccaagtccccgcacagcaccgtgcccgagcaccacccacaccccatctcgccctatgagcacctgcttcggggcgtgagtggcgtggacctgtatcgcagccacatccccctggccttcgaccccacctccataccccgcggcatccctctggacgcagccgctgcctactacctgccccgacacctggcccccaaccccacctacccgcacctgtacccaccctacctcatccgcggctaccccgacacggcggcgctggagaaccggcagaccatcatcaatgactacatcacctcgcagcagatgcaccacaacgcggccaccgccatggcccagcgagctgatatgctgaggggcctctcgccccgcgagtcctcgctggcactcaactacgctgcgggtccccgaggcatcatcgacctgtcccaagtgccacacctgcctgtgctcgtgcccccgacaccaggcaccccagccaccgccatggaccgccttgcctacctccccaccgcgccccagcccttcagcagccgccacagcagctccccactctccccaggaggtccaacacacttgacaaaaccaaccaccacgtcctcgtccgagcgggagcgagaccgggatcgagagcgggaccgggatcgggagcgggaaaagtccatcctcacgtccaccacgacggtggagcacgcacccatctggagacctggtacagagcagagcagcggcagcagcggcgggggtgggggcagcagcagccgccccgcctcccactcccatgcccaccagcactcgcccatctcccctcggacccaggatgccctccagcagagacccagtgtgcttcacaacacaggcatgaagggtatcatcaccgctgtggagcccagcacgcccacggtcctgaggtccacctccacctcctcacccgttcgcccggctgccacattcccacctgccacccactgcccactgggcggcaccctcgatggggtctaccctaccctcatggagcccgtcttgctgcccaaggaggccccccgggtcgcccggccagagcggccccgagcagacaccggccatgccttcctcgccaagcccccagcccgctccgggctggagcccgcctcctcccccagcaagggctcggagccccggcccctagtgcctcctgtctctggccacgccaccatcgcccgcacccctgcgaagaacctcgcacctcaccacgccagcccggacccgccggcgccacctgcctcggcctcggacccgcaccgggaaaagactcaaagtaaacccttttccatccaggaactggaactccgttctctgggttaccacggcagcagctacagccccgaaggggtggagcccgtcagccctgtgagctcacccagtctgacccacgacaaggggctccccaagcacctggaagagctcgacaagagccacctggagggggagctgcggcccaagcagccaggccccgtgaagcttggcggggaggccgcccacctcccacacctgcggccgctgcctgagagccagccctcgtccagcccgctgctccagaccgccccaggggtcaaaggtcaccagcgggtggtcaccctggcccagcacatcagtgaggtcatcacacaggactacacccggcaccacccacagcagctcagcgcacccctgcccgcccccctctactccttccctggggccagctgccccgtcctggacctccgccgcccacccagtgacctctacctcccgcccccggaccatggtgccccggcccgtggctccccccacagcgaagggggcaagaggtctccagagccaaacaagacgtcggtcttgggtggtggtgaggacggtattgaacctgtgtccccaccggagggcatgacggagccagggcactcccggagtgctgtgtacccgctgctgtaccgggatggggaacagacggagcccagcaggatgggctccaagtctccaggcaacaccagccagccgccagccttcttcagcaagctgaccgagagcaactccgccatggtcaagtccaagaagcaagagatcaacaagaagctgaacacccacaaccggaatgagcctgaatacaatatcagccagcctgggacggagatcttcaatatgcccgccatcaccggaacaggccttatgacctatagaagccaggcggtgcaggaacatgccagcaccaacatggggctggaggccataattagaaaggcactcatgggtaaatatgaccagtgggaagagtccccgccgctcagcgccaatgcttttaaccctctgaatgccagtgccagcctgcccgctgctatgcccataaccgctgctgacggacggagtgaccacacactcacctcgccaggtggcggcgggaaggccaaggtctctggcagacccagcagccgaaaagccaagtccccggccccgggcctggcatctggggaccggccaccctctgtctcctcagtgcactcggagggagactgcaaccgccggacgccgctcaccaaccgcgtgtgggaggacaggccctcgtccgcaggttccacgccattcccctacaaccccctgatcatgcggctgcaggcgggtgtcatggcttccccacccccaccgggcctccccgcgggcagcgggcccctcgctggcccccaccacgcctgggacgaggagcccaagccactgctctgctcgcagtacgagacactctccgacagcgagtgactcagaacagggcgggggggggggcggtgtcaggtcccagcgagccacaggaacggccctgcaggagcagggcggctgccgactcccccaaccaaggaaggagcccctgagtccgcctgcgcctccatccatctgtccgtccagagccggcatccttgcctgtctaaagccttaactaagactcccgccccgggctggccctgtgcagaccttactcaggggatgtttacctggtgctcgggaagggaggggaaggggccggggagggggcacggcaggcgtgtggcagccacacgcaggcggccagggcggccagggacccaaagcaggatgaccacgcacctccacgccactgcctcccccgaatgcatttggaaccaaagtctaaactgagctcgcagcccccgcgccctccctccgcctcccatcccgcttagcgctctggacagatggacgcaggccctgtccagcccccagtgcgctcgttccggtccccacagactgccccagccaacgagattgctggaaaccaagtcaggccaggtgggcggacaaaagggccaggtgcggcctggggggaacggatgctccgaggactggactgtttttttcacacatcgttgccgcagcggtgggaaggaaaggcagatgtaaatgatgtgttggtttacagggtatatttttgataccttcaatgaattaattcagatgttttacgcaaggaaggacttacccagtattactgctgctgtgcttttgatctctgcttaccgttcaagaggcgtgtgcaggccgacagtcggt

SEQ ID NO: 160810 - DNA, 674 bp, Homo sapiens
  Payload ID: 11422
  Gene Symbol: NCOR2
  Gene Name: nuclear receptor corepressor 2
  ENST ID: ENST00000453428
  CDS Start-End: 1-674
ccgacacctggcccccaaccccacctacccgcacctgtacccaccctacctcatccgcggctaccccgacacggcggcgctggagaaccggcagaccatcatcaatgactacatcacctcgcagcagatgcaccacaacgcggccaccgccatggcccagcgagctgatatgctgaggggcctctcgccccgcgagtcctcgctggcactcaactacgctgcgggtccccgaggcaccccagccaccgccatggaccgccttgcctacctccccaccgcgccccagcccttcagcagccgccacagcagctccccactctccccaggaggtccaacacacttgacaaaaccaaccaccacgtcctcgtccgagcgggagcgagaccgggatcgagagcgggaccgggatcgggagcgggaaaagtccatcctcacgtccaccacgacggtggagcacgcacccatctggagacctggtacagagcagagcagcggcagcagcggcgggggtgggggcagcagcagccgccccgcctcccactcccatgcccaccagcactcgcccatctcccctcggacccaggatgccctccagcagagacccagtgtgcttcacaacacaggcatgaagggtatcatcaccgctgtggagcccagcacgcccacggtcctga

SEQ ID NO: 160811 - DNA, 4675 bp, Homo sapiens
  Payload ID: 11422
  Gene Symbol: NCOR2
  Gene Name: nuclear receptor corepressor 2
  ENST ID: ENST00000458234
  CDS Start-End: 322-4675
gccggcgccctaggaggcggcggcgggaggatcgcgtcccgacccgaggccgggcctgctgcgcgcccccagcccgatcggcaccgccacttgcctgagcgccccggcggcccgagcgcgccccaagcccgggcgccaccgctgccacctccgcgaggtctccctgagtctttgaggacacagcctcgctggaggcagtttctggtgccagtgacggggtggcccgtgagctgatgacgaggactggcttttaatccttggtggtgattaagagaaagcttattggggcctgggagcagctccccgccgacccccaccaccatgtcgggatccacacagcctgtggcacagacgtggagggccactgagccccgctacccgccccacagcctttcctacccagtgcagatcgcccggacgcacacggacgtcgggctcctggagtaccagcaccactcccgcgactatgcctcccacctgtcgcccggctccatcatccagccccagcggcggaggccctccctgctgtctgagttccagcccgggaatgaacggtcccaggagctccacctgcggccagagtcccactcatacctgcccgagctggggaagtcagagatggagttcattgaaagcaagcgccctcggctagagctgctgcctgaccccctgctgcgaccgtcacccctgctggccacgggccagcctgcgggatctgaagacctcaccaaggaccgtagcctgacgggcaagctggaaccggtgtctccccccagccccccgcacactgaccctgagctggagctggtgccgccacggctgtccaaggaggagctgatccagaacatggaccgcgtggaccgagagatcaccatggtagagcagcagatctctaagctgaagaagaagcagcaacagctggaggaggaggctgccaagccgcccgagcctgagaagcccgtgtcaccgccgcccatcgagtcgaagcaccgcagcctggtgcagatcatctacgacgagaaccggaagaaggctgaagctgcacatcggattctggaaggcctggggccccaggtggagctgccgctgtacaaccagccctccgacacccggcagtatcatgagaacatcaaaataaaccaggcgatgcggaagaagctaatcttgtacttcaagaggaggaatcacgctcggaaacaatgggagcagaagttctgccagcgctatgaccagctcatggaggcctgggagaagaaggtggagcgcatcgagaacaacccccggcggcgggccaaggagagcaaggtgcgcgagtactacgagaagcagttccctgagatccgcaagcagcgcgagctgcaggagcgcatgcagagcagggtgggccagcggggcagtgggctgtccatgtcggccgcccgcagcgagcacgaggtgtcagagatcatcgatggcctctcagagcaggagaacctggagaagcagatgcgccagctggccgtgatcccgcccatgctgtacgacgctgaccagcagcgcatcaagttcatcaacatgaacgggcttatggccgaccccatgaaggtgtacaaagaccgccaggtcatgaacatgtggagtgagcaggagaaggagaccttccgggagaagttcatgcagcatcccaagaactttggcctgatcgcatcattcctggagaggaagacagtggctgagtgcgtcctctattactacctgactaagaagaatgagaactataagagcctggtgagacggagctatcggcgccgcggcaagagccagcagcagcaacaacagcagcagcagcagcagcagcagcagcagcagcagcccatgccccgcagcagccaggaggagaaagatgagaaggagaaggaaaaggaggcggagaaggaggaggagaagccggaggtggagaacgacaaggaagacctcctcaaggagaagacagacgacacctcaggggaggacaacgacgagaaggaggctgtggcctccaaaggccgcaaaactgccaacagccagggaagacgcaaaggccgcatcacccgctcaatggctaatgaggccaacagcgaggaggccatcaccccccagcagagcgccgagctggcctccatggagctgaatgagagttctcgctggacagaagaagaaatggaaacagccaagaaaggtctcctggaacacggccgcaactggtcggccatcgcccggatggtgggctccaagactgtgtcgcagtgtaagaacttctacttcaactacaagaagaggcagaacctcgatgagatcttgcagcagcacaagctgaagatggagaaggagaggaacgcgcggaggaagaagaagaaagcgccggcggcggccagcgaggaggctgcattcccgcccgtggtggaggatgaggagatggaggcgtcgggcgtgagcggaaatgaggaggagatggtggaggaggctgaagccttacatgcctctgggaatgaggtgcccagaggggaatgcagtggcccagccactgtcaacaacagctcagacaccgagagcatcccctctcctcacactgaggccgccaaggacacagggcagaatgggcccaagcccccagccaccctgggcgccgacgggccacccccagggccacccaccccaccaccggaggacatcccggcccccactgagcccaccccggcctctgaagccaccggagcccctacgcccccaccagcacccccatcgccctctgcacctcctcctgtggtccccaaggaggagaaggaggaggagaccgcagcagcgcccccagtggaggagggggaggagcagaagccccccgcggctgaggagctggcagtggacacagggaaggccgaggagcccgtcaagagcgagtgcacggaggaagccgaggaggggccggccaagggcaaggacgcggaggccgctgaggccacggccgagggggcgctcaaggcagagaagaaggagggcgggagcggcagggccaccacagccaagagctcgggcgccccccaggacagcgactccagtgctacctgcagtgcagacgaggtggatgaggccgagggcggcgacaagaaccggctgctgtccccaaggcccagcctcctcaccccgactggcgacccccgggccaatgcctcaccccagaagccactggacctgaagcagctgaagcagcgagcggctgccatcccccccatccaggtcaccaaagtccatgagcccccccgggaggacgcagctcccaccaagccagctcccccagccccaccgccaccgcaaaacctgcagccggagagcgacgcccctcagcagcctggcagcagcccccggggcaagagcaggagcccggcaccccccgccgacaaggaggcagagaagcctgtgttcttcccagccttcgcagccgaggcccagaagctgcctggggaccccccttgctggacttccggcctgcccttccccgtgcccccccgtgaggtgatcaaggcctccccgcatgccccggacccctcagccttctcctacgctccacctggtcacccactgcccctgggcctccatgacactgcccggcccgtcctgccgcgcccacccaccatctccaacccgcctcccctcatctcctctgccaagcaccccagcgtcctcgagaggcaaataggtgccatctcccaaggaatgtcggtccagctccacgtcccgtactcagagcatgccaaggccccggtgggccctgtcaccatggggctgcccctgcccatggaccccaaaaagctggcacccttcagcggagtgaagcaggagcagctgtccccacggggccaggctgggccaccggagagcctgggggtgcccacagcccaggaggcgtccgtgctgagagggacagctctgggctcagttccgggcggaagcatcaccaaaggcattcccagcacacgggtgccctcggacagcgccatcacataccgcggctccatcacccacggcacgccagctgacgtcctgtacaagggcaccatcaccaggatcatcggcgaggacagcccgagtcgcttggaccgcggccgggaggacagcctgcccaagggccacgtcatctacgaaggcaagaagggccacgtcttgtcctatgagggtggcatgtctgtgacccagtgctccaaggaggacggcagaagcagctcaggacccccccatgagacggccgcccccaagcgcacctatgacatgatggagggccgcgtgggcagagccatctcctcagccagcatcgaaggtctcatgggccgtgccatcccgccggagcgacacagcccccaccacctcaaagagcagcaccacatccgcgggtccatcacacaagggatccctcggtcctacgtggaggcacaggaggactacctgcgtcgggaggccaagctcctaaagcgggagggcacgcctccgcccccaccgccctcacgggacctgaccgaggcctacaagacgcaggccctgggccccctgaagctgaagccggcccatgagggcctggtggccacggtgaaggaggcgggccgctccatccatgagatcccgcgcgaggagctgcggcacacgcccgagctgcccctggccccgc

SEQ ID NO: 160812 - DNA, 735 bp, Homo sapiens
  Payload ID: 11422
  Gene Symbol: NCOR2
  Gene Name: nuclear receptor corepressor 2
  ENST ID: ENST00000448008
  CDS Start-End: 1-735
caggagctccacctgcggccagagtcccactcatacctgcccgagctggggaagtcagagatggagttcattgaaagcaagcgccctcggctagagctgctgcctgaccccctgctgcgaccgtcacccctgctggccacgggccagcctgcgggatctgaagacctcaccaaggaccgtagcctgacgggcaagctggaaccggtgtctccccccagccccccgcacactgaccctgagctggagctggtgccgccacggctgtccaaggaggagctgatccagaacatggaccgcgtggaccgagagatcaccatggtagagcagcagatctctaagctgaagaagaagcagcaacagctggaggaggaggctgccaagccgcccgagcctgagaagcccgtgtcaccgccgcccatcgagtcgaagcaccgcagcctggtgcagatcatctacgacgagaaccggccgctgtacaaccagccctccgacacccggcagtatcatgagaacatcaaaataaaccaggcgatgcggaagaagctaatcttgtacttcaagaggaggaatcacgctcggaaacaatgggagcagaagttctgccagcgctatgaccagctcatggaggcctgggagaagaaggtggagcgcatcgagaacaacccccggcggcgggccaaggagagcaaggtgcgcgagtactacgagaagcagttccctgagatccgcaagcag

SEQ ID NO: 160813 - DNA, 1752 bp, Homo sapiens
  Payload ID: 11422
  Gene Symbol: NCOR2
  Gene Name: nuclear receptor corepressor 2
  ENST ID: ENST00000420698
  CDS Start-End: 273-1752
ggtgtgcctcctggaagccggcagcacagcctgtgtgtgtggactctgctggcccgctggctggcactttttttctttttctttttttttcttgtgagagagttacttcaagttgtgtttggagctgacgtgagcgaggttggtcatgtgctcgggtgccagtgacggggtggcccgtgagctgatgacgaggactggcttttaatccttggtggtgattaagagaaagcttattggggcctgggagcagctccccgccgacccccaccaccatgtcgggatccacacagcctgtggcacagacgtggagggccactgagccccgctacccgccccacagcctttcctacccagtgcagatcgcccggacgcacacggacgtcgggctcctggagtaccagcaccactcccgcgactatgcctcccacctgtcgcccggctccatcatccagccccagcggcggaggccctccctgctgtctgagttccagcccgggaatgaacggtcccaggagctccacctgcggccagagtcccactcatacctgcccgagctggggaagtcagagatggagttcattgaaagcaagcgccctcggctagagctgctgcctgaccccctgctgcgaccgtcacccctgctggccacgggccagcctgcgggatctgaagacctcaccaaggaccgtagcctgacgggcaagctggaaccggtgtctccccccagccccccgcacactgaccctgagctggagctggtgccgccacggctgtccaaggaggagctgatccagaacatggaccgcgtggaccgagagatcaccatggtagagcagcagatctctaagctgaagaagaagcagcaacagctggaggaggaggctgccaagccgcccgagcctgagaagcccgtgtcaccgccgcccatcgagtcgaagcaccgcagcctggtgcagatcatctacgacgagaaccggaagaaggctgaagctgcacatcggattctggaaggcctggggccccaggtggagctgccgctgtacaaccagccctccgacacccggcagtatcatgagaacatcaaaataaaccaggcgatgcggaagaagctaatcttgtacttcaagaggaggaatcacgctcggaaacaatgggagcagaagttctgccagcgctatgaccagctcatggaggcctgggagaagaaggtggagcgcatcgagaacaacccccggcggcgggccaaggagagcaaggtgcgcgagtactacgagaagcagttccctgagatccgcaagcagcgcgagctgcaggagcgcatgcagagcagggtgggccagcggggcagtgggctgtccatgtcggccgcccgcagcgagcacgaggtgtcagagatcatcgatggcctctcagagcaggagaacctggagaagcagatgcgccagctggccgtgatcccgcccatgctgtacgacgctgaccagcagcgcatcaagttcatcaacatgaacgggcttatggccgaccccatgaaggtgtacaaagaccgccaggtcatgaacatgtggagtgagcaggagaaggagaccttccgggagaagttcatgcagcatcccaagaactttggcctgatcgcatcattcctggagaggaagacagtggctgagtgcgtcctctattactacctgactaagaagaatgagaactataagagcctggtgagacggagctatcggcgccgcggcaagagcc

SEQ ID NO: 160814 - DNA, 532 bp, Homo sapiens
  Payload ID: 11422
  Gene Symbol: NCOR2
  Gene Name: nuclear receptor corepressor 2
  ENST ID: ENST00000413172
  CDS Start-End: 1-398
acatggggctggaggccataattagaaaggcactcatgggtaaatatgaccagtgggaagagtccccgccgctcagcgccaatgcttttaaccctctgaatgccagtgccagcctgcccgctgctatgcccataaccgctgctgacggacggagtgaccacacactcacctcgccaggtggcggcgggaaggccaaggtctctggcagacccagcagccgaaaagccaagtccccggccccgggcctggcatctggggaccggccaccctctgtctcctcagtgcactcggagggagactgcaaccgccggacgccgctcaccaaccgcgtgtgggaggacaggccctcgtccgcaggtgggcaccaggttccacgccattcccctacaaccccctgatcatgcggctgcaggcgggtgtcatggcttccccacccccaccgggcctccccgcgggcagcgggcccctcgctggcccccaccacgcctgggacgaggagcccaagccactgctctgctcgcagtacgagaca

SEQ ID NO: 160815 - DNA, 582 bp, Homo sapiens
  Payload ID: 11422
  Gene Symbol: NCOR2
  Gene Name: nuclear receptor corepressor 2
  ENST ID: ENST00000448614
  CDS Start-End: 95-582
agcagacgccaaccagcagcctcgcagagccgaccgcggccgcccagcctgccggcccacttcggcccgctccctggggcatcttcccagccctatgtttccggaaaacttggccgagggggagacgcgaatgagaggatgtctcctggaacacggccgcaactggtcggccatcgcccggatggtgggctccaagactgtgtcgcagtgtaagaacttctacttcaactacaagaagaggcagaacctcgatgagatcttgcagcagcacaagctgaagatggagaaggagaggaacgcgcggaggaagaagaagaaagcgccggcggcggccagcgaggaggctgcattcccgcccgtggtggaggatgaggagatggaggcgtcgggcgtgagcggaaatgaggaggagatggtggaggaggctgaagccactgtcaacaacagctcagacaccgagagcatcccctctcctcacactgaggccgccaaggacacagggcagaatgggcccaagcccccagccaccctgggcgccgacgggccacccccagggccacccaccccaccaccggaggacat

SEQ ID NO: 160816 - DNA, 828 bp, Homo sapiens
  Payload ID: 11422
  Gene Symbol: NCOR2
  Gene Name: nuclear receptor corepressor 2
  ENST ID: ENST00000542927
  CDS Start-End: 1-827
ggtcccaggagctccacctgcggccagagtcccactcatacctgcccgagctggggaagtcagagatggagttcattgaaagcaagcgccctcggctagagctgctgcctgaccccctgctgcgaccgtcacccctgctggccacgggccagcctgcgggatctgaagacctcaccaaggaccgtagcctgacgggcaagctggaaccggtgtctccccccagccccccgcacactgaccctgagctggagctggtgccgccacggctgtccaaggaggagctgatccagaacatggaccgcgtggaccgagagatcaccatggtagagcagcagatctctaagctgaagaagaagcagcaacagctggaggaggaggctgccaagccgcccgagcctgagaagcccgtgtcaccgccgcccatcgagtcgaagcaccgcagcctggtgcagatcatctacgacgagaaccggaagaaggctgaagctgcacatcggattctggaaggcctggggccccaggtggagctgccgctgtacaaccagccctccgacacccggcagtatcatgagaacatcaaaataaaccaggcgatgcggaagaagctaatcttgtacttcaagaggaggaatcacgctcggaaacaatgggagcagaagttctgccagcgctatgaccagctcatggaggcctgggagaagaaggtggagcgcatcgagaacaacccccggcggcgggccaaggagagcaaggtgcgcgagtactacgagaagcagttccctgagatccgcaagcagcgcgagctgcaggagcgcatgcagaggtgag

SEQ ID NO: 160817 - DNA, 7556 bp, Homo sapiens
  Payload ID: 11423
  Gene Symbol: NRIP1
  Gene Name: nuclear receptor interacting protein 1
  Uniprot ID: P48552
  ENST ID: ENST00000318948
  CDS Start-End: 599-4075
gcaggcgccttcgcggaccgagcctgacggagccggaggctgggagccgcggcggcctggggaagtgtttggattgtgagctatttcagaactgttctcaggactcattattttaacatttgggagaaacacagccagaagatgcacacttgactgaaggaggacagggaatctgaagactccggatgacatcagagctacttttcaacagccttctcaattttctttctcagaaagcagaggctcagagcttggagacagacgaacactgatatttgcatttaatggggaacaaaagatgaagaaggaaaaggaatatattcactaaggattctatctgcttactgctacagacctatgtgttaaggaattcttctcctcctccttgcgtagaagttgatcagcactgtggtcagactgcatttatcttgtcattgccagaagaaatcttggacagaatgtaacagtacgtctctctctgattgcgatggaaggtgataaactgatactcctttattaaagttacatcgcactcaccacagaaaaccattctttaaagtgaatagaaaccaagcccttgtgaacacttctattgaacatgactcatggagaagagcttggctctgatgtgcaccaggattctattgttttaacttacctagaaggattactaatgcatcaggcagcagggggatcaggtactgccgttgacaaaaagtctgctgggcataatgaagaggatcagaactttaacatttctggcagtgcatttcccacctgtcaaagtaatggtccagttctcaatacacatacatatcaggggtctggcatgctgcacctcaaaaaagccagactgttgcagtcttctgaggactggaatgcagcaaagcggaagaggctgtctgattctatcatgaatttaaacgtaaagaaggaagctttgctagctggcatggttgacagtgtgcctaaaggcaaacaggatagcacattactggcctctttgcttcagtcattcagctctaggctgcagactgttgctctgtcacaacaaatcaggcagagcctcaaggagcaaggatatgccctcagtcatgattctttaaaagtggagaaggatttaaggtgctatggtgttgcatcaagtcacttaaaaactttgttgaagaaaagtaaagttaaagatcaaaagcctgatacgaatcttcctgatgtgactaaaaacctcatcagagataggtttgcagagtctcctcatcatgttggacaaagtggaacaaaggtcatgagtgaaccgttgtcatgtgctgcaagattacaggctgttgcaagcatggtggaaaaaagggctagtcctgccacctcacctaaacctagtgttgcttgtagccagttagcattacttctgtcaagcgaagcccatttgcagcagtattctcgagaacacgctttaaaaacgcaaaatgcaaatcaagcagcaagtgaaagacttgctgctatggccagattgcaagaaaatggccagaaggatgttggcagttaccagctcccaaaaggaatgtcaagccatcttaatggtcaggcaagaacatcatcaagcaaactgatggctagcaaaagtagtgctacagtgtttcaaaatccaatgggtatcattccttcttcccctaaaaatgcaggttataagaactcactggaaagaaacaatataaaacaagctgctaacaatagtttgcttttacatcttcttaaaagccagactatacctaagccaatgaatggacacagtcacagtgagagaggaagcatttttgaggaaagtagtacacctacaactattgatgaatattcagataacaatcctagttttacagatgacagcagtggtgatgaaagttcttattccaactgtgttcccatagacttgtcttgcaaacaccgaactgaaaaatcagaatctgaccaacctgtttccctggataacttcactcaatccttgctaaacacttgggatccaaaagtcccagatgtagatatcaaagaagatcaagatacctcaaagaattctaagctaaactcacaccagaaagtaacacttcttcaattgctacttggccataagaatgaagaaaatgtagaaaaaaacaccagccctcagggagtacacaatgatgtgagcaagttcaatacacaaaattatgcaaggacttctgtgatagaaagccccagtacaaatcggactactccagtgagcactccacctttacttacatcaagcaaagcagggtctcccatcaatctctctcaacactctctggtcatcaaatggaattccccaccatatgtctgcagtactcagtctgaaaagctaacaaatactgcatctaaccactcaatggaccttacaaaaagcaaagacccaccaggagagaaaccagcccaaaatgaaggtgcacagaactctgcaacgtttagtgccagtaagctgttacaaaatttagcacaatgtggaatgcagtcatccatgtcagtggaagagcagagacccagcaaacagctgttaactggaaacacagataaaccgataggtatgattgatagattaaatagccctttgctctcaaataaaacaaatgcagttgaagaaaataaagcatttagtagtcaaccaacaggtcctgaaccagggctttctggttctgaaatagaaaatctgcttgaaagacgtactgtcctccagttgctcctggggaaccccaacaaagggaagagtgaaaaaaaagagaaaactcccttaagagatgaaagtactcaggaacactcagagagagctttaagtgaacaaatactgatggtgaaaataaaatctgagccttgtgatgacttacaaattcctaacacaaatgtgcacttgagccatgatgctaagagtgccccattcttgggtatggctcctgctgtgcagagaagcgcacctgccttaccagtgtccgaagactttaaatcggagcctgtttcacctcaggatttttctttctccaagaatggtctgctaagtcgattgctaagacaaaatcaagatagttacctggcagatgattcagacaggagtcacagaaataatgaaatggcacttctagaatcaaagaatctttgcatggtccctaagaaaaggaagctttatactgagccattagaaaatccatttaaaaagatgaaaaacaacattgttgatgctgcaaacaatcacagtgccccagaagtactgtatgggtccttgcttaaccaggaagagctgaaatttagcagaaatgatcttgaatttaaatatcctgctggtcatggctcagccagcgaaagtgaacacaggagttgggccagagagagcaaaagctttaatgttctgaaacagctgcttctctcagaaaactgtgtgcgagatttgtccccgcacagaagtaactctgtggctgacagtaaaaagaaaggacacaaaaataatgtgaccaacagcaaacctgaatttagcatttcttctttaaatggactgatgtacagttccactcagcccagcagttgcatggataacaggacattttcatacccaggtgtagtaaaaactcctgtgagtcctactttccctgagcacttgggctgtgcagggtctagaccagaatctgggcttttgaatgggtgttccatgcccagtgagaaaggacccattaagtgggttatcactgatgcggagaagaatgagtatgaaaaagactctccaagattgaccaaaaccaacccaatactatattacatgcttcaaaaaggaggcaattctgttaccagtcgagaaacacaagacaaggacatttggagggaggcttcatctgctgaaagtgtctcacaggtcacagccaaagaagagttacttcctactgcagaaacgaaagcttctttctttaatttaagaagcccttacaatagccatatgggaaataatgcttctcgcccacacagcgcaaatggagaagtttatggacttctgggaagcgtgctaacgataaagaaagaatcagaataaaatgtacctgccatccagttttggatctttttaaaactaatgagtatgaacttgagatctgtataaataagagcatgatttgaaaaaaagcatggtataattgaaacttttttcattttgaaaagtattggttactggtgatgttgaaatatgcatactaatttttgcttaacattagatgtcatgaggaaactactgaactagcaattggttgtttaacacttctgtatgcatcagataacaactgtgagtagcctatgaatgaaattcttttataaatattaggcataaattaaaatgtaaaactccattcatagtggattaatgcattttgctgcctttattagggtactttattttgcttttcagaagtcagcctacataacacatttttaaagtctaaactgttaaacaactctttaaaggataattatccaataaaaaaaaacctagtgctgattcacagcttattatccaattcaaaaataaattagaaaaatatatgcttacatttttcacttttgctaaaaagaaaaaaaaaaggtgtttatttttaactcttggaagaggttttgtggttcccaatgtgtctgtcccaccctgatccttttcaatatatatttctttaaaccttgtgctacttagtaaaaattgattacaattgagggaagtttgatagatcctttaaaaaaaaggcagatttccattttttgtattttaactactttactaaattaatactcctccttttacagaattagaaaagttaacatttatctttaggtggtttcctgaaaagttgaatatttaagaaattgtttttaacagaagcaaaatggcttttctttggacagttttcaccatctcttgtaaaagttaattctcaccattcctgtggtacctgcgagtgttatgaccaggattccttaaacctgaactcagaccacttgcattagaaccatctggagcacttgttttaaaatgcagattcataggcagcatctcagatctacagaacaagaatctctgctaagtggacctggaatcttccatctgcatcttaacatgctctctaggtgtttcttgtgtttgagaaccatgacttatgactttcctcagaacatgagactgtaaaacaaaaacaaaaaactatgtgatgcctctattttccccaatacagtcacacatcagctcaaaatttgcaatattgtagttcatatattaccgttatgtctttggaaatcgggttcagaacactttttatgacaaaaattgggtggaggggataactttcatatctggctcaacatctcaggaaaatctgtgattatttgtgtgttctaatgagtaacatctacttagttagccttagggatggaaaaacagggccacttaccaaactcaggtgattccaggatggtttggaaacttctcctgaatgcatccttaacctttattaaaaccattgtcctaagaacaatgccaacaaagcttacaacatttagtttaaacccaagaagggcactaaactcagattgactaaataaaaagtacaaagggcacatatacgtgacagaattgtacacaatcactccattggatcttttactttaaagtagtgatgaaaagtacatgttgatactgtcttagaagaaattaatatattagtgaagccacatggggtttcagttgcgaaacaggtctgtttttatgttcagtttgtacaatccacaattcattcaccagatattttgttcttaattgtgaaccaggttagcaaatgacctatcaaaaattattctataatcactactagttaggatattgatttaaaattgttctacttgaagtggtttctaagatttttatattaaaaataggtgtgatttcctaatatgatctaaaaccctaaatggttatttttcctcagaatgatttgtaaatagctactggaaatattatacagtaataggagtgggtattatgcaacatcatggagaagtgaaggcataggcttattctgacataaaattccactggccagttgaatatattctattccatgtccatactatgacaatcttattgtcaacactatataaataagcttttaaacaagtcatttttcttgatcgttgtggaaggtttggagccttagaggtatgtcagaaaaaatatgttggtattctcccttgggtagggggaaatgacctttttacaagagagtgaaatttaggtcagggaaaagaccaagggccagcattgctacttttgtgtgtgtgtgtgtgggttttgttttgtttttttggttggctggttgttttcgttgttgttaacaaaggaatgagaatatgtaatacttaaataaacatgaccacgaagaatgctgttctgatttactagagaatgttcccaatttgaatttagggtgattttaaagaacagtgagaaagggcatacatccacagattcactttgtttatgcatatgtagatacaaggatgcacatatacacattttcaaggactattttagatatctagacaatttcttctaataaagtcatttgtgaaagggtactacagcttattgacatcagtaaggtagcattcattacctgtttattctctgctgcatcttacagaagagtaaactggtgagagtatatattttatatatatatatatatatatatatataatatgtatatatatatatattgacttgttacatgaagatgttaaaatcggtttttaaaggtgatgtaaatagtgatttccttaatgaaaaatacatattttgtattgttctaatgcaacagaaaagccttttaatctctttggttcctgtatattccatgtataagtgtaaatataatcagacaggtttaaaagttgtgcatgtatgtatacagttgcaagtctggacaaatgtatagaataaaccttttatttaagttgtgattacctgctgcatgaaaagtgcatgggggaccctgtgcatctgtgcatttggcaaaatgtcttaacaaatcagatcagatgttcatcctaacatgacagtattccatttctggacatgacgtctgtggtttaagctttgtgaaagaatgtgctttgattcgaagggtcttaaagaatttttttaatcgtcaaccacttttaaacataaagaattcacacaactactttcatgaattttttaatcccattgcaaacattattccaagagtatcccagtattagcaatactggaatataggcacattaccattcatagtaagaattctggtgtttacacaaccaaatttgatgcgatctgctcagtaatataatttgccatttttattagaaatttaatttcttcatgtgatgtcatgaaactgtacatactgcagtgtgaatttttttgttttgttttttaatcttttagtgtttacttcctgcagtgaatttgaataaatgagaaaaaatgcattgtc

SEQ ID NO: 160818 - DNA, 7562 bp, Homo sapiens
  Payload ID: 11423
  Gene Symbol: NRIP1
  Gene Name: nuclear receptor interacting protein 1
  Uniprot ID: P48552
  ENST ID: ENST00000400199
  CDS Start-End: 605-4081
cgacccggccccacgcccgcccgccacccgcgcgcgcccgtccgcccgtggcctcgcgtccgccgctgcgccgtgagcgccgctggtcggagggaagagctcgccggggcgccgggccaggacggggcggcaggcgccttcgcggaccgagcctgacggagccggaggctgggagccgcggcggcctggggaagtgtttggattgtgagctatttcagaactgttctcaggactcattattttaacatttgggagaaacacagccagaagaacactgatatttgcatttaatggggaacaaaagatgaagaaggaaaaggaatatattcactaaggattctatctgcttactgctacagacctatgtgttaaggaattcttctcctcctccttgcgtagaagttgatcagcactgtggtcagactgcatttatcttgtcattgccagaagaaatcttggacagaatgtaacagtacgtctctctctgattgcgatggaaggtgataaactgatactcctttattaaagttacatcgcactcaccacagaaaaccattctttaaagtgaatagaaaccaagcccttgtgaacacttctattgaacatgactcatggagaagagcttggctctgatgtgcaccaggattctattgttttaacttacctagaaggattactaatgcatcaggcagcagggggatcaggtactgccgttgacaaaaagtctgctgggcataatgaagaggatcagaactttaacatttctggcagtgcatttcccacctgtcaaagtaatggtccagttctcaatacacatacatatcaggggtctggcatgctgcacctcaaaaaagccagactgttgcagtcttctgaggactggaatgcagcaaagcggaagaggctgtctgattctatcatgaatttaaacgtaaagaaggaagctttgctagctggcatggttgacagtgtgcctaaaggcaaacaggatagcacattactggcctctttgcttcagtcattcagctctaggctgcagactgttgctctgtcacaacaaatcaggcagagcctcaaggagcaaggatatgccctcagtcatgattctttaaaagtggagaaggatttaaggtgctatggtgttgcatcaagtcacttaaaaactttgttgaagaaaagtaaagttaaagatcaaaagcctgatacgaatcttcctgatgtgactaaaaacctcatcagagataggtttgcagagtctcctcatcatgttggacaaagtggaacaaaggtcatgagtgaaccgttgtcatgtgctgcaagattacaggctgttgcaagcatggtggaaaaaagggctagtcctgccacctcacctaaacctagtgttgcttgtagccagttagcattacttctgtcaagcgaagcccatttgcagcagtattctcgagaacacgctttaaaaacgcaaaatgcaaatcaagcagcaagtgaaagacttgctgctatggccagattgcaagaaaatggccagaaggatgttggcagttaccagctcccaaaaggaatgtcaagccatcttaatggtcaggcaagaacatcatcaagcaaactgatggctagcaaaagtagtgctacagtgtttcaaaatccaatgggtatcattccttcttcccctaaaaatgcaggttataagaactcactggaaagaaacaatataaaacaagctgctaacaatagtttgcttttacatcttcttaaaagccagactatacctaagccaatgaatggacacagtcacagtgagagaggaagcatttttgaggaaagtagtacacctacaactattgatgaatattcagataacaatcctagttttacagatgacagcagtggtgatgaaagttcttattccaactgtgttcccatagacttgtcttgcaaacaccgaactgaaaaatcagaatctgaccaacctgtttccctggataacttcactcaatccttgctaaacacttgggatccaaaagtcccagatgtagatatcaaagaagatcaagatacctcaaagaattctaagctaaactcacaccagaaagtaacacttcttcaattgctacttggccataagaatgaagaaaatgtagaaaaaaacaccagccctcagggagtacacaatgatgtgagcaagttcaatacacaaaattatgcaaggacttctgtgatagaaagccccagtacaaatcggactactccagtgagcactccacctttacttacatcaagcaaagcagggtctcccatcaatctctctcaacactctctggtcatcaaatggaattccccaccatatgtctgcagtactcagtctgaaaagctaacaaatactgcatctaaccactcaatggaccttacaaaaagcaaagacccaccaggagagaaaccagcccaaaatgaaggtgcacagaactctgcaacgtttagtgccagtaagctgttacaaaatttagcacaatgtggaatgcagtcatccatgtcagtggaagagcagagacccagcaaacagctgttaactggaaacacagataaaccgataggtatgattgatagattaaatagccctttgctctcaaataaaacaaatgcagttgaagaaaataaagcatttagtagtcaaccaacaggtcctgaaccagggctttctggttctgaaatagaaaatctgcttgaaagacgtactgtcctccagttgctcctggggaaccccaacaaagggaagagtgaaaaaaaagagaaaactcccttaagagatgaaagtactcaggaacactcagagagagctttaagtgaacaaatactgatggtgaaaataaaatctgagccttgtgatgacttacaaattcctaacacaaatgtgcacttgagccatgatgctaagagtgccccattcttgggtatggctcctgctgtgcagagaagcgcacctgccttaccagtgtccgaagactttaaatcggagcctgtttcacctcaggatttttctttctccaagaatggtctgctaagtcgattgctaagacaaaatcaagatagttacctggcagatgattcagacaggagtcacagaaataatgaaatggcacttctagaatcaaagaatctttgcatggtccctaagaaaaggaagctttatactgagccattagaaaatccatttaaaaagatgaaaaacaacattgttgatgctgcaaacaatcacagtgccccagaagtactgtatgggtccttgcttaaccaggaagagctgaaatttagcagaaatgatcttgaatttaaatatcctgctggtcatggctcagccagcgaaagtgaacacaggagttgggccagagagagcaaaagctttaatgttctgaaacagctgcttctctcagaaaactgtgtgcgagatttgtccccgcacagaagtaactctgtggctgacagtaaaaagaaaggacacaaaaataatgtgaccaacagcaaacctgaatttagcatttcttctttaaatggactgatgtacagttccactcagcccagcagttgcatggataacaggacattttcatacccaggtgtagtaaaaactcctgtgagtcctactttccctgagcacttgggctgtgcagggtctagaccagaatctgggcttttgaatgggtgttccatgcccagtgagaaaggacccattaagtgggttatcactgatgcggagaagaatgagtatgaaaaagactctccaagattgaccaaaaccaacccaatactatattacatgcttcaaaaaggaggcaattctgttaccagtcgagaaacacaagacaaggacatttggagggaggcttcatctgctgaaagtgtctcacaggtcacagccaaagaagagttacttcctactgcagaaacgaaagcttctttctttaatttaagaagcccttacaatagccatatgggaaataatgcttctcgcccacacagcgcaaatggagaagtttatggacttctgggaagcgtgctaacgataaagaaagaatcagaataaaatgtacctgccatccagttttggatctttttaaaactaatgagtatgaacttgagatctgtataaataagagcatgatttgaaaaaaagcatggtataattgaaacttttttcattttgaaaagtattggttactggtgatgttgaaatatgcatactaatttttgcttaacattagatgtcatgaggaaactactgaactagcaattggttgtttaacacttctgtatgcatcagataacaactgtgagtagcctatgaatgaaattcttttataaatattaggcataaattaaaatgtaaaactccattcatagtggattaatgcattttgctgcctttattagggtactttattttgcttttcagaagtcagcctacataacacatttttaaagtctaaactgttaaacaactctttaaaggataattatccaataaaaaaaaacctagtgctgattcacagcttattatccaattcaaaaataaattagaaaaatatatgcttacatttttcacttttgctaaaaagaaaaaaaaaaggtgtttatttttaactcttggaagaggttttgtggttcccaatgtgtctgtcccaccctgatccttttcaatatatatttctttaaaccttgtgctacttagtaaaaattgattacaattgagggaagtttgatagatcctttaaaaaaaaggcagatttccattttttgtattttaactactttactaaattaatactcctccttttacagaattagaaaagttaacatttatctttaggtggtttcctgaaaagttgaatatttaagaaattgtttttaacagaagcaaaatggcttttctttggacagttttcaccatctcttgtaaaagttaattctcaccattcctgtggtacctgcgagtgttatgaccaggattccttaaacctgaactcagaccacttgcattagaaccatctggagcacttgttttaaaatgcagattcataggcagcatctcagatctacagaacaagaatctctgctaagtggacctggaatcttccatctgcatcttaacatgctctctaggtgtttcttgtgtttgagaaccatgacttatgactttcctcagaacatgagactgtaaaacaaaaacaaaaaactatgtgatgcctctattttccccaatacagtcacacatcagctcaaaatttgcaatattgtagttcatatattaccgttatgtctttggaaatcgggttcagaacactttttatgacaaaaattgggtggaggggataactttcatatctggctcaacatctcaggaaaatctgtgattatttgtgtgttctaatgagtaacatctacttagttagccttagggatggaaaaacagggccacttaccaaactcaggtgattccaggatggtttggaaacttctcctgaatgcatccttaacctttattaaaaccattgtcctaagaacaatgccaacaaagcttacaacatttagtttaaacccaagaagggcactaaactcagattgactaaataaaaagtacaaagggcacatatacgtgacagaattgtacacaatcactccattggatcttttactttaaagtagtgatgaaaagtacatgttgatactgtcttagaagaaattaatatattagtgaagccacatggggtttcagttgcgaaacaggtctgtttttatgttcagtttgtacaatccacaattcattcaccagatattttgttcttaattgtgaaccaggttagcaaatgacctatcaaaaattattctataatcactactagttaggatattgatttaaaattgttctacttgaagtggtttctaagatttttatattaaaaataggtgtgatttcctaatatgatctaaaaccctaaatggttatttttcctcagaatgatttgtaaatagctactggaaatattatacagtaataggagtgggtattatgcaacatcatggagaagtgaaggcataggcttattctgacataaaattccactggccagttgaatatattctattccatgtccatactatgacaatcttattgtcaacactatataaataagcttttaaacaagtcatttttcttgatcgttgtggaaggtttggagccttagaggtatgtcagaaaaaatatgttggtattctcccttgggtagggggaaatgacctttttacaagagagtgaaatttaggtcagggaaaagaccaagggccagcattgctacttttgtgtgtgtgtgtgtgggttttgttttgtttttttggttggctggttgttttcgttgttgttaacaaaggaatgagaatatgtaatacttaaataaacatgaccacgaagaatgctgttctgatttactagagaatgttcccaatttgaatttagggtgattttaaagaacagtgagaaagggcatacatccacagattcactttgtttatgcatatgtagatacaaggatgcacatatacacattttcaaggactattttagatatctagacaatttcttctaataaagtcatttgtgaaagggtactacagcttattgacatcagtaaggtagcattcattacctgtttattctctgctgcatcttacagaagagtaaactggtgagagtatatattttatatatatatatatatatatatatataatatgtatatatatatatattgacttgttacatgaagatgttaaaatcggtttttaaaggtgatgtaaatagtgatttccttaatgaaaaatacatattttgtattgttctaatgcaacagaaaagccttttaatctctttggttcctgtatattccatgtataagtgtaaatataatcagacaggtttaaaagttgtgcatgtatgtatacagttgcaagtctggacaaatgtatagaataaaccttttatttaagttgtgattacctgctgcatgaaaagtgcatgggggaccctgtgcatctgtgcatttggcaaaatgtcttaacaaatcagatcagatgttcatcctaacatgacagtattccatttctggacatgacgtctgtggtttaagctttgtgaaagaatgtgctttgattcgaagggtcttaaagaatttttttaatcgtcaaccacttttaaacataaagaattcacacaactactttcatgaattttttaatcccattgcaaacattattccaagagtatcccagtattagcaatactggaatataggcacattaccattcatagtaagaattctggtgtttacacaaccaaatttgatgcgatctgctcagtaatataatttgccatttttattagaaatttaatttcttcatgtgatgtcatgaaactgtacatactgcagtgtgaatttttttgttttgttttttaatcttttagtgtttacttcctgcagtgaatttgaataaatgagaaaaaatgcattgtc

SEQ ID NO: 160819 - DNA, 7671 bp, Homo sapiens
  Payload ID: 11423
  Gene Symbol: NRIP1
  Gene Name: nuclear receptor interacting protein 1
  Uniprot ID: P48552
  ENST ID: ENST00000400202
  CDS Start-End: 714-4190
agacattgcagcagagccccgaactcgggaggcggcggcggaggaggcggcggcgaggcgcagggacgacccggccccacgcccgcccgccacccgcgcgcgcccgtccgcccgtggcctcgcgtccgccgctgcgccgtgagcgccgctggtcggagggaagagctcgccggggcgccgggccaggacggggcggcaggcgccttcgcggaccgagcctgacggagccggaggctgggagccgcggcggcctgggatgcacacttgactgaaggaggacagggaatctgaagactccggatgacatcagagctacttttcaacagccttctcaattttctttctcagaaagcagaggctcagagcttggagacagacgaacactgatatttgcatttaatggggaacaaaagatgaagaaggaaaaggaatatattcactaaggattctatctgcttactgctacagacctatgtgttaaggaattcttctcctcctccttgcgtagaagttgatcagcactgtggtcagactgcatttatcttgtcattgccagaagaaatcttggacagaatgtaacagtacgtctctctctgattgcgatggaaggtgataaactgatactcctttattaaagttacatcgcactcaccacagaaaaccattctttaaagtgaatagaaaccaagcccttgtgaacacttctattgaacatgactcatggagaagagcttggctctgatgtgcaccaggattctattgttttaacttacctagaaggattactaatgcatcaggcagcagggggatcaggtactgccgttgacaaaaagtctgctgggcataatgaagaggatcagaactttaacatttctggcagtgcatttcccacctgtcaaagtaatggtccagttctcaatacacatacatatcaggggtctggcatgctgcacctcaaaaaagccagactgttgcagtcttctgaggactggaatgcagcaaagcggaagaggctgtctgattctatcatgaatttaaacgtaaagaaggaagctttgctagctggcatggttgacagtgtgcctaaaggcaaacaggatagcacattactggcctctttgcttcagtcattcagctctaggctgcagactgttgctctgtcacaacaaatcaggcagagcctcaaggagcaaggatatgccctcagtcatgattctttaaaagtggagaaggatttaaggtgctatggtgttgcatcaagtcacttaaaaactttgttgaagaaaagtaaagttaaagatcaaaagcctgatacgaatcttcctgatgtgactaaaaacctcatcagagataggtttgcagagtctcctcatcatgttggacaaagtggaacaaaggtcatgagtgaaccgttgtcatgtgctgcaagattacaggctgttgcaagcatggtggaaaaaagggctagtcctgccacctcacctaaacctagtgttgcttgtagccagttagcattacttctgtcaagcgaagcccatttgcagcagtattctcgagaacacgctttaaaaacgcaaaatgcaaatcaagcagcaagtgaaagacttgctgctatggccagattgcaagaaaatggccagaaggatgttggcagttaccagctcccaaaaggaatgtcaagccatcttaatggtcaggcaagaacatcatcaagcaaactgatggctagcaaaagtagtgctacagtgtttcaaaatccaatgggtatcattccttcttcccctaaaaatgcaggttataagaactcactggaaagaaacaatataaaacaagctgctaacaatagtttgcttttacatcttcttaaaagccagactatacctaagccaatgaatggacacagtcacagtgagagaggaagcatttttgaggaaagtagtacacctacaactattgatgaatattcagataacaatcctagttttacagatgacagcagtggtgatgaaagttcttattccaactgtgttcccatagacttgtcttgcaaacaccgaactgaaaaatcagaatctgaccaacctgtttccctggataacttcactcaatccttgctaaacacttgggatccaaaagtcccagatgtagatatcaaagaagatcaagatacctcaaagaattctaagctaaactcacaccagaaagtaacacttcttcaattgctacttggccataagaatgaagaaaatgtagaaaaaaacaccagccctcagggagtacacaatgatgtgagcaagttcaatacacaaaattatgcaaggacttctgtgatagaaagccccagtacaaatcggactactccagtgagcactccacctttacttacatcaagcaaagcagggtctcccatcaatctctctcaacactctctggtcatcaaatggaattccccaccatatgtctgcagtactcagtctgaaaagctaacaaatactgcatctaaccactcaatggaccttacaaaaagcaaagacccaccaggagagaaaccagcccaaaatgaaggtgcacagaactctgcaacgtttagtgccagtaagctgttacaaaatttagcacaatgtggaatgcagtcatccatgtcagtggaagagcagagacccagcaaacagctgttaactggaaacacagataaaccgataggtatgattgatagattaaatagccctttgctctcaaataaaacaaatgcagttgaagaaaataaagcatttagtagtcaaccaacaggtcctgaaccagggctttctggttctgaaatagaaaatctgcttgaaagacgtactgtcctccagttgctcctggggaaccccaacaaagggaagagtgaaaaaaaagagaaaactcccttaagagatgaaagtactcaggaacactcagagagagctttaagtgaacaaatactgatggtgaaaataaaatctgagccttgtgatgacttacaaattcctaacacaaatgtgcacttgagccatgatgctaagagtgccccattcttgggtatggctcctgctgtgcagagaagcgcacctgccttaccagtgtccgaagactttaaatcggagcctgtttcacctcaggatttttctttctccaagaatggtctgctaagtcgattgctaagacaaaatcaagatagttacctggcagatgattcagacaggagtcacagaaataatgaaatggcacttctagaatcaaagaatctttgcatggtccctaagaaaaggaagctttatactgagccattagaaaatccatttaaaaagatgaaaaacaacattgttgatgctgcaaacaatcacagtgccccagaagtactgtatgggtccttgcttaaccaggaagagctgaaatttagcagaaatgatcttgaatttaaatatcctgctggtcatggctcagccagcgaaagtgaacacaggagttgggccagagagagcaaaagctttaatgttctgaaacagctgcttctctcagaaaactgtgtgcgagatttgtccccgcacagaagtaactctgtggctgacagtaaaaagaaaggacacaaaaataatgtgaccaacagcaaacctgaatttagcatttcttctttaaatggactgatgtacagttccactcagcccagcagttgcatggataacaggacattttcatacccaggtgtagtaaaaactcctgtgagtcctactttccctgagcacttgggctgtgcagggtctagaccagaatctgggcttttgaatgggtgttccatgcccagtgagaaaggacccattaagtgggttatcactgatgcggagaagaatgagtatgaaaaagactctccaagattgaccaaaaccaacccaatactatattacatgcttcaaaaaggaggcaattctgttaccagtcgagaaacacaagacaaggacatttggagggaggcttcatctgctgaaagtgtctcacaggtcacagccaaagaagagttacttcctactgcagaaacgaaagcttctttctttaatttaagaagcccttacaatagccatatgggaaataatgcttctcgcccacacagcgcaaatggagaagtttatggacttctgggaagcgtgctaacgataaagaaagaatcagaataaaatgtacctgccatccagttttggatctttttaaaactaatgagtatgaacttgagatctgtataaataagagcatgatttgaaaaaaagcatggtataattgaaacttttttcattttgaaaagtattggttactggtgatgttgaaatatgcatactaatttttgcttaacattagatgtcatgaggaaactactgaactagcaattggttgtttaacacttctgtatgcatcagataacaactgtgagtagcctatgaatgaaattcttttataaatattaggcataaattaaaatgtaaaactccattcatagtggattaatgcattttgctgcctttattagggtactttattttgcttttcagaagtcagcctacataacacatttttaaagtctaaactgttaaacaactctttaaaggataattatccaataaaaaaaaacctagtgctgattcacagcttattatccaattcaaaaataaattagaaaaatatatgcttacatttttcacttttgctaaaaagaaaaaaaaaaggtgtttatttttaactcttggaagaggttttgtggttcccaatgtgtctgtcccaccctgatccttttcaatatatatttctttaaaccttgtgctacttagtaaaaattgattacaattgagggaagtttgatagatcctttaaaaaaaaggcagatttccattttttgtattttaactactttactaaattaatactcctccttttacagaattagaaaagttaacatttatctttaggtggtttcctgaaaagttgaatatttaagaaattgtttttaacagaagcaaaatggcttttctttggacagttttcaccatctcttgtaaaagttaattctcaccattcctgtggtacctgcgagtgttatgaccaggattccttaaacctgaactcagaccacttgcattagaaccatctggagcacttgttttaaaatgcagattcataggcagcatctcagatctacagaacaagaatctctgctaagtggacctggaatcttccatctgcatcttaacatgctctctaggtgtttcttgtgtttgagaaccatgacttatgactttcctcagaacatgagactgtaaaacaaaaacaaaaaactatgtgatgcctctattttccccaatacagtcacacatcagctcaaaatttgcaatattgtagttcatatattaccgttatgtctttggaaatcgggttcagaacactttttatgacaaaaattgggtggaggggataactttcatatctggctcaacatctcaggaaaatctgtgattatttgtgtgttctaatgagtaacatctacttagttagccttagggatggaaaaacagggccacttaccaaactcaggtgattccaggatggtttggaaacttctcctgaatgcatccttaacctttattaaaaccattgtcctaagaacaatgccaacaaagcttacaacatttagtttaaacccaagaagggcactaaactcagattgactaaataaaaagtacaaagggcacatatacgtgacagaattgtacacaatcactccattggatcttttactttaaagtagtgatgaaaagtacatgttgatactgtcttagaagaaattaatatattagtgaagccacatggggtttcagttgcgaaacaggtctgtttttatgttcagtttgtacaatccacaattcattcaccagatattttgttcttaattgtgaaccaggttagcaaatgacctatcaaaaattattctataatcactactagttaggatattgatttaaaattgttctacttgaagtggtttctaagatttttatattaaaaataggtgtgatttcctaatatgatctaaaaccctaaatggttatttttcctcagaatgatttgtaaatagctactggaaatattatacagtaataggagtgggtattatgcaacatcatggagaagtgaaggcataggcttattctgacataaaattccactggccagttgaatatattctattccatgtccatactatgacaatcttattgtcaacactatataaataagcttttaaacaagtcatttttcttgatcgttgtggaaggtttggagccttagaggtatgtcagaaaaaatatgttggtattctcccttgggtagggggaaatgacctttttacaagagagtgaaatttaggtcagggaaaagaccaagggccagcattgctacttttgtgtgtgtgtgtgtgggttttgttttgtttttttggttggctggttgttttcgttgttgttaacaaaggaatgagaatatgtaatacttaaataaacatgaccacgaagaatgctgttctgatttactagagaatgttcccaatttgaatttagggtgattttaaagaacagtgagaaagggcatacatccacagattcactttgtttatgcatatgtagatacaaggatgcacatatacacattttcaaggactattttagatatctagacaatttcttctaataaagtcatttgtgaaagggtactacagcttattgacatcagtaaggtagcattcattacctgtttattctctgctgcatcttacagaagagtaaactggtgagagtatatattttatatatatatatatatatatatatataatatgtatatatatatatattgacttgttacatgaagatgttaaaatcggtttttaaaggtgatgtaaatagtgatttccttaatgaaaaatacatattttgtattgttctaatgcaacagaaaagccttttaatctctttggttcctgtatattccatgtataagtgtaaatataatcagacaggtttaaaagttgtgcatgtatgtatacagttgcaagtctggacaaatgtatagaataaaccttttatttaagttgtgattacctgctgcatgaaaagtgcatgggggaccctgtgcatctgtgcatttggcaaaatgtcttaacaaatcagatcagatgttcatcctaacatgacagtattccatttctggacatgacgtctgtggtttaagctttgtgaaagaatgtgctttgattcgaagggtcttaaagaatttttttaatcgtcaaccacttttaaacataaagaattcacacaactactttcatgaattttttaatcccattgcaaacattattccaagagtatcccagtattagcaatactggaatataggcacattaccattcatagtaagaattctggtgtttacacaaccaaatttgatgcgatctgctcagtaatataatttgccatttttattagaaatttaatttcttcatgtgatgtcatgaaactgtacatactgcagtgtgaatttttttgttttgttttttaatcttttagtgtttacttcctgcagtgaatttgaataaatgagaaaaaatgcattgtc

SEQ ID NO: 160820 - DNA, 720 bp, Homo sapiens
  Payload ID: 11423
  Gene Symbol: NRIP1
  Gene Name: nuclear receptor interacting protein 1
  ENST ID: ENST00000411932
  CDS Start-End: 524-720
ttgtggttatctcagcagaagacataccgccctcctccttgtattggtcgggacctgggcattagggagtcaaggcaaaggagaaagaaaagagattttacattagtattctatgaaagccttacggtctgcagaacaaattgattactccggtgtacctgtgcttggcaccactgctgtgagagaaagaacactgatatttgcatttaatggggaacaaaagatgaagaaggaaaaggaatatattcactaaggattctatctgcttactgctacagacctatgtgttaaggaattcttctcctcctccttgcgtagaagttgatcagcactgtggtcagactgcatttatcttgtcattgccagaagaaatcttggacagaatgtaacagtacgtctctctctgattgcgatggaaggtgataaactgatactcctttattaaagttacatcgcactcaccacagaaaaccattctttaaagtgaatagaaaccaagcccttgtgaacacttctattgaacatgactcatggagaagagcttggctctgatgtgcaccaggattctattgttttaacttacctagaaggattactaatgcatcaggcagcagggggatcaggtactgccgttgacaaaaagtctgctgggcataatgaagaggatcagaactttaacatttctggcagtgcatttcccacctgtcaaagtaatggtcc

SEQ ID NO: 160821 - DNA, 2746 bp, Homo sapiens
  Payload ID: 11424
  Gene Symbol: NRIP2
  Gene Name: nuclear receptor interacting protein 2
  Uniprot ID: Q9BQI9
  ENST ID: ENST00000337508
  CDS Start-End: 42-887
agcaatctcgggaaattggagactgacgcggctgctcctgcatgttatttatttttcctctttccctcccgtggagaccctcctgttggaaagagagctgcagcacgggacagagacaggcaggaagaagcagagaggactcggtgacgcccccaccgagcagcccctggcccactcctccagcaggggccatgagcaccaagcaggaggccaggagagatgagggagaagccaggacgagggggcaggaggcacagcttcgagaccgagcccacctgagccagcagcgccggctcaaacaggccacccagttcctgcacaaggactcggccgacctgctcccgctggacagcctcaagaggctcggcacctccaaggacttgcagccgcgcagtgtgatccaaagacgcctggtggagggaaacccgaattggcttcagggggagcctccccggatgcaggacctgattcatggccaggagagcaggaggaagaccagcaggacagagattccagctcttctggtcaactgcaagtgccaggaccagctgcttagagtggccgttgacacaggcacccaatacaatcggatctctgctggatgtctcagccgcctggggttagagaaaagggtcctaaaagcctcagctggggacctggcccctgggcccccaacccaggtggagcagttggagctacagctggggcaggagactgtggtgtgctcggcacaggtggtggatgctgagagtcctgaattctgcctgggcctgcagactctgctttctctcaagtgctgcatcgacctggagcacggagtgctgcggctgaaagccccgttctcagagctacccttcctgcctttgtaccaagagcctggccagtgactgctgtctcagtcagtccccagagggaaagaccttgccttagaagaagaggcgtgtggggaacgggggctcttgaagccaggtagctggggactatggtgtctgcccttccaatcacctccctgacccctgctgtcccattttccccagctggccgcattcctctctgcttctcagcagctgtcctactccccaggacgagttttcactagagggcccacgatgccaggattctgattcatcttcctcccaagaaaagcaaagccaaatcaagaccacagataggaacctaagcacaatggggtgcctgcttgggctgggtcgaaggctctgctgactgctgtccttgtccatcacccaataccaccccaaacacaactcaacttcccacaccaccatgtctctcaccacaccttctgggcctcattatctcccacaactagaccgccatgcctcaccaacctatgtccctggacctcctggtgtctgcctctcggagtctgtgcacatctgctcacagttgagtgggggaagaaacagccagaattcaatacaacaaagagcgggagttagtataggaatgtccatctcataaggctgagagctattttttcctgtggctgcaaatgtctgaagccagttagtttgattaccctgtgcaaaaccttggacatacttctgctattaacgctataggtatttatccgtttccactggctttttgtacccaccgagcccctgagccttgcgtgtgtgtgtgtggaagagccttgtagagaactgctcctgtgaggcagacaggacagtgaggttgtcaccactcagacttcacctattcagcattctttctgatttctagaactatccacctcattaggccttcttcctatccccatctctggcctcttgagcttaagcttgtattgtcctggaatcagtggctttctaaccccctgccaggctttgccaaagcaaaaagacagaggctttttttttttttttaaagtttggggtctgtcaggagacagaggcttttttgaattcactgtgaagagaagaacccgaaccttaagacgccagatccctgagagtctttctggctggtttgagtctctcaaatcatggattaggagtaaagaaagaggccaggcgcaatggctcatgcctgtaatcccagcactttgggaggctgaggtgggtggatcacttgaggtcaggagtttgagaccagcctgggtaatatggcaaaaccccatctctactaaaaaatacaaaaattagccaggtatggtggtgaacacctgtaatcccagctacttggaaggctgaggcataggagttgcttgaacctgggagatgggggttgtagtgagccaagttcgtgccatcggactccagcctgggtgaaggagtgagaccctgtctccaaaaacaaacaaaaaaggagcagagaaagacagtggtacagctaacctgaacaagggaactgggaccgttgggctgaaacagtcttgagcctggggttgactgggttagagaagaaccgggatgcaaggagctgcctgtgacacctggcctgccctttctcagctgcctcccctgccctttctcagctgcctcccctgccctcagaaggaaaggagagggctcacttatcacttgtgccatagcacctggtctcaaaatcctaaaagctttcctcgccctcactgccttgctccacaaggtccactttcctgggtcttgtgctgtgcctttccttgtctgcctcctgctgcttctgtaactgcagaccccaggcccaatggcaagccctcggctcagctgcttctccattggaataaactcttgtttctcta

SEQ ID NO: 160822 - DNA, 578 bp, Homo sapiens
  Payload ID: 11424
  Gene Symbol: NRIP2
  Gene Name: nuclear receptor interacting protein 2
  ENST ID: ENST00000542386
  CDS Start-End: 165-578
agttaaagactctgacatctgctaggcgggaggcaagagacctaacaagaccctcctgttggaaagagagctgcagcacgggacagagacaggcaggaagaagcagagaggactcggtgacgcccccaccgagcagcccctggcccactcctccagcaggggccatgagcaccaagcaggaggccaggagagatgagggagaagccaggacgagggggcaggaggcacagcttcgagaccgagcccacctgagccagcagcgccggctcaaacaggccacccagttcctgcacaaggactcggccgacctgctcccgctggacagcctcaagaggctcggcacctccaaggacttgcagccgcgcagtgtgatccaaagacgcctggtggagggaaacccgaattggcttcagggggagcctccccggatgcaggacctgattcatggccaggagagcaggaggaagaccagcaggacagagattccagctcttctggtcaactgcaagtgccaggaccagctgcttagagtggccgttgacacaggcacccaatacaatcggatctctgctggatgt

SEQ ID NO: 160823 - DNA, 591 bp, Homo sapiens
  Payload ID: 11424
  Gene Symbol: NRIP2
  Gene Name: nuclear receptor interacting protein 2
  ENST ID: ENST00000542990
  CDS Start-End: 66-591
agtcaattagttaaagactctgacatctgctaggcgggaggcaagagacctaacaagcaggggccatgagcaccaagcaggaggccaggagagatgagggagaagccaggacgagggggcaggaggcacagcttcgagaccgagcccacctgagccagcagcgccggctcaaacaggccacccagttcctgcacaaggactcggccgacctgctcccgctggacagcctcaagaggctcggcacctccaaggacttgcagccgcgcagtgtgatccaaagacgcctggtggagggaaacccgaattggcttcagggggagcctccccggatgcaggacctgattcatggccaggagagcaggaggaagaccagcaggacagagattccagctcttctggtcaactgcaagtgccaggaccagctgcttagagtggccgttgacacaggcacccaatacaatcggatctctgctggatgtctcagccgcctggggttagagaaaagggtcctaaaagcctcagctggggacctggcccctgggcccccaacccaggtggagcagttggagctacagctggggcaggagactg

SEQ ID NO: 160824 - DNA, 3809 bp, Homo sapiens
  Payload ID: 11425
  Gene Symbol: NRIP3
  Gene Name: nuclear receptor interacting protein 3
  Uniprot ID: Q9NQ35
  ENST ID: ENST00000309166
  CDS Start-End: 115-840
gcgacgtcacgctcggctataaaaggcgcggctcggggcccttgcggcgctggaggagctcgaggctgaggctgccggggggctgtgggctaccgggccgccggcgcctcagcgatgttttactcagggctcctcactgagggcggccgcaaggagaccgacatgcgggaggcggcgtcactgcgacagcagcgccggatgaagcaggcggtgcagttcatccacaaggactccgccgacctgctgcccctggacggcctcaagaagctgggctcgtccaaggacatgcaacctcataatattctgcagaggcgcctcatggaaaccaacctgtctaagctccgaagcggtccccgtgtcccttgggcctctaagacgaacaaactcaatcaggctaagtctgaggggctaaagaagtctgaggaggatgacatgattttggtttcttgccagtgtgctggaaaggatgtgaaagccttggttgacacaggctgcctatataatctcatctctttggcctgtgtggacagattgggactcaaggagcatgtcaaatcccacaagcatgaaggagaaaagctttctctaccccggcatctcaaagtagtgggccagattgagcacctagtgatcacactgggctccctccgcctggactgcccagcagctgtggttgatgacaatgagaaaaacttgtcccttggtctacagactctccgatctctgaagtgcatcataaacttggataagcaccggctgatcatggggaagacagacaaggaagaaatcccttttgtggagacagtctctttgaatgaagacaacacttcagaagcataactacagcctgcagcatgtctgcacgtgtgcatgcatacacaccgggttgacagatagagaaaactgggtttgaaccaaatgccgtagtgacttgctgtggaccaagtccttccatctaatagaagctccaggggctccttcccattcagacctctctagactatagtctatgcttagagatcttgtctggttatggccattgttttttactactttgatcacttaacttatagaccttttttgacactgccagtctcacttgtggcctatttctctgcttcttccaggaatttgcttttattagtcaagtataggggctgccaggttctgtgtctccatagatatatgtgcttcttttcctatagctaaatgtataataaacaggaacctgacctttacctcctttcagctgtttcaaacaggtgccaggatacctatgtcttagaattagagtttcttcaaattgattcattgatttctcaagtatggattatgtgaaagagcccagggacattatccattacagtttaactctttcatttaaaggtccagagaggcaagtgaattgtctaagttcatatattaggtcagtgactgaagggaccaagaacgcagacctgatttccaagccaagactcccatgctgcctcatttgtattcaagcctttaacaggagggcaaagaggtgagaatgtgttaaaaaaaaaaaaaaaaaggcagagcatgggaggaatattctctggagatggatgctaggatgatttgggtagctctccctcctgtgtgccaagcccagtaaaagttccttgccccaaactgtcacatttaggccctcatcttggtgcctaaaaacgagcgtacaaagatgaatgaaatggtttctcactgtgaacctcttggaggaaaggaggaaccacagacagaggaatattaatccctctctgatatggaattgaaggcttaagtaaatcagagtgtcactgtcagacgttgattactcccaagatccgatcagcatttctgcccatcctattatgtgtctgtcaaggactgaagtagctggaaaccaggagtagagaaagatggggggaaaaaaagagcaaggccagaatagaagggagtagactgagtagaatcagttggtggagaggcctatctagataaacctttctgggaggcagggaatgacattttcaggcagggaattgagatgttcagttctgtcctgatacaaggaaagaggcagagcaggagccggcaatgttaaggacaactttttataactgcccagtatttcctgacccctgtcaaaggttggggagaatacaaggtttcttgaagctttttgactggggtgtcacattaggcacacaggtgtctataatggaatctccccttcagtttggtcatagaagtgcttggacaagtcagaaaaatagctagctgtgggtatccctttaagatattcccaagtctaccctgtgtcatagcagtagttctcagagtgtttgtttaaaggatcccactttgaactttgccaagtactaccaactaccttgtctggtgttcagcaactgcccctactgaacagccctttggaactctgaatgatttgggcctcacagaagctccctaaagcctaggaacttggtgactatcatttgaacaactaggcagccatactgcagtcagttgtcatggggtcattccctaggcccccttcctatcagcctctacctaaagaagctagataggaagctaagcacagccatggttgggaggctatatctaaagctcatgaggggtgatcccggggttaccagccttcagcactccctctagcaacaccccattctcttacctagcggggatttgtacctttccactgaggcctctccatgctccttccctacctttcatggcaatactttggcctgcctcttatcctggtactaagttgaagtaaagctcaccctttacttccctacttgaaagttctactctgagccttgactcttagccacagtgaggcatgttgaaggttcctgctggtttattctttttttttttttttttttagacagagtctcactctgttgcccaggctggagtgcagtggcacgatctcggttcactgcaagctccgcctcccgggttcatgccattctcctgcctcagcctcccaagtagctgggactacaggcacctgccaccacgcctggctaattttttgtatttttagtagagacgggtttcaccgtgttagctaggatggtctcgatctcctgaccttgtggtccgcccacctcagcctcccaaagtgctgggattacaggcgtgagccaccgcacccggccttcattcactttctttaaatgcctccaagttgattattctcctagctcatatctccttgatgtgcatgagggagcactgggtctaatttttgggggctgagaaggtaagaaggtgaggtcagtttttcccaggagtcctaaaaaattctggtaccttacattgagggtgtgggagaaagggtgtcatagttctgaaaataggcagtagcatgaagcaccagacctgtctcattccttattagatgtctatctcaaataacagagtttgaaaaatattggttttatcatttgatatttccatgcctgactcgggaaaataacattttctgacttctttctattttcttgccctgcacagaccctacctggtacaattttctatttcttagctcaaagtgtctatacaatgggttgcctggtatgtcagctgccctcactcttgtgtaatagaaatatattgccaggctggggacgtggaggagacgaactggattcctccctcctcctgttgccaggcctctctgcattggcactttatcctttcagtgtttctggctgtgttgggttcatttgtgagactgatgtaacaataaagtgaaatcttcccctctg

SEQ ID NO: 160825 - DNA, 551 bp, Homo sapiens
  Payload ID: 11425
  Gene Symbol: NRIP3
  Gene Name: nuclear receptor interacting protein 3
  ENST ID: ENST00000531142
  CDS Start-End: 1-198
atcacactgggctccctccgcctggactgcccagcagctgtggttgatgacaatgagaaaaacttgtcccttggtctacagactctccgatctctgaagtgcatcataaacttggataagcaccggctgatcatggggaagacagacaaggaagaaatcccttttgtggagacagtctctttgaatgaagacaagtgagtgcccaaatgggtcagatcaagtcacatccatttgtcatcagctgcgagcagggtggtggtggttctcagacaggacatggggttgtatcctgtctttggctttcaattatactacaaatccacccttccccacacccagagttcatcaccccacaaaactctgtagtgcacacatcagaatgagcaatggtgatgccacacagagtggtagggaaatgactagctttgaaagcaaaattttacttgccttcagcttaactttttttgaatttggcattatttctcctgatatttatttctcatttcagcacttcagaagcataactacagcctgcagcatgtctgcacgtg

SEQ ID NO: 160826 - DNA, 980 bp, Homo sapiens
  Payload ID: 11425
  Gene Symbol: NRIP3
  Gene Name: nuclear receptor interacting protein 3
  ENST ID: ENST00000531090
  CDS Start-End: 115-540
gcgacgtcacgctcggctataaaaggcgcggctcggggcccttgcggcgctggaggagctcgaggctgaggctgccggggggctgtgggctaccgggccgccggcgcctcagcgatgttttactcagggctcctcactgagggcggccgcaaggagaccgacatgcgggaggcggcgtcactgcgacagcagcgccggatgaagcaggcggtgcagttcatccacaaggactccgccgacctgctgcccctggacggcctcaagaagctgggctcgtccaaggacatgcaacctcataatattctgcagaggcgcctcatggaaaccaacctgtctaagctccgaagcggtccccgtgtcccttgggcctctaagacgaacaaactcaatcaggctaagtctgaggggctaaagaagtctgaggaggatgacatgattttggtttcttgccagtgtgctggaaaggatgtgaaagccttggttgacacaggctgcctatataatctcatctctttggcctgtgtggacagattgggatgacaatgagaaaaacttgtcccttggtctacagactctccgatctctgaagtgcatcataaacttggataagcaccggctgatcatggggaagacagacaaggaagaaatcccttttgtggagacagtctctttgaatgaagacaagtgagtgcccaaatgggtcagatcaagtcacatccatttgtcatcagctgcgagcagggtggtggtggttctcagacaggacatggggttgtatcctgtctttggctttcaattatactacaaatccacccttccccacacccagagttcatcaccccacaaaactctgtagtgcacacatcagaatgagcaatggtgatgccacacagagtggtagggaaatgactagctttgaaagcaaaattttacttgccttcagcttaactttttttgaatttggcattatttctcctgat

SEQ ID NO: 160827 - DNA, 547 bp, Homo sapiens
  Payload ID: 11425
  Gene Symbol: NRIP3
  Gene Name: nuclear receptor interacting protein 3
  ENST ID: ENST00000525100
  CDS Start-End: 67-547
gctggaggagctcgaggctgaggctgccggggggctgtgggctaccgggccgccggcgcctcagcgatgttttactcagggctcctcactgagggcggccgcaaggagaccgacatgcgggaggcggcgtcactgcgacagcagcgccggatgaagcaggcggtgcagttcatccacaaggactccgccgacctgctgcccctggacggcctcaagaagctgggctcgtccaaggacatgaggcgcctcatggaaaccaacctgtctaagctccgaagcggtccccgtgtcccttgggcctctaagacgaacaaactcaatcaggctaagtctgaggggctaaagaagtctgaggaggatgacatgattttggtttcttgccagtgtgctggaaaggatgtgaaagccttggttgacacaggctgcctatataatctcatctctttggcctgtgtggacagattgggactcaaggagcatgtcaaatcccacaagcatgaaggagaaaagctttctctaccccggcatctcaaagtagtgggccaga

SEQ ID NO: 160828 - DNA, 567 bp, Homo sapiens
  Payload ID: 11425
  Gene Symbol: NRIP3
  Gene Name: nuclear receptor interacting protein 3
  ENST ID: ENST00000534759
  CDS Start-End: 1-167
cccttggtctacagactctccgatctctgaagtgcatcataaacttggataagcaccggctgatcatggggaagacagacaaggaagaaatcccttttgtggagacagtctctttgaatgaagacaagtccagagaggcaagtgaattgtctaagttcatatattaggtcagtgactgaagggaccaagaacgcagacctgatttccaagccaagactcccatgctgcctcatttgtattcaagcctttaacaggagggcaaagaggtgagaatgtgttaaaaaaaaaaaaaaaaaggcagagcatgggaggaatattctctggagatggatgctaggatgatttgggtagctctccctcctgtgtgccaagcccagtaaaagttccttgccccaaactgtcacatttaggccctcatcttggtgcctaaaaacgagcgtacaaagatgaatgaaatggtttctcactgtgaacctcttggaggaaaggaggaaccacagacagaggaatattaatccctctctgatatggaattgaaggcttaagtaaatcagagtgtcactgtca

SEQ ID NO: 160829 - DNA, 475 bp, Homo sapiens
  Payload ID: 11426
  Gene Symbol: NR0B1
  Gene Name: nuclear receptor subfamily 0, group B, member 1
  ENST ID: ENST00000378963
  CDS Start-End: 11-328
gtccctgctcatgcttgagctggcccaggaccgcttgcagttcgagactgtggaagtctcggagcccagcatgctgcagaagatcctcaccaccaggcggcgggagaccgggggcaacgagccactgcccgtgcccacgctgcagcaccatttggcaccgccggcggaggccaggaaggtgccctccgcctcccaggtccaagccatcaagtgctttctttccaaatgctggagtctgaacatcagtaccaaggagtacgcctacctcaaggggaccgtgctctttaacccgggaaaagggaaggaaaatgattgcaatcatcattaacatcatttaaaccaagtggtcaactgctaattacttgaatacaagttaaagaactttgcaacgatattatcatcatggaagatcaaaggaccttcaaaagcagcctcctcttattactttccttataaaaacttacatccacttaaa

SEQ ID NO: 160830 - DNA, 2021 bp, Homo sapiens
  Payload ID: 11426
  Gene Symbol: NR0B1
  Gene Name: nuclear receptor subfamily 0, group B, member 1
  Uniprot ID: P51843
  ENST ID: ENST00000378970
  CDS Start-End: 236-1648
gagctcccacgctgctgttcttccatttccagcttttaaagagcacccgccccttcgaaccaccgaggtcatgggcgaacacaccggagcgcagcaccgcgcccccccgcacacaccgcccgcctccgcgcccttgcccagaccgaggcggccgacgcgcctgcgtgcgcgctaggtataaataggtcccaggaggcagccactgggcagaactgggctacgggcgccgcgggccatggcgggcgagaaccaccagtggcagggcagcatcctctacaacatgcttatgagcgcgaagcaaacgcgcgcggctcctgaggctccagagacgcggctggtggatcagtgctggggctgttcgtgcggcgatgagcccggggtgggcagagaggggctgctgggcgggcggaacgtggcgctcctgtaccgctgctgcttttgcggtaaagaccacccacggcagggcagcatcctctacagcatgctgacgagcgcaaagcaaacgtacgcggcaccgaaggcgcccgaggcgacgctgggtccgtgctggggctgttcgtgcggctctgatcccggggtgggcagagcggggcttccgggtgggcggcccgtggcactcctgtaccgctgctgcttttgtggtgaagaccacccgcggcagggcagcatcctctacagcttgctcactagctcaaagcaaacgcacgtggctccggcagcgcccgaggcacggccagggggcgcgtggtgggaccgctcctacttcgcgcagaggccagggggtaaagaggcgctaccaggcgggcgggccacggcgcttctgtaccgctgctgcttttgcggtgaagaccacccgcagcagggcagcaccctctactgcgtgcccacgagcacaaatcaagcgcaggcggctccggaggagcggccgagggccccctggtgggacacctcctctggtgcgctgcggccggtggcgctcaagagtccacaggtggtctgcgaggcagcctcagcgggcctgttgaagacgctgcgcttcgtcaagtacttgccctgcttccaggtgctgcccctggaccagcagctggtgctggtgcgcaactgctgggcgtccctgctcatgcttgagctggcccaggaccgcttgcagttcgagactgtggaagtctcggagcccagcatgctgcagaagatcctcaccaccaggcggcgggagaccgggggcaacgagccactgcccgtgcccacgctgcagcaccatttggcaccgccggcggaggccaggaaggtgccctccgcctcccaggtccaagccatcaagtgctttctttccaaatgctggagtctgaacatcagtaccaaggagtacgcctacctcaaggggaccgtgctctttaacccggacgtgccgggcctgcagtgcgtgaagtacattcagggactccagtggggaactcagcaaatactcagtgaacacaccaggatgacgcaccaagggccccatgacagattcatcgaacttaatagtacccttttcctgctgagattcatcaatgccaatgtcattgctgaactgttcttcaggcccatcatcggcacagtcagcatggatgatatgatgctggaaatgctctgtacaaagatataaagtcatgtgggccacacaagtgcagtagtgcagttcaccatgagggaagaataaagagctgtgggcaaaagagtgtaaaatattttaaaataaactttcttaatatttttacatgcagagtatttttgtattcaattaaagaaataattttattccagacagtcacaaatttctctgttccatagttaaagaagacatttgccaacaggtagcatagctctgtacatcttttaaaaaaaaaatagcagggtactagtataataagctattttcacaagtgtagcaatttcatggaacctgctcaaatcaaatttgtacatattgttataataaattttaaggtcttaactattaacttgattgaaaaaagctt

SEQ ID NO: 160831 - DNA, 1156 bp, Homo sapiens
  Payload ID: 11427
  Gene Symbol: NR0B2
  Gene Name: nuclear receptor subfamily 0, group B, member 2
  Uniprot ID: Q15466
  ENST ID: ENST00000254227
  CDS Start-End: 27-800
ctggaagtgagagcagatccctaaccatgagcaccagccaaccaggggcctgcccatgccagggagctgcaagccgccccgccattctctacgcacttctgagctccagcctcaaggctgtcccccgaccccgtagccgctgcctatgtaggcagcaccggcccgtccagctatgtgcacctcatcgcacctgccgggaggccttggatgttctggccaagacagtggccttcctcaggaacctgccatccttctggcagctgcctccccaggaccagcggcggctgctgcagggttgctggggccccctcttcctgcttgggttggcccaagatgctgtgacctttgaggtggctgaggccccggtgcccagcatactcaagaagattctgctggaggagcccagcagcagtggaggcagtggccaactgccagacagaccccagccctccctggctgcggtgcagtggcttcaatgctgtctggagtccttctggagcctggagcttagccccaaggaatatgcctgcctgaaagggaccatcctcttcaaccccgatgtgccaggcctccaagccgcctcccacattgggcacctgcagcaggaggctcactgggtgctgtgtgaagtcctggaaccctggtgcccagcagcccaaggccgcctgacccgtgtcctcctcacggcctccaccctcaagtccattccgaccagcctgcttggggacctcttctttcgccctatcattggagatgttgacatcgctggccttcttggggacatgcttttgctcaggtgacctgttccagcccaggcagagatcaggtgggcagaggctggcagtgctgattcagcctggccatccccagaggtgacccaatgctcctggagggggcaagcctgtatagacagcacttggctccttaggaacagctcttcactcagccacaccccacattggacttccttggtttggacacagtgttccagctgcctgggaggcttttggtggtccccacagcctctgggccaagactcctgtcccttcttgggatgagaatgaaagcttaggctgcttattggaccagaagtcctatcgactttatacagaactgaattaagttattgatttttgtaataaaaggtatgaaacac

SEQ ID NO: 160832 - DNA, 2772 bp, Homo sapiens
  Payload ID: 11428
  Gene Symbol: NR1D1
  Gene Name: nuclear receptor subfamily 1, group D, member 1
  Uniprot ID: P20393
  ENST ID: ENST00000246672
  CDS Start-End: 632-2476
gggcacgaggcgctccctgggatcacatggtacctgctccagtgccgcgtgcggcccgggaaccctgggctgctggcgcctgcgcagagccctctgtcccagggaaaggctcgggcaaaaggcggctgagattggcagagtgaaatattactgccgagggaacgtagcagggcacacgtctcgcctctttgcgactcggtgccccgtttctccccatcacctacttacttcctggttgcaacctctcttcctctgggacttttgcaccgggagctccagattcgccaccccgcagcgctgcggagccggcaggcagaggcaccccgtacactgcagagacccgaccctccttgctaccttctagccagaactactgcaggctgattccccctacacactctctctgctcttcccatgcaaagcagaactccgttgcctcaacgtccaacccttctgcagggctgcagtccggccaccccaagaccttgctgcagggtgcttcggatcctgatcgtgagtcgcggggtccactccccgcccttagccagtgcccagggggcaacagcggcgatcgcaacctctagtttgagtcaaggtccagtttgaatgaccgctctcagctggtgaagacatgacgaccctggactccaacaacaacacaggtggcgtcatcacctacattggctccagtggctcctccccaagccgcaccagccctgaatccctctatagtgacaactccaatggcagcttccagtccctgacccaaggctgtcccacctacttcccaccatcccccactggctccctcacccaagacccggctcgctcctttgggagcattccacccagcctgagtgatgacggctccccttcttcctcatcttcctcgtcgtcatcctcctcctccttctataatgggagcccccctgggagtctacaagtggccatggaggacagcagccgagtgtcccccagcaagagcaccagcaacatcaccaagctgaatggcatggtgttactgtgtaaagtgtgtggggacgttgcctcgggcttccactacggtgtgcacgcctgcgagggctgcaagggctttttccgtcggagcatccagcagaacatccagtacaaaaggtgtctgaagaatgagaattgctccatcgtccgcatcaatcgcaaccgctgccagcaatgtcgcttcaagaagtgtctctctgtgggcatgtctcgagacgctgtgcgttttgggcgcatccccaaacgagagaagcagcggatgcttgctgagatgcagagtgccatgaacctggccaacaaccagttgagcagccagtgcccgctggagacttcacccacccagcaccccaccccaggccccatgggcccctcgccaccccctgctccggtcccctcacccctggtgggcttctcccagtttccacaacagctgacgcctcccagatccccaagccctgagcccacagtggaggatgtgatatcccaggtggcccgggcccatcgagagatcttcacctacgcccatgacaagctgggcagctcacctggcaacttcaatgccaaccatgcatcaggtagccctccagccaccaccccacatcgctgggaaaatcagggctgcccacctgcccccaatgacaacaacaccttggctgcccagcgtcataacgaggccctaaatggtctgcgccaggctccctcctcctaccctcccacctggcctcctggccctgcacaccacagctgccaccagtccaacagcaacgggcaccgtctatgccccacccacgtgtatgcagccccagaaggcaaggcacctgccaacagtccccggcagggcaactcaaagaatgttctgctggcatgtcctatgaacatgtacccgcatggacgcagtgggcgaacggtgcaggagatctgggaggatttctccatgagcttcacgcccgctgtgcgggaggtggtagagtttgccaaacacatcccgggcttccgtgacctttctcagcatgaccaagtcaccctgcttaaggctggcacctttgaggtgctgatggtgcgctttgcttcgttgttcaacgtgaaggaccagacagtgatgttcctaagccgcaccacctacagcctgcaggagcttggtgccatgggcatgggagacctgctcagtgccatgttcgacttcagcgagaagctcaactccctggcgcttaccgaggaggagctgggcctcttcaccgcggtggtgcttgtctctgcagaccgctcgggcatggagaattccgcttcggtggagcagctccaggagacgctgctgcgggctcttcgggctctggtgctgaagaaccggcccttggagacttcccgcttcaccaagctgctgctcaagctgccggacctgcggaccctgaacaacatgcattccgagaagctgctgtccttccgggtggacgcccagtgacccgcccggccggccttctgccgctgcccccttgtacagaatcgaactctgcacttctctctcctttacgagacgaaaaggaaaagcaaaccagaatcttatttatattgttataaaatattccaagatgagcctctggccccctgagccttcttgtaaatacctgcctccctcccccatcaccgaacttcccctcctcccctatttaaaccactctgtctcccccacaaccctcccctggccctctgatttgttctgttcctgtctcaaatccaatagttcacagctgagctggc

SEQ ID NO: 160833 - DNA, 5258 bp, Homo sapiens
  Payload ID: 11429
  Gene Symbol: NR1D2
  Gene Name: nuclear receptor subfamily 1, group D, member 2
  Uniprot ID: Q14995
  ENST ID: ENST00000312521
  CDS Start-End: 320-2059
gtcacatggtcgcggctgccctccccgtcagccgccctcgccgccgcggtgcgctggctgcaggaagccgccgcgccgccgcttttgttgtcagggacccagcgaggagcgccgctcgccggccgccgccaccctctctcgctgcagcctgctgtgcgctgcacggcctggggcccgggagccccgcccgctctgcccatgagggggccccgcgaccaccgctgcttccagcccggggcggcgcggcgctgaggcggcggcggcggcgctgccccctctgcgggaagcgggcggccccggccgcctccgcgagggcaccatggaggtgaatgcaggaggtgtgattgcctatatcagttcttccagctcagcctcaagccctgcctcttgtcacagtgagggttctgagaatagtttccagtcctcctcctcttctgttccatcttctccaaatagctctaattctgataccaatggtaatcccaagaatggtgatctcgccaatattgaaggcatcttgaagaatgatcgaatagattgttctatgaaaacaagcaaatcgagtgcacctgggatgacaaaaagtcatagtggtgtgacaaaatttagtggcatggttctactgtgtaaagtctgtggggatgtggcgtcaggattccactatggagttcatgcttgcgaaggctgtaagggtttctttcggagaagtattcaacaaaacatccagtacaagaagtgcctgaagaatgaaaactgttctataatgagaatgaataggaacagatgtcagcaatgtcgcttcaaaaagtgtctgtctgttggaatgtcaagagatgctgttcggtttggtcgtattcctaagcgtgaaaaacagaggatgctaattgaaatgcaaagtgcaatgaagaccatgatgaacagccagttcagtggtcacttgcaaaatgacacattagtagaacatcatgaacagacagccttgccagcccaggaacagctgcgacccaagccccaactggagcaagaaaacatcaaaagctcttctcctccatcttctgattttgcaaaggaagaagtgattggcatggtgaccagagctcacaaggatacctttatgtataatcaagagcagcaagaaaactcagctgagagcatgcagccccagagaggagaacggattcccaagaacatggagcaatataatttaaatcatgatcattgcggcaatgggcttagcagccattttccctgtagtgagagccagcagcatctcaatggacagttcaaagggaggaatataatgcattacccaaatggtcatgccatttgtattgcaaatggacattgtatgaacttctccaatgcttatactcaaagagtatgtgatagagttccgatagatggattttctcagaatgagaacaagaatagttacctgtgcaacactggaggaagaatgcatctggtttgtccaatgagtaagtctccatatgtggatcctcataaatcaggacatgaaatctgggaagaattttcgatgagcttcactccagcagtgaaagaagtggtggaatttgcaaagcgtattcctgggttcagagatctctctcagcatgaccaggtcaaccttttaaaggctgggacttttgaggttttaatggtacggttcgcatcattatttgatgcaaaggaacgtactgtcacctttttaagtggaaagaaatatagtgtggatgatttacactcaatgggagcaggggatctgctaaactctatgtttgaatttagtgagaagctaaatgccctccaacttagtgatgaagagatgagtttgtttacagctgttgtcctggtatctgcagatcgatctggaatagaaaacgtcaactctgtggaggctttgcaggaaactctcattcgtgcactaaggaccttaataatgaaaaaccatccaaatgaggcctctatttttacaaaactgcttctaaagttgccagatcttcgatctttaaacaacatgcactctgaggagctcttggcctttaaagttcacccttaaggcctttgtttatttaaacatgaactgatggtaactgtacattttgtgctaaaatgcatatttatatgtgtataccatatgtggagatagaaaagacctttaagacaataaaagattgtaggctatctctgtaatcatgcaatagctgttcggattgagaactcttcagccatgattagacgttgactgcatctccctgatagaccaatcagctgtgtcgcacttaaactggagaagttacactgaagtataatcacactgaatgttagactttttcatctgccaaaaccaaaaaccattttgatctccctgtggttatcaatataacgcacaatcacaagtgtatgaggacttagaaattaatcctttgtggtaggagttctgttgaatgatggaaatcttattactaccacaagactatttgatctggtaattggagacttcgggatttaggagatctccatgtctgtatttactctaccactgctaaagtgtgtggtcctgggtagtttacttgcttgcggaaaatgagaattgatggtgtccccaatgccccacctcacagagttactaaaaaatgtctgtaaagcatatttacctcttgggagataggcactatgtaaataaggtaaaatttctgttattacaattattcataataatattcttttcttatttctaagcctttctgggaaatcatttcagtccacaccaaccatattattcagggttcctgccatatgtgtggggtatcctactgatacacacgtattcaaagtttatgggtacaacaaagacatagtacatgtacataatatgtatgtgaatatagttaaatatatttcttcacaatattttaaactgtgaagaactttatcatacaggaaacttaaaacaagaggtgtcaaaagacccaaattaggtgcattttacttgtttatgatggcataaccattgctttaaaatgtttagacagtagaatattgaatttatgctctatttttgtttatttaagcaacacttaatgtaaaagtgcaacaggcaattgaatccaaatttcaacgacaaaaaaaaaaaacatgtattttagagttcatctttggcaaaatctttggttcagggtactagttgtttaaaagttgattcatattcttaccttgtgctgagaaaggttgcattgctgccccttatacacatgctgcagcttgatgttaaagaatttttattctttctgaagaactaattaatgtttaaagcaactgtttaatatgatggcatgtgtgtgtgtgcgtgcgtgtgtatgttctgagtccacttcttttttcctaaataacactacagggattttgtcatattagatttaatttataatttgaaaaatcatctagtgtgtgacctacaggcttagaaatggtatagtcaaagacattttatccacatttctaatagtggacttgattaagtagataagatcagcatctgtttatggtagtaggagaaatagccaaagttgaggattttatgtatgttttcctgtttacctggaaaatagcaattaattggattttttggtaaagattgccttctgtataatgtttggattatataaaattgcaaaaatgataacagcccgctttactgtactaagcctgttactttcatgacgtgtgagcagaatgccttattttgtaatcttgtttaacttgttgctactgggacttgatttactgtggcactagttaagtaagttaaaaaaaagttaaaccctctcattattaaagaggaaaggcgatggtgatgtctgtagtacaatataaaccataattgtgatttaccttaagtaggtataactcttatgggatatacagtatagtttttgtgaatctttacatgatagcattatctttttataattttttttcctaagataaacaaatgcatagttttcttctatgggtgatagaaacagctttttgaagtaatgaaaacctcaaaagatcatgttgattcttaatttttgccttttgcataagcctctttataacatgtatctttaaaacaattaagtctttaggaatgtgtaaccagaactatgttagtattgcttataaaactttagttaggttcaatatatacatatatacatctctatataggtatatagatttgcattttgtcttgtaaaattttatttgaataaattcttcctgtaggtaatgggaaacaaaattaatagttcatatgtcactcatagcatttctatatttgaaagtagcccaatataaaacttttgattctaaaattaaaccagcagcctattacaagcacattctttgattgagtcattggttataaacttactaaatgcagagaaagcagccaatttaggaaacttctgagttggtgggacactgttgattaataatgtactgtatgaattaagtgatgctttaactttgattttacattttaaagttaaaatgtgggcattatgtcagcaaacttaagggcattatgtcagcaagctaaaacattttttttcctgtgcttttaatgtatctctttacatgatctgagagaggattcaagttgatagaaatagctgaggggaaaagggggaacatcttgggatgaagcttgtccttatggtgatggtttaattacagattaaaaaattagaaggaaatttcagtggattaagtgtatagctttcatatctacatttcaagaaattaccattgtaacttgataagagatgatttattttatgtaaacatctttgcaaagcaaggtgtagcagctcagctagatttattactgtgcacgaaagtaaatacctatctcaattattctttttcttttccaatataaagtttgctgaatgtacaagaagagtttatcacttaggatatagaatttttttaggggttgggggaggggatctgttaggaaactgttacctataaacaaagattgactggattcgatccaaaagataaaacttgaagctattctggaactaacatggaaaaatgaaatggctattgtttaaaaaaatgatagaaatacattgttgatgggatatgagttaagtttattttctacaaactgtaattgatgaggacatggataatatcttcatgtttctgagaagtaatctgtatgtggggggaggggataataaatatttctaaccaac

SEQ ID NO: 160834 - DNA, 3129 bp, Homo sapiens
  Payload ID: 11429
  Gene Symbol: NR1D2
  Gene Name: nuclear receptor subfamily 1, group D, member 2
  ENST ID: ENST00000383773
  CDS Start-End: 205-1431
tcgccggccgccgccaccctctctcgctgcagcctgctgtgcgctgcacggcctggggcccgggagccccgcccgctctgcccatgagggggccccgcgaccaccgctgcttccagcccggggcggcgcggcgctgaggcggcggcggcggcgctgccccctctgcgggaagcgggcggccccggccgcctccgcgagggcaccatggaggtgaatgcaggaggtgtgattgcctatatcagttcttccagctcagcctcaagccctgcctcttgtcacagtgagggttctgagaatagtttccagtcctcctcctcttctgttccatcttctccaaatagctctaattctgataccaatggtaatcccaagaatggtgatctcgccaatattgaaggcatcttgaagaatgatcgaatagattgttctatgaaaacaagcaaatcgagtgcacctgggatgacaaaaagtcatagtggtgtgacaaaatttagtggcatggttctactgtgtaaagtctgtggggatgtggcgtcaggattccactatggagttcatgcttgcgaaggctgtaagggtttctttcggagaagtattcaacaaaacatccagtacaagaagtgcctgaagaatgaaaactgttctataatgagaatgaataggaacagatgtcagcaatgtcgcttcaaaaagtgtctgtctgttggaatgtcaagagatgctgttcggtttggtcgtattcctaagcgtgaaaaacagaggatgctaattgaaatgcaaagtgcaatgaagaccatgatgaacagccagttcagtggtcacttgcaaaatgacacattagtagaacatcatgaacagacagccttgccagcccaggaacagctgcgacccaagccccaactggagcaagaaaacatcaaaagctcttctcctccatcttctgattttgcaaaggaagaagtgattggcatggtgaccagagctcacaaggatacctttatgtataatcaagagcagcaagaaaactcagctgagagcatgcagccccagagaggagaacggattcccaagaacatggagcaatataatttaaatcatgatcattgcggcaatgggcttagcagccattttccctgtagtgagagccagcagcatctcaatggacagttcaaagggaggaatataatgcattacccaaatggtcatgccatttgtattgcaaatggacattgtatgaacttctccaatgcttatactcaaagagtatgtgatagagttccgatagatggattttctcagaatgagaacaagaatagttacctgtgcaacactggaggaagaatgcatctgtacagtgttcatattcagccaaaatttcaccaaaaacagcagtaccacaccatttccagtttaaaccatgaagtcctttgatagtgcttggtattttctactgacaggtttgtccaatgagtaagtctccatatgtggatcctcataaatcaggacatgaaatctgggaagaattttcgatgagcttcactccagcagtgaaagaagtggtggaatttgcaaagcgtattcctgggttcagagatctctctcagcatgaccaggtcaaccttttaaaggctgggacttttgaggttttaatggtacggttcgcatcattatttgatgcaaaggaacgtactgtcacctttttaagtggaaagaaatatagtgtggatgatttacactcaatgggagcaggggatctgctaaactctatgtttgaatttagtgagaagctaaatgccctccaacttagtgatgaagagatgagtttgtttacagctgttgtcctggtatctgcagatcgatctggaatagaaaacgtcaactctgtggaggctttgcaggaaactctcattcgtgcactaaggaccttaataatgaaaaaccatccaaatgaggcctctatttttacaaaactgcttctaaagttgccagatcttcgatctttaaacaacatgcactctgaggagctcttggcctttaaagttcacccttaaggcctttgtttatttaaacatgaactgatggtaactgtacattttgtgctaaaatgcatatttatatgtgtataccatatgtggagatagaaaagacctttaagacaataaaagattgtaggctatctctgtaatcatgcaatagctgttcggattgagaactcttcagccatgattagacgttgactgcatctccctgatagaccaatcagctgtgtcgcacttaaactggagaagttacactgaagtataatcacactgaatgttagactttttcatctgccaaaaccaaaaaccattttgatctccctgtggttatcaatataacgcacaatcacaagtgtatgaggacttagaaattaatcctttgtggtaggagttctgttgaatgatggaaatcttattactaccacaagactatttgatctggtaattggagacttcgggatttaggagatctccatgtctgtatttactctaccactgctaaagtgtgtggtcctgggtagtttacttgcttgcggaaaatgagaattgatggtgtccccaatgccccacctcacagagttactaaaaaatgtctgtaaagcatatttacctcttgggagataggcactatgtaaataaggtaaaatttctgttattacaattattcataataatattcttttcttatttctaagcctttctgggaaatcatttcagtccacaccaaccatattattcagggttcctgccatatgtgtggggtatcctactgatacacacgtattcaaagtttatgggtacaacaaagacatagtacatgtacataatatgtatgtgaatatagttaaatatatttcttcacaatattttaaactgtgaagaactttatcatacaggaaacttaaaacaagaggtgtcaaaagacccaaattaggtgcattttacttgtttatgatggcataaccattgctttaaaatgtttagacagtagaatattgaatttatgctctatttttgtttatttaagcaacacttaatgtaaaagtgcaacaggcaattgaatccaaatttcaacgacaaaaaaaaaaaa

SEQ ID NO: 160835 - DNA, 1998 bp, Homo sapiens
  Payload ID: 11430
  Gene Symbol: NR1H2
  Gene Name: nuclear receptor subfamily 1, group H, member 2
  Uniprot ID: P55055
  ENST ID: ENST00000253727
  CDS Start-End: 236-1618
cggggttgccggaagaagtggcgaagttacttttgagggtatttgagtagcggcggtgtgtcaggggctaaagaggaggacgaagaaaagcagagcaagggaacccagggcaacaggagtagttcactccgcgagaggccgtccacgagacccccgcgcgcagccatgagccccgccccccgctgttgcttggagaggggcgggacctggagagaggctgctccgtgaccccaccatgtcctctcctaccacgagttccctggatacccccctgcctggaaatggcccccctcagcctggcgccccttcttcttcacccactgtaaaggaggagggtccggagccgtggcccgggggtccggaccctgatgtcccaggcactgatgaggccagctcagcctgcagcacagactgggtcatcccagatcccgaagaggaaccagagcgcaagcgaaagaagggcccagccccgaagatgctgggccacgagctttgccgtgtctgtggggacaaggcctccggcttccactacaacgtgctcagctgcgaaggctgcaagggcttcttccggcgcagtgtggtccgtggtggggccaggcgctatgcctgccggggtggcggaacctgccagatggacgctttcatgcggcgcaagtgccagcagtgccggctgcgcaagtgcaaggaggcagggatgagggagcagtgcgtcctttctgaagaacagatccggaagaagaagattcggaaacagcagcaggagtcacagtcacagtcgcagtcacctgtggggccgcagggcagcagcagctcagcctctgggcctggggcttcccctggtggatctgaggcaggcagccagggctccggggaaggcgagggtgtccagctaacagcggctcaagaactaatgatccagcagttggtggcggcccaactgcagtgcaacaaacgctccttctccgaccagcccaaagtcacgccctggcccctgggcgcagacccccagtcccgagatgcccgccagcaacgctttgcccacttcacggagctggccatcatctcagtccaggagatcgtggacttcgctaagcaagtgcctggtttcctgcagctgggccgggaggaccagatcgccctcctgaaggcatccactatcgagatcatgctgctagagacagccaggcgctacaaccacgagacagagtgtatcaccttcttgaaggacttcacctacagcaaggacgacttccaccgtgcaggcctgcaggtggagttcatcaaccccatcttcgagttctcgcgggccatgcggcggctgggcctggacgacgctgagtacgccctgctcatcgccatcaacatcttctcggccgaccggcccaacgtgcaggagccgggccgcgtggaggcgttgcagcagccctacgtggaggcgctgctgtcctacacgcgcatcaagaggccgcaggaccagctgcgcttcccgcgcatgctcatgaagctggtgagcctgcgcacgctgagctctgtgcactcggagcaggtcttcgccttgcggctccaggacaagaagctgccgcctctgctgtcggagatctgggacgtccacgagtgaggggctggccacccagccccacagccttgcctgaccaccctccagcagatagacgccggcaccccttcctcttcctagggtggaaggggccctgggccgagcctgtagacctatcggctctcatcccttgggataagccccagtccaggtccaggaggctccctccctgcccagcgagtcttccagaaggggtgaaagggttgcaggtcccgaccactgacccttcccggctgccctccctccccagcttacacctcaagcccagcacgcagtgcaccttgaacagagggaggggaggacccatggctctcccccctagcccgggagaccagggccttcctcttcctctgcttttatttaataaaaactaaaaacagaaa

SEQ ID NO: 160836 - DNA, 1466 bp, Homo sapiens
  Payload ID: 11430
  Gene Symbol: NR1H2
  Gene Name: nuclear receptor subfamily 1, group H, member 2
  Uniprot ID: P55055
  ENST ID: ENST00000411902
  CDS Start-End: 246-1337
gacgcaagggcggggttgccggaagaagtggcgaagttacttttgagggtatttgagtagcggcggtgtgtcaggggctaaagaggaggacgaagaaaagcagagcaagggaacccagggcaacaggagtagttcactccgcgagaggccgtccacgagacccccgcgcgcagccatgagccccgccccccgctgttgcttggagaggggcgggacctggagagaggctgctccgtgaccccaccatgtcctctcctaccacgagttccctggatacccccctgcctggaaatggcccccctcagcctggcgccccttcttcttcacccactgtaaaggaggagggtccggagccgtggcccgggggtccggaccctgatgtcccaggcactgatgaggccagctcagcctgcagcacagactggggcgtcctttctgaagaacagatccggaagaagaagattcggaaacagcagcaggagtcacagtcacagtcgcagtcacctgtggggccgcagggcagcagcagctcagcctctgggcctggggcttcccctggtggatctgaggcaggcagccagggctccggggaaggcgagggtgtccagctaacagcggctcaagaactaatgatccagcagttggtggcggcccaactgcagtgcaacaaacgctccttctccgaccagcccaaagtcacgccctggcccctgggcgcagacccccagtcccgagatgcccgccagcaacgctttgcccacttcacggagctggccatcatctcagtccaggagatcgtggacttcgctaagcaagtgcctggtttcctgcagctgggccgggaggaccagatcgccctcctgaaggcatccactatcgagatcatgctgctagagacagccaggcgctacaaccacgagacagagtgtatcaccttcttgaaggacttcacctacagcaaggacgacttccaccgtgcaggcctgcaggtggagttcatcaaccccatcttcgagttctcgcgggccatgcggcggctgggcctggacgacgctgagtacgccctgctcatcgccatcaacatcttctcggccgaccggcccaacgtgcaggagccgggccgcgtggaggcgttgcagcagccctacgtggaggcgctgctgtcctacacgcgcatcaagaggccgcaggaccagctgcgcttcccgcgcatgctcatgaagctggtgagcctgcgcacgctgagctctgtgcactcggagcaggtcttcgccttgcggctccaggacaagaagctgccgcctctgctgtcggagatctgggacgtccacgagtgaggggctggccacccagccccacagccttgcctgaccaccctccagcagatagacgccggcaccccttcctcttcctagggtggaaggggccctgggccgagcctgtagacctatcggctctcatccctt

SEQ ID NO: 160837 - DNA, 856 bp, Homo sapiens
  Payload ID: 11430
  Gene Symbol: NR1H2
  Gene Name: nuclear receptor subfamily 1, group H, member 2
  ENST ID: ENST00000597157
  CDS Start-End: 173-856
gagggtttgtaggctggcaggaaccagggttgtggctgagagtagggtctttggagagatggaaaaaaaagggaaagccctgtcaggacctgtaactgacctaacctaacccttcttagccccacaaggctctcaatcccctgtattctacaggctgctccgtgaccccaccatgtcctctcctaccacgagttccctggatacccccctgcctggaaatggcccccctcagcctggcgccccttcttcttcacccactgtaaaggaggagggtccggagccgtggcccgggggtccggaccctgatgtcccaggcactgatgaggccagctcagcctgcagcacagactgggtcatcccagatcccgaagaggaaccagagcgcaagcgaaagaagggcccagccccgaagatgctgggccacgagctttgccgtgtctgtggggacaaggcctccggcttccactacaacgtgctcagctgcgaaggctgcaagggcttcttccggcgcagtgtggtccgtggtggggccaggcgctatgcctgccggggtggcggaacctgccagatggacgctttcatgcggcgcaagtgccagcagtgccggctgcgcaagtgcaaggaggcagggatgagggagcagtgcgtcctttctgaagaacagatccggaagaagaagattcggaaacagcagcaggagtcacagtcacagtcgcagtcacctgtggggccgcagggcagcagcagctcagcctctgggcctggggcttcccctggtggatctgaggcaggcagccagggctccggggaaggcgagggtgtccagctaacagcggctcaagaactaatgatccag

SEQ ID NO: 160838 - DNA, 718 bp, Homo sapiens
  Payload ID: 11430
  Gene Symbol: NR1H2
  Gene Name: nuclear receptor subfamily 1, group H, member 2
  ENST ID: ENST00000597790
  CDS Start-End: 374-718
gttgccggaagaagtggcgaagttacttttgagggtatttgagtagcggcggtgtgtcaggggctaaagaggaggacgaagaaaagcagagcaagggaacccaggtaggtgcacccgagagtggggagacgcaggaggagccccgaacccggggcttctcggcgctccccgcgtactccgctctgcccccttctctccttccatttcctcccctcggtaattcgcgcctcccgcggctgtttccagggcaacaggagtagttcactccgcgagaggccgtccacgagacccccgcgcgcagccatgagccccgccccccgctgttgcttggagaggggcgggacctggagagaggctgctccgtgaccccaccatgtcctctcctaccacgagttccctggatacccccctgcctggaaatggcccccctcagcctggcgccccttcttcttcacccactgtaaaggaggagggtccggagccgtggcccgggggtccggaccctgatgtcccaggcactgatgaggccagctcagcctgcagcacagactgggtcatcccagatcccgaagaggaaccagagcgcaagcgaaagaagggcccagccccgaagatgctgggccacgagctttgccgtgtctgtggggacaaggcctccggcttccactacaacgtgctcagctgcgaaggctgcaagggcttcttccggcgcagtgtg

SEQ ID NO: 160839 - DNA, 1828 bp, Homo sapiens
  Payload ID: 11430
  Gene Symbol: NR1H2
  Gene Name: nuclear receptor subfamily 1, group H, member 2
  Uniprot ID: P55055
  ENST ID: ENST00000593926
  CDS Start-End: 104-1486
ggaggtggggggaaactacatggcatggaggccgtgaaggcagagcatgattaaaggagaatgggccctacctagaaaaagcaggctgctccgtgaccccaccatgtcctctcctaccacgagttccctggatacccccctgcctggaaatggcccccctcagcctggcgccccttcttcttcacccactgtaaaggaggagggtccggagccgtggcccgggggtccggaccctgatgtcccaggcactgatgaggccagctcagcctgcagcacagactgggtcatcccagatcccgaagaggaaccagagcgcaagcgaaagaagggcccagccccgaagatgctgggccacgagctttgccgtgtctgtggggacaaggcctccggcttccactacaacgtgctcagctgcgaaggctgcaagggcttcttccggcgcagtgtggtccgtggtggggccaggcgctatgcctgccggggtggcggaacctgccagatggacgctttcatgcggcgcaagtgccagcagtgccggctgcgcaagtgcaaggaggcagggatgagggagcagtgcgtcctttctgaagaacagatccggaagaagaagattcggaaacagcagcaggagtcacagtcacagtcgcagtcacctgtggggccgcagggcagcagcagctcagcctctgggcctggggcttcccctggtggatctgaggcaggcagccagggctccggggaaggcgagggtgtccagctaacagcggctcaagaactaatgatccagcagttggtggcggcccaactgcagtgcaacaaacgctccttctccgaccagcccaaagtcacgccctggcccctgggcgcagacccccagtcccgagatgcccgccagcaacgctttgcccacttcacggagctggccatcatctcagtccaggagatcgtggacttcgctaagcaagtgcctggtttcctgcagctgggccgggaggaccagatcgccctcctgaaggcatccactatcgagatcatgctgctagagacagccaggcgctacaaccacgagacagagtgtatcaccttcttgaaggacttcacctacagcaaggacgacttccaccgtgcaggcctgcaggtggagttcatcaaccccatcttcgagttctcgcgggccatgcggcggctgggcctggacgacgctgagtacgccctgctcatcgccatcaacatcttctcggccgaccggcccaacgtgcaggagccgggccgcgtggaggcgttgcagcagccctacgtggaggcgctgctgtcctacacgcgcatcaagaggccgcaggaccagctgcgcttcccgcgcatgctcatgaagctggtgagcctgcgcacgctgagctctgtgcactcggagcaggtcttcgccttgcggctccaggacaagaagctgccgcctctgctgtcggagatctgggacgtccacgagtgaggggctggccacccagccccacagccttgcctgaccaccctccagcagatagacgccggcaccccttcctcttcctagggtggaaggggccctgggccgagcctgtagacctatcggctctcatcccttgggataagccccagtccaggtccaggaggctccctccctgcccagcgagtcttccagaaggggtgaaagggttgcaggtcccgaccactgacccttcccggctgccctccctccccagcttacacctcaagcccagcacgcagtgcaccttgaacagagggaggggaggacccatggctctcccccctagcccgggagaccagggccttcctc

SEQ ID NO: 160840 - DNA, 1915 bp, Homo sapiens
  Payload ID: 11430
  Gene Symbol: NR1H2
  Gene Name: nuclear receptor subfamily 1, group H, member 2
  ENST ID: ENST00000598168
  CDS Start-End: 247-1539
tgacgcaagggcggggttgccggaagaagtggcgaagttacttttgagggtatttgagtagcggcggtgtgtcaggggctaaagaggaggacgaagaaaagcagagcaagggaacccagggcaacaggagtagttcactccgcgagaggccgtccacgagacccccgcgcgcagccatgagccccgccccccgctgttgcttggagaggggcgggacctggagagaggctgctccgtgaccccaccatgtcctctcctaccacgagttccctggatacccccctgcctggaaatggcccccctcagcctggcgccccttcttcttcacccactgtaaaggaggagggtccggagccgtggcccgggggtccggaccctgatgtcccaggcactgatgaggccagctcagcctgcagcacagactgggtcatcccagatcccgaagaggaaccagagcgcaagcgaaagaagggcccagccccgaagatgctgggccacgagctttgccgtgtctgtggggacaaggcctccggcttccactacaacgtgctcagctgcgaaggctgcaagggcttcttccggcgcagtgtggtccgtggtggggccaggcgctatgcctgccggggtggcggaacctgccagatggacgctttcatgcggcgcaagtgccagcagtgccggctgcgcaagtgcaaggaggcagggatgagggagcagtgcgtcctttctgaagaacagatccggaagaagaagattcggaaacagcagcaggagtcacagtcacagtcgcagtcacctgtggggccgcagggcagcagcagctcagcctctgggcctggggcttcccctggtggatctgaggcaggcagccagggctccggggaaggcgagggtgtccagctaacagcggctcaagaactaatgatccagcagttggtggcggcccaactgcagtgcaacaaacgctccttctccgaccagcccaaagtcacggagatcgtggacttcgctaagcaagtgcctggtttcctgcagctgggccgggaggaccagatcgccctcctgaaggcatccactatcgagatcatgctgctagagacagccaggcgctacaaccacgagacagagtgtatcaccttcttgaaggacttcacctacagcaaggacgacttccaccgtgcaggcctgcaggtggagttcatcaaccccatcttcgagttctcgcgggccatgcggcggctgggcctggacgacgctgagtacgccctgctcatcgccatcaacatcttctcggccgaccggcccaacgtgcaggagccgggccgcgtggaggcgttgcagcagccctacgtggaggcgctgctgtcctacacgcgcatcaagaggccgcaggaccagctgcgcttcccgcgcatgctcatgaagctggtgagcctgcgcacgctgagctctgtgcactcggagcaggtcttcgccttgcggctccaggacaagaagctgccgcctctgctgtcggagatctgggacgtccacgagtgaggggctggccacccagccccacagccttgcctgaccaccctccagcagatagacgccggcaccccttcctcttcctagggtggaaggggccctgggccgagcctgtagacctatcggctctcatcccttgggataagccccagtccaggtccaggaggctccctccctgcccagcgagtcttccagaaggggtgaaagggttgcaggtcccgaccactgacccttcccggctgccctccctccccagcttacacctcaagcccagcacgcagtgcaccttgaacagagggaggggaggacccatggctctcccccctagcccgggagaccagggccttcctcttcctctgcttttatttaataaaaactaaaaaca

SEQ ID NO: 160841 - DNA, 894 bp, Homo sapiens
  Payload ID: 11430
  Gene Symbol: NR1H2
  Gene Name: nuclear receptor subfamily 1, group H, member 2
  ENST ID: ENST00000597130
  CDS Start-End: 266-894
gttgccggaagaagtggcgaagttacttttgagggtatttgagtagcggcggtgtgtcaggggctaaagaggaggacgaagaaaagcagagcaagggaacccagggcaacaggagtagttcactccgcgagaggccgtccacgagacccccgcgcgcagccatgagccccgccccccgctgttgcttggagaggggcgggacctggagagagccccacaaggctctcaatcccctgtattctacaggctgctccgtgaccccaccatgtcctctcctaccacgagttccctggatacccccctgcctggaaatggcccccctcagcctggcgccccttcttcttcacccactgtaaaggaggagggtccggagccgtggcccgggggtccggaccctgatgtcccaggcactgatgaggccagctcagcctgcagcacagactgggtcatcccagatcccgaagaggaaccagagcgcaagcgaaagaagggcccagccccgaagatgctgggccacgagctttgccgtgtctgtggggacaaggcctccggcttccactacaacgtgctcagctgcgaaggctgcaagggcttcttccggcgcagtgtggtccgtggtggggccaggcgctatgcctgccggggtggcggaacctgccagatggacgctttcatgcggcgcaagtgccagcagtgccggctgcgcaagtgcaaggaggcagggatgagggagcagtgcgtcctttctgaagaacagatccggaagaagaagattcggaaacagcagcaggagtcacagtcacagtcgcagtcacctgtggggccgcagggcagcagcagctcagcctctgggcctggggcttcccctggtggatctgaggcaggcagccaggg

SEQ ID NO: 160842 - DNA, 2380 bp, Homo sapiens
  Payload ID: 11430
  Gene Symbol: NR1H2
  Gene Name: nuclear receptor subfamily 1, group H, member 2
  ENST ID: ENST00000593532
  CDS Start-End: 880-1410
agatgagactgcatggggcgggaactagagatggaggactttcccgcgcaagggggacaggctggactgaaagaggacacgggaagaacaaagacttagactcgaagccctcggatggtggcccttgcatgcttcagttcatgatgttggagactatttccccacccttgcggaaaaaccttctctctgtgccatgcagctactgccagggatggaggatggcgggaattggcaactaaagactgtcctcctaccctcttcagtgtgtccttcagcaatatgaagttaaaaccagtcttgctctgtccccaggctggagtgcagtggcacgatcttggctcactgcaacctccgcctcacgggttccagcgattctcctgcctcagtctcctgagtagctgggactacaggctcagagaagcgcatgaatgagctaaagccacaaagcgcggggctggaggtttggctcccaagaagcgaggaaatgggttcggaactcttctgccaagtcccagtagatctacccggtaaacttccggtgagtttccaacttccgtgcggggcagcagcttcggctggtcctaagcggaccggaagttcgtcaagtttcacgctccgcccctcttccggacgtgacgcaagggcggggttgccggaagaagtggcgaagttacttttgagggtatttgagtagcggcggtgtgtcaggggctaaagaggaggacgaagaaaagcagagcaagggaacccagggcaacaggagtagttcactccgcgagaggccgtccacgagacccccgcgcgcagccatgagccccgccccccgctgttgcttggagaggggcgggacctggagagaggctgctccgtgaccccaccatgtcctctcctaccacgagttccctggatacccccctgcctggaaatggcccccctcagcctggcgccccttcttcttcacccactgtaaaggaggagggtccggagccgtggcccgggggtccggaccctgatgtcccaggcactgatgaggccagctcagcctgcagcacagactgggtcatcccagatcccgaagaggaaccagagcgcaagcgaaagaagggcccagccccgaagatgctgggccacgagctttgccgtgtctgtggggacaaggcctccggcttccactacaacgtgctcagctgcgaaggctgcaagggcttcttccggcgcagtgtggcgtcctttctgaagaacagatccggaagaagaagattcggaaacagcagcaggagtcacagtcacagtcgcagtcacctgtggggccgcagggcagcagcagctcagcctctgggcctggggcttcccctggtggatctgaggcaggcagccagggctccggggaaggcgagggtgtccagctaacagcggctcaagaactaatgatccagcagttggtggcggcccaactgcagtgcaacaaacgctccttctccgaccagcccaaagtcacgctgggccgggaggaccagatcgccctcctgaaggcatccactatcgagatcatgctgctagagacagccaggcgctacaaccacgagacagagtgtatcaccttcttgaaggacttcacctacagcaaggacgacttccaccgtgcaggcctgcaggtggagttcatcaaccccatcttcgagttctcgcgggccatgcggcggctgggcctggacgacgctgagtacgccctgctcatcgccatcaacatcttctcggccgaccggcccaacgtgcaggagccgggccgcgtggaggcgttgcagcagccctacgtggaggcgctgctgtcctacacgcgcatcaagaggccgcaggaccagctgcgcttcccgcgcatgctcatgaagctggtgagcctgcgcacgctgagctctgtgcactcggagcaggtcttcgccttgcggctccaggacaagaagctgccgcctctgctgtcggagatctgggacgtccacgagtgaggggctggccacccagccccacagccttgcctgaccaccctccagcagatagacgccggcaccccttcctcttcctagggtggaaggggccctgggccgagcctgtagacctatcggctctcatcccttgggataagccccagtccaggtccaggaggctccctccctgcccagcgagtcttccagaaggggtgaaagggttgcaggtcccgaccactgacccttcccggctgccctccctccccagcttacacctcaagcccagcacgcagtgcaccttgaacagagggaggggaggacccatggctctcccccctagcccgggagaccagggccttcctcttcctctgcttttatttaataaaaactaaaaacag

SEQ ID NO: 160843 - DNA, 1830 bp, Homo sapiens
  Payload ID: 11430
  Gene Symbol: NR1H2
  Gene Name: nuclear receptor subfamily 1, group H, member 2
  ENST ID: ENST00000599105
  CDS Start-End: 232-1482
gttgccggaagaagtggcgaagttacttttgagggtatttgagtagcggcggtgtgtcaggggctaaagaggaggacgaagaaaagcagagcaagggaacccagggcaacaggagtagttcactccgcgagaggccgtccacgagacccccgcgcgcagccatgagccccgccccccgctgttgcttggagaggggcgggacctggagagaggctgctccgtgaccccaccatgtcctctcctaccacgagttccctggatacccccctgcctggaaatggcccccctcagcctggcgccccttcttcttcacccactgtaaaggaggagggtccggagccgtggcccgggggtccggaccctgatgtcccaggcactgatgaggccagctcagcctgcagcacagactgggtcatcccagatcccgaagaggaaccagagcgcaagcgaaagaagggcccagccccgaagatgctgggccacgagctttgccgtgtctgtggggacaaggcctccggcttccactacaacgtgctcagctgcgaaggctgcaagggcttcttccggcgcagtgtggtccgtggtggggccaggcgctatgcctgccggggtggcggaacctgccagatggacgctttcatgcggcgcaagtgccagcagtgccggctgcgcaagtgcaaggaggcagggatgagggagcagtgcgtcctttctgaagaacagatccggaagaagaagattcggaaacagcagcaggagtcacagtcacagtcgcagtcacctgtggggccgcagggcagcagcagctcagcctctgggcctggggcttcccctggtggatctgaggcaggcagccagggctccggggaaggcgagggtgtccagctaacagcggctcaagaactaatgatccagcagttggtggcggcccaactgcagtgcaacaaacgctccttctccgaccagcccaaagtcacgctgggccgggaggaccagatcgccctcctgaaggcatccactatcgagatcatgctgctagagacagccaggcgctacaaccacgagacagagtgtatcaccttcttgaaggacttcacctacagcaaggacgacttccaccgtgcaggcctgcaggtggagttcatcaaccccatcttcgagttctcgcgggccatgcggcggctgggcctggacgacgctgagtacgccctgctcatcgccatcaacatcttctcggccgaccggcccaacgtgcaggagccgggccgcgtggaggcgttgcagcagccctacgtggaggcgctgctgtcctacacgcgcatcaagaggccgcaggaccagctgcgcttcccgcgcatgctcatgaagctggtgagcctgcgcacgctgagctctgtgcactcggagcaggtcttcgccttgcggctccaggacaagaagctgccgcctctgctgtcggagatctgggacgtccacgagtgaggggctggccacccagccccacagccttgcctgaccaccctccagcagatagacgccggcaccccttcctcttcctagggtggaaggggccctgggccgagcctgtagacctatcggctctcatcccttgggataagccccagtccaggtccaggaggctccctccctgcccagcgagtcttccagaaggggtgaaagggttgcaggtcccgaccactgacccttcccggctgccctccctccccagcttacacctcaagcccagcacgcagtgcaccttgaacagagggaggggaggacccatggctctcccccctagcccgggagaccagggccttcctcttcctc

SEQ ID NO: 160844 - DNA, 507 bp, Homo sapiens
  Payload ID: 11430
  Gene Symbol: NR1H2
  Gene Name: nuclear receptor subfamily 1, group H, member 2
  ENST ID: ENST00000600355
  CDS Start-End: 386-507
gcttggaagagacagggccgcagaaagtagaaacggtccagatgagactgcatggggcgggaactagagatggaggactttcccgcgcaagggggacaggctggactgaaagaggacacgggaagaacaaagacttagactcgtcttgctctgtccccaggctggagtgcagtggcacgatcttggctcactgcaacctccgcctcacgggttccagcgattctcctgcctcagtctcctgagtagctgggactacagggcaacaggagtagttcactccgcgagaggccgtccacgagacccccgcgcgcagccatgagccccgccccccgctgttgcttggagaggggcgggacctggagagaggctgctccgtgaccccaccatgtcctctcctaccacgagttccctggatacccccctgcctggaaatggcccccctcagcctggcgccccttcttcttcacccactgtaaaggaggagggtccggagccgtggcccggggg

SEQ ID NO: 160845 - DNA, 1501 bp, Homo sapiens
  Payload ID: 11431
  Gene Symbol: NR1H3
  Gene Name: nuclear receptor subfamily 1, group H, member 3
  Uniprot ID: Q13133
  ENST ID: ENST00000395397
  CDS Start-End: 177-1385
ctggggtgcggggaaaaggcgcagtctcggtgggattgcgtgcaggagggtcgtggtctggctgtggcggaggagcataagaagactctgcggtggagctgtggaagccaggcgcacaggatgcaagcagccaggcccagggaggcagcagctgcatcctcagagaggaagccaggatgccccactctgctgggggtactgcaggggtggggctggaggctgcagagcccacagccctgctcaccagggcagagcccccttcagaacccacagagatccgtccacaaaagcggaaaaaggggccagcccccaaaatgctggggaacgagctatgcagcgtgtgtggggacaaggcctcgggcttccactacaatgttctgagctgcgagggctgcaagggattcttccgccgcagcgtcatcaagggagcgcactacatctgccacagtggcggccactgccccatggacacctacatgcgtcgcaagtgccaggagtgtcggcttcgcaaatgccgtcaggctggcatgcgggaggagtgtgtcctgtcagaagaacagatccgcctgaagaaactgaagcggcaagaggaggaacaggctcatgccacatccttgccccccagggcttcctcacccccccaaatcctgccccagctcagcccggaacaactgggcatgatcgagaagctcgtcgctgcccagcaacagtgtaaccggcgctccttttctgaccggcttcgagtcacgccttggcccatggcaccagatccccatagccgggaggcccgtcagcagcgctttgcccacttcactgagctggccatcgtctctgtgcaggagatagttgactttgctaaacagctacccggcttcctgcagctcagccgggaggaccagattgccctgctgaagacctctgcgatcgaggtgatgcttctggagacatctcggaggtacaaccctgggagtgagagtatcaccttcctcaaggatttcagttataaccgggaagactttgccaaagcagggctgcaagtggaattcatcaaccccatcttcgagttctccagggccatgaatgagctgcaactcaatgatgccgagtttgccttgctcattgctatcagcatcttctctgcagaccggcccaacgtgcaggaccagctccaggtagagaggctgcagcacacatatgtggaagccctgcatgcctacgtctccatccaccatccccatgaccgactgatgttcccacggatgctaatgaaactggtgagcctccggaccctgagcagcgtccactcagagcaagtgtttgcactgcgtctgcaggacaaaaagctcccaccgctgctctctgagatctgggatgtgcacgaatgactgttctgtccccatattttctgttttcttggccggatggctgaggcctggtggctgcctcctagaagtggaacagactgagaagggcaaacattcctgggagctgggcaaggaga

SEQ ID NO: 160846 - DNA, 1480 bp, Homo sapiens
  Payload ID: 11431
  Gene Symbol: NR1H3
  Gene Name: nuclear receptor subfamily 1, group H, member 3
  Uniprot ID: Q13133
  ENST ID: ENST00000405853
  CDS Start-End: 170-1333
cctgcttgtgctcagctccagctcactggctggccaccgagacttctggacaggaaactgcaccatcctcttctcccagcaagggggctccagagactgcccacccaggaagtctggtggcctggggatttggacagtgccttggtaatgaccagggctccaggaagagatgtccttgtggctgggggcccctgtgcctgacattcctcctgactctgcggtggagctgtggaagccaggcgcacaggatgcaagcagccaggcccagggaggcagcagctgcatcctcagagaggaagccaggatgccccactctgctgggggtactgcaggggtggggctggaggctgcagagcccacagccctgctcaccagggcagagcccccttcagaacccacagagatccgtccacaaaagcggaaaaaggggccagcccccaaaatgctggggaacgagctatgcagcgtgtgtggggacaaggcctcgggcttccactacaatgttctgagctgcgagggctgcaagggattcttccgccgcagcgtcatcaagggagcgcactacatctgccacagtggcggccactgccccatggacacctacatgcgtcgcaagtgccaggagtgtcggcttcgcaaatgccgtcaggctggcatgcgggaggagtgtgtcctgtcagaagaacagatccgcctgaagaaactgaagcggcaagaggaggaacaggctcatgccacatccttgccccccagggcttcctcacccccccaaatcctgccccagctcagcccggaacaactgggcatgatcgagaagctcgtcgctgcccagcaacagtgtaaccggcgctccttttctgaccggcttcgagtcacggtgatgcttctggagacatctcggaggtacaaccctgggagtgagagtatcaccttcctcaaggatttcagttataaccgggaagactttgccaaagcagggctgcaagtggaattcatcaaccccatcttcgagttctccagggccatgaatgagctgcaactcaatgatgccgagtttgccttgctcattgctatcagcatcttctctgcagaccggcccaacgtgcaggaccagctccaggtagagaggctgcagcacacatatgtggaagccctgcatgcctacgtctccatccaccatccccatgaccgactgatgttcccacggatgctaatgaaactggtgagcctccggaccctgagcagcgtccactcagagcaagtgtttgcactgcgtctgcaggacaaaaagctcccaccgctgctctctgagatctgggatgtgcacgaatgactgttctgtccccatattttctgttttcttggccggatggctgaggcctggtggctgcctcctagaagtggaacagactgagaagggcaaacattcctgggagctgggcaaggagatcctcccgtggcattaaaagagagtcaaagg

SEQ ID NO: 160847 - DNA, 1352 bp, Homo sapiens
  Payload ID: 11431
  Gene Symbol: NR1H3
  Gene Name: nuclear receptor subfamily 1, group H, member 3
  ENST ID: ENST00000405576
  CDS Start-End: 177-1205
ctggggtgcggggaaaaggcgcagtctcggtgggattgcgtgcaggagggtcgtggtctggctgtggcggaggagcataagaagactctgcggtggagctgtggaagccaggcgcacaggatgcaagcagccaggcccagggaggcagcagctgcatcctcagagaggaagccaggatgccccactctgctgggggtactgcaggggtggggctggaggctgcagagcccacagccctgctcaccagggcagagcccccttcagaacccacagagatccgtccacaaaagcggaaaaaggggccagcccccaaaatgctggggaacgagctatgcagcgtgtgtggggacaaggcctcgggcttccactacaatgttctgagctgcgagggctgcaagggattcttccgccgcagcgtcatcaagggagcgcactacatctgccacagtggcggccactgccccatggacacctacatgcgtcgcaagtgccaggagtgtcggcttcgcaaatgccgtcaggctggcatgcgggaggagtgtgtcctgtcagaagaacagatccgcctgaagaaactgaagcggcaagaggaggaacaggctcatgccacatccttgccccccagggcttcctcacccccccaaatcctgccccagctcagcccggaacaactgggcatgatcgagaagctcgtcgctgcccagcaacagtgtaaccggcgctccttttctgaccggcttcgagtcacggtgatgcttctggagacatctcggaggtacaaccctgggagtgagagtatcaccttcctcaaggatttcagttataaccgggaagactttgccaaagcagggctgcaagtggaattcatcaaccccatcttcgagttctccagggccatgaatgagctgcaactcaatgatgccgagtttgccttgctcattgctatcagcatcttctctgcagaccggcccaacgtgcaggaccagctccaggtagagaggctgcagcacacatatgtggaagccctgcatgcctacgtctccatccaccatccccatgaccgactgatgttcccacggatgctaatgaaactggtgagcctccggaccctgagcagcgtccactcagagcaagtgtttgcactgcgtctgcaggacaaaaagctcccaccgctgctctctgagatctgggatgtgcacgaatgactgttctgtccccatattttctgttttcttggccggatggctgaggcctggtggctgcctcctagaagtggaacagactgagaagggcaaacattcctgggagctgggcaaggagatcctcccgtggcattaaaagagagtcaaagg

SEQ ID NO: 160848 - DNA, 1330 bp, Homo sapiens
  Payload ID: 11431
  Gene Symbol: NR1H3
  Gene Name: nuclear receptor subfamily 1, group H, member 3
  Uniprot ID: Q13133
  ENST ID: ENST00000407404
  CDS Start-End: 82-1245
tgcaggagggtcgtggtctggctgtggcggaggagcataagaaggacagtgccttggtaatgaccagggctccaggaagagatgtccttgtggctgggggcccctgtgcctgacattcctcctgactctgcggtggagctgtggaagccaggcgcacaggatgcaagcagccaggcccagggaggcagcagctgcatcctcagagaggaagccaggatgccccactctgctgggggtactgcaggggtggggctggaggctgcagagcccacagccctgctcaccagggcagagcccccttcagaacccacagagatccgtccacaaaagcggaaaaaggggccagcccccaaaatgctggggaacgagctatgcagcgtgtgtggggacaaggcctcgggcttccactacaatgttctgagctgcgagggctgcaagggattcttccgccgcagcgtcatcaagggagcgcactacatctgccacagtggcggccactgccccatggacacctacatgcgtcgcaagtgccaggagtgtcggcttcgcaaatgccgtcaggctggcatgcgggaggagtgtgtcctgtcagaagaacagatccgcctgaagaaactgaagcggcaagaggaggaacaggctcatgccacatccttgccccccagggcttcctcacccccccaaatcctgccccagctcagcccggaacaactgggcatgatcgagaagctcgtcgctgcccagcaacagtgtaaccggcgctccttttctgaccggcttcgagtcacggtgatgcttctggagacatctcggaggtacaaccctgggagtgagagtatcaccttcctcaaggatttcagttataaccgggaagactttgccaaagcagggctgcaagtggaattcatcaaccccatcttcgagttctccagggccatgaatgagctgcaactcaatgatgccgagtttgccttgctcattgctatcagcatcttctctgcagaccggcccaacgtgcaggaccagctccaggtagagaggctgcagcacacatatgtggaagccctgcatgcctacgtctccatccaccatccccatgaccgactgatgttcccacggatgctaatgaaactggtgagcctccggaccctgagcagcgtccactcagagcaagtgtttgcactgcgtctgcaggacaaaaagctcccaccgctgctctctgagatctgggatgtgcacgaatgactgttctgtccccatattttctgttttcttggccggatggctgaggcctggtggctgcctcctagaagtggaacagactgagaag

SEQ ID NO: 160849 - DNA, 1637 bp, Homo sapiens
  Payload ID: 11431
  Gene Symbol: NR1H3
  Gene Name: nuclear receptor subfamily 1, group H, member 3
  Uniprot ID: Q13133
  ENST ID: ENST00000441012
  CDS Start-End: 206-1549
ctttccccaaattgctacttctctggggctccaggtcctgcttgtgctcagctccagctcactggctggccaccgagacttctggacaggaaactgcaccatcctcttctcccagcaagggggctccagagactgcccacccaggaagtctggtggcctggggatttggacagtgccttggtaatgaccagggctccaggaagagatgtccttgtggctgggggcccctgtgcctgacattcctcctgactctgcggtggagctgtggaagccaggcgcacaggatgcaagcagccaggcccagggaggcagcagctgcatcctcagagaggaagccaggatgccccactctgctgggggtactgcaggggtggggctggaggctgcagagcccacagccctgctcaccagggcagagcccccttcagaacccacagagatccgtccacaaaagcggaaaaaggggccagcccccaaaatgctggggaacgagctatgcagcgtgtgtggggacaaggcctcgggcttccactacaatgttctgagctgcgagggctgcaagggattcttccgccgcagcgtcatcaagggagcgcactacatctgccacagtggcggccactgccccatggacacctacatgcgtcgcaagtgccaggagtgtcggcttcgcaaatgccgtcaggctggcatgcgggaggagtgtgtcctgtcagaagaacagatccgcctgaagaaactgaagcggcaagaggaggaacaggctcatgccacatccttgccccccagggcttcctcacccccccaaatcctgccccagctcagcccggaacaactgggcatgatcgagaagctcgtcgctgcccagcaacagtgtaaccggcgctccttttctgaccggcttcgagtcacgccttggcccatggcaccagatccccatagccgggaggcccgtcagcagcgctttgcccacttcactgagctggccatcgtctctgtgcaggagatagttgactttgctaaacagctacccggcttcctgcagctcagccgggaggaccagattgccctgctgaagacctctgcgatcgaggtgatgcttctggagacatctcggaggtacaaccctgggagtgagagtatcaccttcctcaaggatttcagttataaccgggaagactttgccaaagcagggctgcaagtggaattcatcaaccccatcttcgagttctccagggccatgaatgagctgcaactcaatgatgccgagtttgccttgctcattgctatcagcatcttctctgcagaccggcccaacgtgcaggaccagctccaggtagagaggctgcagcacacatatgtggaagccctgcatgcctacgtctccatccaccatccccatgaccgactgatgttcccacggatgctaatgaaactggtgagcctccggaccctgagcagcgtccactcagagcaagtgtttgcactgcgtctgcaggacaaaaagctcccaccgctgctctctgagatctgggatgtgcacgaatgactgttctgtccccatattttctgttttcttggccggatggctgaggcctggtggctgcctcctagaagtggaacagactgagaagggc

SEQ ID NO: 160850 - DNA, 784 bp, Homo sapiens
  Payload ID: 11431
  Gene Symbol: NR1H3
  Gene Name: nuclear receptor subfamily 1, group H, member 3
  ENST ID: ENST00000444396
  CDS Start-End: 204-784
tccgggccgtgctgggacctttgctccacgaggtcctgcttgtgctcagctccagctcactggctggccaccgagacttctggacaggaaactgcaccatcctcttctcccagcaagggggctccagagactgcccacccaggaagtctggtggcctggggatttggacagtgccttggtaatgaccagggctccaggaagagatgtccttgtggctgggggcccctgtgcctgacattcctcctgactctgcggtggagctgtggaagccaggcgcacaggatgcaagcagccaggcccagggaggcagcagctgcatcctcagagaggaagccaggatgccccactctgctgggggtactgcaggggtggggctggaggctgcagagcccacagccctgctcaccagggcagagcccccttcagaacccacagagatccgtccacaaaagcggaaaaaggggccagcccccaaaatgctggggaacgagctatgcagcgtgtgtggggacaaggcctcgggcttccactacaatgttctgagctgcgagggctgcaagggattcttccgccgcagcgtcatcaagggagcgcactacatctgccacagtggcggccactgccccatggacacctacatgcgtcgcaagtgccaggagtgtcggcttcgcaaatgccgtcaggctggcatgcgggaggagtgtgtcctgtcagaagaacagatccgcctgaagaaactgaagcggcaagaggaggaacaggctcatgccacatccttgccccc

SEQ ID NO: 160851 - DNA, 440 bp, Homo sapiens
  Payload ID: 11431
  Gene Symbol: NR1H3
  Gene Name: nuclear receptor subfamily 1, group H, member 3
  ENST ID: ENST00000437276
  CDS Start-End: 236-440
tttccccaaattgctacttctctggggctccaggtcctgcttgtgctcagctccagctcactggctggccaccgagacttctggacaggaaactgcaccatcctcttctcccagcaagggggctccagagactgcccacccaggaagtctggtggcctggggatttggtgggtctgctccttagcagtggcctggggctctgttgccttggtaatgaccagggctccaggaagagatgtccttgtggctgggggcccctgtgcctgacattcctcctgactctgcggtggagctgtggaagccaggcgcacaggatgcaagcagccaggcccagggaggcagcagctgcatcctcagagaggaagccaggatgccccactctgctgggggtactgcaggggtggggctggaggctgcagagcccacagccctgctcacca

SEQ ID NO: 160852 - DNA, 911 bp, Homo sapiens
  Payload ID: 11431
  Gene Symbol: NR1H3
  Gene Name: nuclear receptor subfamily 1, group H, member 3
  ENST ID: ENST00000436029
  CDS Start-End: 276-911
aattgctacttctctggggctccaggtcctgcttgtgctcagctccagctcactggctggccaccgagacttctggacaggaaactgcaccatcctcttctcccagcaagggggctccagagactgcccacccaggaagtctggtggcctggggatttgggaggatcaggtggagaagggagctgaggccagaaaggagcccagttctagaagagtataatctgggtccttcctgcaggacagtgccttggtaatgaccagggctccaggaagagatgtccttgtggctgggggcccctgtgcctgacattcctcctgactctgcggtggagctgtggaagccaggcgcacaggatgcaagcagccaggcccagggaggcagcagctgcatcctcagagaggaagccaggatgccccactctgctgggggtactgcaggggtggggctggaggctgcagagcccacagccctgctcaccagggcagagcccccttcagaacccacagagatccgtccacaaaagcggaaaaaggggccagcccccaaaatgctggggaacgagctatgcagcgtgtgtggggacaaggcctcgggcttccactacaatgttctgagctgcgagggctgcaagggattcttccgccgcagcgtcatcaagggagcgcactacatctgccacagtggcggccactgccccatggacacctacatgcgtcgcaagtgccaggagtgtcggcttcgcaaatgccgtcaggctggcatgcgggaggagtgtgtcctgtcagaagaacagatccgcctgaagaaactgaagcggcaagaggaggaacaggctcatgccacatccttgccccccagggcttcctcacccccccaaatcctgccccagctcagcccggaacaactgggc

SEQ ID NO: 160853 - DNA, 802 bp, Homo sapiens
  Payload ID: 11431
  Gene Symbol: NR1H3
  Gene Name: nuclear receptor subfamily 1, group H, member 3
  ENST ID: ENST00000436778
  CDS Start-End: 197-802
ggaaaaggcgcagtctcggtgggattgcgtgcaggagggtcgtggtctggctgtggcggaggagcataagaaggactccagattcaattatttatatatacttcaggatttaaactttgcttccagagttgtcatggaggaggccaagaagcaaatagagacagtgccttggtaatgaccagggctccaggaagagatgtccttgtggctgggggcccctgtgcctgacattcctcctgactctgcggtggagctgtggaagccaggcgcacaggatgcaagcagccaggcccagggaggcagcagctgcatcctcagagaggaagccaggatgccccactctgctgggggtactgcaggggtggggctggaggctgcagagcccacagccctgctcaccagggcagagcccccttcagaacccacagagatccgtccacaaaagcggaaaaaggggccagcccccaaaatgctggggaacgagctatgcagcgtgtgtggggacaaggcctcgggcttccactacaatgttctgagctgcgagggctgcaagggattcttccgccgcagcgtcatcaagggagcgcactacatctgccacagtggcggccactgccccatggacacctacatgcgtcgcaagtgccaggagtgtcggcttcgcaaatgccgtcaggctggcatgcgggaggagtgtgtcctgtcagaagaacagatccgcctgaagaaactgaagcggcaagaggaggaacaggctcatgccacatccttgccccccagggcttcctcacccccccaaatc

SEQ ID NO: 160854 - DNA, 780 bp, Homo sapiens
  Payload ID: 11431
  Gene Symbol: NR1H3
  Gene Name: nuclear receptor subfamily 1, group H, member 3
  ENST ID: ENST00000420369
  CDS Start-End: 172-516
gtcctgcttgtgctcagctccagctcactggctggccaccgagacttctggacaggaaactgcaccatcctcttctcccagcaagggggctccagagactgcccacccaggaagtctggtggcctggggatttggacagtgccttggtaatgaccagggctccaggaagagatgtccttgtggctgggggcccctgtgcctgacattcctcctgctcagactctgcggtggagctgtggaagccaggcgcacaggatgcaagcagccaggcccagggaggcagcagctgcatcctcagagaggaagccaggatgccccactctgctgggggtactgcaggggtggggctggaggctgcagagcccacagccctgctcaccagggcagagcccccttcagaacccacagagatccgtccacaaaagcggaaaaaggggccagcccccaaaatgctggggaacgagctatgcagcgtgtgtggggacaaggcctcgggcttccactacaatgttctgagctgcgagggctgcaagggattcttccgccgcagcgtcatcaagggagcgcactacatctgccacagtggcggccactgccccatggacacctacatgcgtcgcaagtgccaggagtgtcggcttcgcaaatgccgtcaggctggcatgcgggaggagtgtgtcctgtcagaagaacagatccgcctgaagaaactgaagcggcaagaggaggaacaggctcatgccacatccttgccccccagggcttcctcacccccccaaa

SEQ ID NO: 160855 - DNA, 555 bp, Homo sapiens
  Payload ID: 11431
  Gene Symbol: NR1H3
  Gene Name: nuclear receptor subfamily 1, group H, member 3
  ENST ID: ENST00000419652
  CDS Start-End: 234-398
tttgcaagagctgctaagagcgctgggtcctgcttgtgctcagctccagctcactggctggccaccgagacttctggacaggaaactgcaccatcctcttctcccagcaagggggctccagagactgcccacccaggaagtctggtggcctggggatttggtgggtctgctccttagcagtggcctggggctctgtgacagtgccttggtaatgaccagggctccaggaagagatgtccttgtggctgggggcccctgtgcctgacattcctcctgagagcagtccagagtcattcttagtcgtgcttgcctcccgcccagatcacctctcccctggttccagtgcctggcccttgcaggcacccgcccagtcctccccagtctggatttgctgctagagagttggccagctgagtgcttaccctgctctggctttgaagagttttatctgatctctgaaatgcatacactccagccccccaaagggacaaggattaacatcttcatttaaggtcctgagatactctgcggtggagctgtggaagccaggcgcac

SEQ ID NO: 160856 - DNA, 574 bp, Homo sapiens
  Payload ID: 11431
  Gene Symbol: NR1H3
  Gene Name: nuclear receptor subfamily 1, group H, member 3
  ENST ID: ENST00000412937
  CDS Start-End: 171-574
acgattctggaggctgctgggattggggtgggggttcctgggaggcagtccttttgcaagagctgctaagagcgctggactctgcggtggagctgtggaagccaggcgcacaggatgcaagcagccaggcccagggaggcagcagctgcatcctcagagaggaagccaggatgccccactctgctgggggtactgcaggggtggggctggaggctgcagagcccacagccctgctcaccagggcagagcccccttcagaacccacagagatccgtccacaaaagcggaaaaaggggccagcccccaaaatgctggggaacgagctatgcagcgtgtgtggggacaaggcctcgggcttccactacaatgttctgagctgcgagggctgcaagggattcttccgccgcagcgtcatcaagggagcgcactacatctgccacagtggcggccactgccccatggacacctacatgcgtcgcaagtgccaggagtgtcggcttcgcaaatgccgtcaggctggcatgcgggaggagtgtgtcctgtcagaagaacagatccgcctgaagaaactgaa

SEQ ID NO: 160857 - DNA, 552 bp, Homo sapiens
  Payload ID: 11431
  Gene Symbol: NR1H3
  Gene Name: nuclear receptor subfamily 1, group H, member 3
  ENST ID: ENST00000457932
  CDS Start-End: 321-552
tttgctccacgaggtgcctatggaggggagggaacacgattctggaggctgctgggattggggtgggggttcctgggaggcagtccttttgcaagagctgctaagagcgctgggtcctgcttgtgctcagctccagctcactggctggccaccgagacttctggacaggaaactgcaccatcctcttctcccagcaagggggctccagagactgcccacccaggaagtctggtggcctggggatttggtgggtctgctccttagcagtggcctggggctctgtgacagtgccttggtaatgaccagggctccaggaagagatgtccttgtggctgggggcccctgtgcctgacattcctcctgactctgcggtggagctgtggaagccaggcgcacaggatgcaagcagccaggcccagggaggcagcagctgcatcctcagagaggaagccaggatgccccactctgctgggggtactgcaggggtggggctggaggctgcagagcccacagccctgctcaccagggcagagcccccttcagaacccacag

SEQ ID NO: 160858 - DNA, 825 bp, Homo sapiens
  Payload ID: 11431
  Gene Symbol: NR1H3
  Gene Name: nuclear receptor subfamily 1, group H, member 3
  ENST ID: ENST00000449369
  CDS Start-End: 211-825
gggaggcagtccttttgcaagagctgctaagagcgctgggtcctgcttgtgctcagctccagctcactggctggccaccgagacttctggacaggaaactgcaccatcctcttctcccagcaagggggctccagagactgcccacccaggaagtctggtggcctggggatttggacagtgccttggtaatgaccagggctccaggaagagatgtccttgtggctgggggcccctgtgcctgacattcctcctgactctgcggtggagctgtggaagccaggcgcacaggatgcaagcagccaggcccagggaggcagcagctgcatcctcagagaggaagccaggatgccccactctgctgggggtactgcaggggtggggctggaggctgcagagcccacagccctgctcaccagggcagagcccccttcagaacccacagagatccgtccacaaaagcggaaaaaggggccagcccccaaaatgctggggaacgagctatgcagcgtgtgtggggacaaggcctcgggcttccactacaatgttctgagctgcgagggctgcaagggattcttccgccgcagcgtcatcaagggagcgcactacatctgccacagtggcggccactgccccatggacacctacatgcgtcgcaagtgccaggagtgtcggcttcgcaaatgccgtcaggctggcatgcgggaggagtgtgtcctgtcagaagaacagatccgcctgaagaaactgaagcggcaagaggaggaacaggctcatgccacatccttgccccccagggcttcctcacccccccaaatcctgccccag

SEQ ID NO: 160859 - DNA, 2731 bp, Homo sapiens
  Payload ID: 11431
  Gene Symbol: NR1H3
  Gene Name: nuclear receptor subfamily 1, group H, member 3
  Uniprot ID: Q13133
  ENST ID: ENST00000467728
  CDS Start-End: 1239-2582
cttctctggggctccaggtcctgcttgtgctcagctccagctcactggctggccaccgagacttctggacaggaaactgcaccatcctcttctcccagcaagggggctccagagactgcccacccaggaagtctggtggcctggggatttggtgggtctgctccttagcagtggcctggggctctgtgtgtgtatctggggtggggtcggggaatgtcctaaggatctgagaagggggtttctggggagaagtgaggggtgatggtgatggaagcttgggacaggagcaggactctgggtcccagaataactcatgaggggctcaggggaggaggtcctctatgtgaattggggagattcttggagacaggtttgtgctgggaccctggaaagtggcacgagcgaggttctctaataagcagcgtgtttcactgggtggagtgagctgtcctcagtgttggagtgagggggaaggggcccaagagaagcagggcagatgcacccaaacattccctgctggcctggaggggactttgggggagaaaagccggcacggtggctgggagcccagactttggagtcagaggagggttggagtcttgactctaccgccgcctaactgtgtgaccatagttacttaatctctttgaacctcagtttgcttatctgtaaaatgagtttaagaatagtcctgagccaggagcagtagcgtgcgcccataatctcagatactcaggaagctgaaacctgattgcttcagcccagtagtttgaggcgatagtgtcctattattgcacctgtgaatagcactgagttccagcctgggcaacatagagagaccccatctcaaaaaaaaaattaatagttttgacctcagagggatattatgaggaaagcacataaagccttataacaggctgggcgcagtggcttactccaataatccccacactttgggaggcccaggtgagaggatcacttgagcccaggaattcctagactagcctgggcaaaatagggagaacctgtctctaaaaaacataatagtaatataataaagccttagtacaggctaatatatggcaagtaaatgttagctgatattgttgatattgataaaagggaggatcaggtggagaagggagctgaggccagaaaggagcccagttctagaagagtataatctgggtccttcctgcaggacagtgccttggtaatgaccagggctccaggaagagatgtccttgtggctgggggcccctgtgcctgacattcctcctgactctgcggtggagctgtggaagccaggcgcacaggatgcaagcagccaggcccagggaggcagcagctgcatcctcagagaggaagccaggatgccccactctgctgggggtactgcaggggtggggctggaggctgcagagcccacagccctgctcaccagggcagagcccccttcagaacccacagagatccgtccacaaaagcggaaaaaggggccagcccccaaaatgctggggaacgagctatgcagcgtgtgtggggacaaggcctcgggcttccactacaatgttctgagctgcgagggctgcaagggattcttccgccgcagcgtcatcaagggagcgcactacatctgccacagtggcggccactgccccatggacacctacatgcgtcgcaagtgccaggagtgtcggcttcgcaaatgccgtcaggctggcatgcgggaggagtgtgtcctgtcagaagaacagatccgcctgaagaaactgaagcggcaagaggaggaacaggctcatgccacatccttgccccccagggcttcctcacccccccaaatcctgccccagctcagcccggaacaactgggcatgatcgagaagctcgtcgctgcccagcaacagtgtaaccggcgctccttttctgaccggcttcgagtcacgccttggcccatggcaccagatccccatagccgggaggcccgtcagcagcgctttgcccacttcactgagctggccatcgtctctgtgcaggagatagttgactttgctaaacagctacccggcttcctgcagctcagccgggaggaccagattgccctgctgaagacctctgcgatcgaggtgatgcttctggagacatctcggaggtacaaccctgggagtgagagtatcaccttcctcaaggatttcagttataaccgggaagactttgccaaagcagggctgcaagtggaattcatcaaccccatcttcgagttctccagggccatgaatgagctgcaactcaatgatgccgagtttgccttgctcattgctatcagcatcttctctgcagaccggcccaacgtgcaggaccagctccaggtagagaggctgcagcacacatatgtggaagccctgcatgcctacgtctccatccaccatccccatgaccgactgatgttcccacggatgctaatgaaactggtgagcctccggaccctgagcagcgtccactcagagcaagtgtttgcactgcgtctgcaggacaaaaagctcccaccgctgctctctgagatctgggatgtgcacgaatgactgttctgtccccatattttctgttttcttggccggatggctgaggcctggtggctgcctcctagaagtggaacagactgagaagggcaaacattcctgggagctgggcaaggagatcctcccgtggcattaaaagagagtcaaagggt

SEQ ID NO: 160860 - DNA, 1065 bp, Homo sapiens
  Payload ID: 11431
  Gene Symbol: NR1H3
  Gene Name: nuclear receptor subfamily 1, group H, member 3
  ENST ID: ENST00000527949
  CDS Start-End: 54-944
tcctgtatccagagatccgtccacaaaagcggaaaaaggggccagcccccaaaatgctggggaacgagctatgcagcgtgtgtggggacaaggcctcgggcttccactacaatgttctgagctgcgagggctgcaagggattcttccgccgcagcgtcatcaagggagcgcactacatctgccacagtggcggccactgccccatggacacctacatgcgtcgcaagtgccaggagtgtcggcttcgcaaatgccgtcaggctggcatgcgggaggagtgtgtcctgtcagaagaacagatccgcctgaagaaactgaagcggcaagaggaggaacaggctcatgccacatccttgccccccagggcttcctcacccccccaaatcctgccccagctcagcccggaacaactgggcatgatcgagaagctcgtcgctgcccagcaacagtgtaaccggcgctccttttctgaccggcttcgagtcacggtgatgcttctggagacatctcggaggtacaaccctgggagtgagagtatcaccttcctcaaggatttcagttataaccgggaagactttgccaaagcagggctgcaagtggaattcatcaaccccatcttcgagttctccagggccatgaatgagctgcaactcaatgatgccgagtttgccttgctcattgctatcagcatcttctctgcagaccggcccaacgtgcaggaccagctccaggtagagaggctgcagcacacatatgtggaagccctgcatgcctacgtctccatccaccatccccatgaccgactgatgttcccacggatgctaatgaaactggtgagcctccggaccctgagcagcgtccactcagagcaagtgtttgcactgcgtctgcaggacaaaaagctcccaccgctgctctctgagatctgggatgtgcacgaatgactgttctgtccccatattttctgttttcttggccggatggctgaggcctggtggctgcctcctagaagtggaacagactgagaagggcaaacattcctgggagctgggcaaggagatcctc

SEQ ID NO: 160861 - DNA, 1704 bp, Homo sapiens
  Payload ID: 11431
  Gene Symbol: NR1H3
  Gene Name: nuclear receptor subfamily 1, group H, member 3
  ENST ID: ENST00000481889
  CDS Start-End: 169-1569
cggggaaaaggcgcagtctcggtgggattgcgtgcaggagggtcgtggtctggctgtggcggaggagcataagaagactctgcggtggagctgtggaagccaggcgcacaggatgcaagcagccaggcccagggaggcagcagctgcatcctcagagaggaagccaggatgccccactctgctgggggtactgcaggggtggggctggaggctgcagagcccacagccctgctcaccagggcagagcccccttcagaacccacagagatccgtccacaaaagcggaaaaaggggccagcccccaaaatgctggggaacgagctatgcagcgtgtgtggggacaaggcctcgggcttccactacaatgttctgagctgcgagggctgcaagggattcttccgccgcagcgtcatcaagggagcgcactacatctgccacagtggcggccactgccccatggacacctacatgcgtcgcaagtgccaggagtgtcggcttcgcaaatgccgtcaggctggcatgcgggaggagtgtgtcctgtcagaagaacagatccgcctgaagaaactgaagcggcaagaggaggaacaggctcatgccacatccttgccccccagggcttcctcacccccccaaatcctgccccagctcagcccggaacaactgggcatgatcgagaagctcgtcgctgcccagcaacagtgtaaccggcgctccttttctgaccggcttcgagtcacgccttggcccatggcaccagatccccatagccgggaggcccgtcagcagcgctttgcccacttcactgagctggccatcgtctctgtgcaggagatagttgactttgctaaacagctacccggcttcctgcagctcagccgggaggaccagattgccctgctgaagacctctgcgatcgaggtggctggagaagggcaagggatgaagggagaagcagagtgggattatctgtgggaggggcctccagacatcgagctgggagagccaaatctgctgggaagcagggatgaggagaatcggcctccctggaagaggccatgctccaagaccagccctcctagtccccgtttgaggtttgctgcttgtgtgcaggtgatgcttctggagacatctcggaggtacaaccctgggagtgagagtatcaccttcctcaaggatttcagttataaccgggaagactttgccaaagcagggctgcaagtggaattcatcaaccccatcttcgagttctccagggccatgaatgagctgcaactcaatgatgccgagtttgccttgctcattgctatcagcatcttctctgcagaccggcccaacgtgcaggaccagctccaggtagagaggctgcagcacacatatgtggaagccctgcatgcctacgtctccatccaccatccccatgaccgactgatgttcccacggatgctaatgaaactggtgagcctccggaccctgagcagcgtccactcagagcaagtgtttgcactgcgtctgcaggacaaaaagctcccaccgctgctctctgagatctgggatgtgcacgaatgactgttctgtccccatattttctgttttcttggccggatggctgaggcctggtggctgcctcctagaagtggaacagactgagaagggcaaacattcctgggagctgggcaaggagatcctcccgtggcattaaaa

SEQ ID NO: 160862 - DNA, 667 bp, Homo sapiens
  Payload ID: 11431
  Gene Symbol: NR1H3
  Gene Name: nuclear receptor subfamily 1, group H, member 3
  ENST ID: ENST00000531660
  CDS Start-End: 166-667
ggaaaaggcgcagtctcggtgggattgcgtgcaggagggtcgtggtctggctgtggcggaggagcataagaagactctgcggtggagctgtggaagccaggcgcacaggatgcaagcagccaggcccagggaggcagcagctgcatcctcagagaggaagccaggatgccccactctgctgggggtactgcaggggtggggctggaggctgcagagcccacagccctgctcaccagggcagagcccccttcagaacccacaggtgtcctgtcagaagaacagatccgcctgaagaaactgaagcggcaagaggaggaacaggctcatgccacatccttgccccccagggcttcctcacccccccaaatcctgccccagctcagcccggaacaactgggcatgatcgagaagctcgtcgctgcccagcaacagtgtaaccggcgctccttttctgaccggcttcgagtcacggtgatgcttctggagacatctcggaggtacaaccctgggagtgagagtatcaccttcctcaaggatttcagttataaccgggaagactttgccaaagcagggctgcaagtggaattcatcaaccccatcttcgagttctccagggccatgaatgagctgcaactcaatgatgccgagtttgccttgctcattgcta

SEQ ID NO: 160863 - DNA, 1919 bp, Homo sapiens
  Payload ID: 11431
  Gene Symbol: NR1H3
  Gene Name: nuclear receptor subfamily 1, group H, member 3
  ENST ID: ENST00000616973
  CDS Start-End: 222-1583
gattctaacttagctaagcaatgctactggagaccataggcaaagccaaggtacagcttcagggaagtctttggtgagcccatctctcattaccaaggtaacgaagcgcagactccgggcccgggtgggcggcatcaccaccaggttcacgccgagaaggagctggaggagagccgcccggctccagccggaccgcttgcccgccatcaccgttgtaatctatgcagcaaacaagctggaacccgctgggtggcacctgcaagcagccgcccggacgcacccactctgcggtggagctgtggaagccaggcgcacaggatgcaagcagccaggcccagggaggcagcagctgcatcctcagagaggaagccaggatgccccactctgctgggggtactgcaggggtggggctggaggctgcagagcccacagccctgctcaccagggcagagcccccttcagaacccacagagatccgtccacaaaagcggaaaaaggggccagcccccaaaatgctggggaacgagctatgcagcgtgtgtggggacaaggcctcgggcttccactacaatgttctgagctgcgagggctgcaagggattcttccgccgcagcgtcatcaagggagcgcactacatctgccacagtggcggccactgccccatggacacctacatgcgtcgcaagtgccaggagtgtcggcttcgcaaatgccgtcaggctggcatgcgggaggagtgtgtcctgtcagaagaacagatccgcctgaagaaactgaagcggcaagaggaggaacaggctcatgccacatccttgccccccagggcttcctcacccccccaaatcctgccccagctcagcccggaacaactgggcatgatcgagaagctcgtcgctgcccagcaacagtgtaaccggcgctccttttctgaccggcttcgagtcacgccttggcccatggcaccagatccccatagccgggaggcccgtcagcagcgctttgcccacttcactgagctggccatcgtctctgtgcaggagatagttgactttgctaaacagctacccggcttcctgcagctcagccgggaggaccagattgccctgctgaagacctctgcgatcgaggtgatgcttctggagacatctcggaggtacaaccctgggagtgagagtatcaccttcctcaaggatttcagttataaccgggaagactttgccaaagcagggctgcaagtggaattcatcaaccccatcttcgagttctccagggccatgaatgagctgcaactcaatgatgccgagtttgccttgctcattgctatcagcatcttctctgcagaccggcccaacgtgcaggaccagctccaggtagagaggctgcagcacacatatgtggaagccctgcatgcctacgtctccatccaccatccccatgaccgactgatgttcccacggatgctaatgaaactggtgagcctccggaccctgagcagcgtccactcagagcaagtgtttgcactgcgtctgcaggacaaaaagctcccaccgctgctctctgagatctgggatgtgcacgaatgactgttctgtccccatattttctgttttcttggccggatggctgaggcctggtggctgcctcctagaagtggaacagactgagaagggcaaacattcctgggagctgggcaaggagatcctcccgtggcattaaaagagagtcaaagggttgcgagttttgtggctactgagcagtggagccctcgctaacactgtgctgtgtctgaagatcatgctgaccccacaaacggatgggcctgggggccactttgcacagggttctccagagccctgcccatcctgcctccaccacttcctgtttttcccacagggccccaagaaaaattctccactgtc

SEQ ID NO: 160864 - DNA, 1630 bp, Homo sapiens
  Payload ID: 11432
  Gene Symbol: NR1H4
  Gene Name: nuclear receptor subfamily 1, group H, member 4
  Uniprot ID: Q96RI1
  ENST ID: ENST00000188403
  CDS Start-End: 29-1477
attttcagtggctgtgaataagctaagaatggtaatgcagtttcaggggttagaaaatccaattcaaattagtcctcactgcagctgtacgccgtcaggatttttcatggaaatgatgagtatgaagcccgcgaaaggtgttttaacagaacaagtggcaggtcctctgggacagaacctggaagtggaaccatactcgcaatacagcaatgttcagtttccccaagttcaaccacagatttcctcgtcatcctattattccaacctgggtttctacccccagcagcctgaagagtggtactctcctggaatatatgaactcaggcgtatgccagctgagactctctaccagggagaaactgaggtagcagagatgcctgtaacaaagaagccccgcatgggcgcgtcagcagggaggatcaaaggggatgagctgtgtgttgtttgtggagacagagcctctggataccactataatgcactgacctgtgaggggtgtaaaggtttcttcaggagaagcattaccaaaaacgctgtgtacaagtgtaaaaacgggggcaactgtgtgatggatatgtacatgcgaagaaagtgtcaagagtgtcgactaaggaaatgcaaagagatgggaatgttggctgaatgcttgttaactgaaattcagtgtaaatctaagcgactgagaaaaaatgtgaagcagcatgcagatcagaccgtgaatgaagacagtgaaggtcgtgacttgcgacaagtgacctcgacaacaaagtcatgcagggagaaaactgaactcaccccagatcaacagactcttctacattttattatggattcatataacaaacagaggatgcctcaggaaataacaaataaaattttaaaagaagaattcagtgcagaagaaaattttctcattttgacggaaatggcaaccaatcatgtacaggttcttgtagaattcacaaaaaagctaccaggatttcagactttggaccatgaagaccagattgctttgctgaaagggtctgcggttgaagctatgttccttcgttcagctgagattttcaataagaaacttccgtctgggcattctgacctattggaagaaagaattcgaaatagtggtatctctgatgaatatataacacctatgtttagtttttataaaagtattggggaactgaaaatgactcaagaggagtatgctctgcttacagcaattgttatcctgtctccagatagacaatacataaaggatagagaggcagtagagaagcttcaggagccacttcttgatgtgctacaaaagttgtgtaagattcaccagcctgaaaatcctcaacactttgcctgtctcctgggtcgcctgactgaattacggacattcaatcatcaccacgctgagatgctgatgtcatggagagtaaacgaccacaagtttaccccacttctctgtgaaatctgggacgtgcagtgatggggattacaggggaggggtctagctcctttttctctctcatattaatctgatgtataactttcctttatttcacttgtacccagtttcactcaagaaatcttgatgaatatttatgttgtaattacatgtgtaacttccacaactgtaaat

SEQ ID NO: 160865 - DNA, 1779 bp, Homo sapiens
  Payload ID: 11432
  Gene Symbol: NR1H4
  Gene Name: nuclear receptor subfamily 1, group H, member 4
  ENST ID: ENST00000321046
  CDS Start-End: 334-1146
tcacctcattgtctccccgacttatcctaatgcgaaattggattctgagcatttgtagcaaaatcgctgggatctggagaggaagactcagtccagaatcctcccagggccttgaaagtccatctctgacccaaaacaatccaaggaggtagaagacatcgtagaaggagtgaaagaagaaaagaagacttagaaacatagctcaaagtgaacactgcttctcttagtttcctggatttcttctggacatttcctcaagatgaaacttcagacactttggagttttttttgaagaccaccataaagaaagtgcatttcaattgaaaaatttggatgggatcaaaaatgaatctcattgaacattcccatttacctaccacagatgaattttctttttctgaaaatttatttggtgttttaacagaacaagtggcaggtcctctgggacagaacctggaagtggaaccatactcgcaatacagcaatgttcagtttccccaagttcaaccacagatttcctcgtcatcctattattccaacctgggtttctacccccagcagcctgaagagtggtactctcctggaatatatgaactcaggcgtatgccagctgagactctctaccagggagaaactgaggtagcagagatgcctgtaacaaagaagccccgcatgggcgcgtcagcagggaggatcaaaggggatgagctgtgtgttgtttgtggagacagagcctctggataccactataatgcactgacctgtgaggggtgtaaaggtttcttcaggagaagcattaccaaaaacgctgtgtacaagtgtaaaaacgggggcaactgtgtgatggatatgtacatgcgaagaaagtgtcaagagtgtcgactaaggaaatgcaaagagatgggaatgttggctgaatgcttgttaactgaaattcagtgtaaatctaagcgactgagaaaaaatgtgaagcagcatgcagatcagaccgtgaatgaagacagtgaaggtcgtgacttgcgacaagtgacctcgacaacaaagtcatgcaggtgtaggagaaaactgaactcaccccagatcaacagactcttctacattttattatggattcatataacaaacagaggatgcctcaggaaataacaaataaaattttaaaagaagaattcagtgcagaagaaaattttctcattttgacggaaatggcaaccaatcatgtacaggttcttgtagaattcacaaaaaagctaccaggatttcagactttggaccatgaagaccagattgctttgctgaaagggtctgcggttgaagctatgttccttcgttcagctgagattttcaataagaaacttccgtctgggcattctgacctattggaagaaagaattcgaaatagtggtatctctgatgaatatataacacctatgtttagtttttataaaagtattggggaactgaaaatgactcaagaggagtatgctctgcttacagcaattgttatcctgtctccagatagacaatacataaaggatagagaggcagtagagaagcttcaggagccacttcttgatgtgctacaaaagttgtgtaagattcaccagcctgaaaatcctcaacactttgcctgtctcctgggtcgcctgactgaattacggacattcaatcatcaccacgctgagatgctgatgtcatggagagtaaacgaccacaagtttaccccacttctctgtgaaatctgggacgtgcagtgatggggattacaggggaggggtc

SEQ ID NO: 160866 - DNA, 1778 bp, Homo sapiens
  Payload ID: 11432
  Gene Symbol: NR1H4
  Gene Name: nuclear receptor subfamily 1, group H, member 4
  Uniprot ID: Q96RI1
  ENST ID: ENST00000392986
  CDS Start-End: 334-1764
tcacctcattgtctccccgacttatcctaatgcgaaattggattctgagcatttgtagcaaaatcgctgggatctggagaggaagactcagtccagaatcctcccagggccttgaaagtccatctctgacccaaaacaatccaaggaggtagaagacatcgtagaaggagtgaaagaagaaaagaagacttagaaacatagctcaaagtgaacactgcttctcttagtttcctggatttcttctggacatttcctcaagatgaaacttcagacactttggagttttttttgaagaccaccataaagaaagtgcatttcaattgaaaaatttggatgggatcaaaaatgaatctcattgaacattcccatttacctaccacagatgaattttctttttctgaaaatttatttggtgttttaacagaacaagtggcaggtcctctgggacagaacctggaagtggaaccatactcgcaatacagcaatgttcagtttccccaagttcaaccacagatttcctcgtcatcctattattccaacctgggtttctacccccagcagcctgaagagtggtactctcctggaatatatgaactcaggcgtatgccagctgagactctctaccagggagaaactgaggtagcagagatgcctgtaacaaagaagccccgcatgggcgcgtcagcagggaggatcaaaggggatgagctgtgtgttgtttgtggagacagagcctctggataccactataatgcactgacctgtgaggggtgtaaaggtttcttcaggagaagcattaccaaaaacgctgtgtacaagtgtaaaaacgggggcaactgtgtgatggatatgtacatgcgaagaaagtgtcaagagtgtcgactaaggaaatgcaaagagatgggaatgttggctgaatgtatgtatacaggcttgttaactgaaattcagtgtaaatctaagcgactgagaaaaaatgtgaagcagcatgcagatcagaccgtgaatgaagacagtgaaggtcgtgacttgcgacaagtgacctcgacaacaaagtcatgcagggagaaaactgaactcaccccagatcaacagactcttctacattttattatggattcatataacaaacagaggatgcctcaggaaataacaaataaaattttaaaagaagaattcagtgcagaagaaaattttctcattttgacggaaatggcaaccaatcatgtacaggttcttgtagaattcacaaaaaagctaccaggatttcagactttggaccatgaagaccagattgctttgctgaaagggtctgcggttgaagctatgttccttcgttcagctgagattttcaataagaaacttccgtctgggcattctgacctattggaagaaagaattcgaaatagtggtatctctgatgaatatataacacctatgtttagtttttataaaagtattggggaactgaaaatgactcaagaggagtatgctctgcttacagcaattgttatcctgtctccagatagacaatacataaaggatagagaggcagtagagaagcttcaggagccacttcttgatgtgctacaaaagttgtgtaagattcaccagcctgaaaatcctcaacactttgcctgtctcctgggtcgcctgactgaattacggacattcaatcatcaccacgctgagatgctgatgtcatggagagtaaacgaccacaagtttaccccacttctctgtgaaatctgggacgtgcagtgatggggattacaggg

SEQ ID NO: 160867 - DNA, 496 bp, Homo sapiens
  Payload ID: 11432
  Gene Symbol: NR1H4
  Gene Name: nuclear receptor subfamily 1, group H, member 4
  ENST ID: ENST00000548621
  CDS Start-End: 24-197
tgcatttcaattgaaaaatttggatgggatcaaaaatgaatctcattgaacattcccatttacctaccacagatgaattttctttttctgaaaatttatttgatttcctgggttggttccaatctctgccatctactaccctgtggtcttggacaaattccttaactttgcacaagttacttgccttatttaaataaggtgataagaagaatgcctggcacatcacaagtactctatttgccactaaaattcactctcacaacacacctataagggcttctcagactcccctggagtccatccatgtgttctcatttaagaactcgtccctaaacttccatggagaaccgtcacaaaggaatcctaattctcatactctttgataggctaattccaaaataaagattcctaaatctaaattttaatatgtattttcccttttaaattgtatcaaaatagaaataaatttaccttttcagaaagcatactctaaatt

SEQ ID NO: 160868 - DNA, 565 bp, Homo sapiens
  Payload ID: 11432
  Gene Symbol: NR1H4
  Gene Name: nuclear receptor subfamily 1, group H, member 4
  ENST ID: ENST00000546380
  CDS Start-End: 295-432
ggattctgagcatttgtagcaaaatcgctgggatctggagaggaagactcagtccagaatcctcccagggccttgaaagtccatctctgacccaaaacaatccaaggaggtagaagacatcgtagaaggagtgaaagaagaaaagaagacttagaaacatagctcaaagtgaacactgcttctcttagtttcctggatttcttctggacatttcctcaagatgaaacttcagacactttggagttttttttgaagaccaccataaagaaagtgcatttcaattgaaaaatttggatgggatcaaaaatgaatctcattgaacattcccatttacctaccacagatgaattttctttttctgaaaatttatttgggcttctcagactcccctggagtccatccatgtgttctcatttaagaactcgtccctaaacttccatggagaaccgtcacaaaggaatcctaattctcatactctttgataggctaattccaaaataaagattcctaaatctaaattttaatatgtattttcccttttaaattgtatcaaaatagaaataaa

SEQ ID NO: 160869 - DNA, 294 bp, Homo sapiens
  Payload ID: 11432
  Gene Symbol: NR1H4
  Gene Name: nuclear receptor subfamily 1, group H, member 4
  ENST ID: ENST00000551184
  CDS Start-End: 1-103
gtcaggatttttcatggaaatgatgagtatgaagcccgcgaaagggcttctcagactcccctggagtccatccatgtgttctcatttaagaactcgtccctaaacttccatggagaaccgtcacaaaggaatcctaattctcatactctttgataggctaattccaaaataaagattcctaaatctaaattttaatatgtattttcccttttaaattgtatcaaaatagaaataaatttaccttttcagaaagcatactctaaattaaagtcgaactacctctactccctccac

SEQ ID NO: 160870 - DNA, 1489 bp, Homo sapiens
  Payload ID: 11432
  Gene Symbol: NR1H4
  Gene Name: nuclear receptor subfamily 1, group H, member 4
  Uniprot ID: Q96RI1
  ENST ID: ENST00000551379
  CDS Start-End: 29-1489
attttcagtggctgtgaataagctaagaatggtaatgcagtttcaggggttagaaaatccaattcaaattagtcctcactgcagctgtacgccgtcaggatttttcatggaaatgatgagtatgaagcccgcgaaaggtgttttaacagaacaagtggcaggtcctctgggacagaacctggaagtggaaccatactcgcaatacagcaatgttcagtttccccaagttcaaccacagatttcctcgtcatcctattattccaacctgggtttctacccccagcagcctgaagagtggtactctcctggaatatatgaactcaggcgtatgccagctgagactctctaccagggagaaactgaggtagcagagatgcctgtaacaaagaagccccgcatgggcgcgtcagcagggaggatcaaaggggatgagctgtgtgttgtttgtggagacagagcctctggataccactataatgcactgacctgtgaggggtgtaaaggtttcttcaggagaagcattaccaaaaacgctgtgtacaagtgtaaaaacgggggcaactgtgtgatggatatgtacatgcgaagaaagtgtcaagagtgtcgactaaggaaatgcaaagagatgggaatgttggctgaatgtatgtatacaggcttgttaactgaaattcagtgtaaatctaagcgactgagaaaaaatgtgaagcagcatgcagatcagaccgtgaatgaagacagtgaaggtcgtgacttgcgacaagtgacctcgacaacaaagtcatgcagggagaaaactgaactcaccccagatcaacagactcttctacattttattatggattcatataacaaacagaggatgcctcaggaaataacaaataaaattttaaaagaagaattcagtgcagaagaaaattttctcattttgacggaaatggcaaccaatcatgtacaggttcttgtagaattcacaaaaaagctaccaggatttcagactttggaccatgaagaccagattgctttgctgaaagggtctgcggttgaagctatgttccttcgttcagctgagattttcaataagaaacttccgtctgggcattctgacctattggaagaaagaattcgaaatagtggtatctctgatgaatatataacacctatgtttagtttttataaaagtattggggaactgaaaatgactcaagaggagtatgctctgcttacagcaattgttatcctgtctccagatagacaatacataaaggatagagaggcagtagagaagcttcaggagccacttcttgatgtgctacaaaagttgtgtaagattcaccagcctgaaaatcctcaacactttgcctgtctcctgggtcgcctgactgaattacggacattcaatcatcaccacgctgagatgctgatgtcatggagagtaaacgaccacaagtttaccccacttctctgtgaaatctgggacgtgcagtga

SEQ ID NO: 160871 - DNA, 2884 bp, Homo sapiens
  Payload ID: 11432
  Gene Symbol: NR1H4
  Gene Name: nuclear receptor subfamily 1, group H, member 4
  Uniprot ID: Q96RI1
  ENST ID: ENST00000548884
  CDS Start-End: 542-1960
acattcctcattctggggctttgcggttttgtcttgggaatctcgaggctctcccaaggttcctttctatgtttatatcatttagcagggaaggattgttaatgactaatctgtgtccatgaggcacagagccaaggaagagatgctgctgctagcccagaaggccgcctgtgatcatgcacagtacactggaactctctcctcctcctcacctcattgtctccccgacttatcctaatgcgaaattggattctgagcatttgtagcaaaatcgctgggatctggagaggaagactcagtccagaatcctcccagggccttgaaagtccatctctgacccaaaacaatccaaggaggtagaagacatcgtagaaggagtgaaagaagaaaagaagacttagaaacatagctcaaagtgaacactgcttctcttagtttcctggatttcttctggacatttcctcaagatgaaacttcagacactttggagttttttttgaagaccaccataaagaaagtgcatttcaattgaaaaatttggatgggatcaaaaatgaatctcattgaacattcccatttacctaccacagatgaattttctttttctgaaaatttatttggtgttttaacagaacaagtggcaggtcctctgggacagaacctggaagtggaaccatactcgcaatacagcaatgttcagtttccccaagttcaaccacagatttcctcgtcatcctattattccaacctgggtttctacccccagcagcctgaagagtggtactctcctggaatatatgaactcaggcgtatgccagctgagactctctaccagggagaaactgaggtagcagagatgcctgtaacaaagaagccccgcatgggcgcgtcagcagggaggatcaaaggggatgagctgtgtgttgtttgtggagacagagcctctggataccactataatgcactgacctgtgaggggtgtaaaggtttcttcaggagaagcattaccaaaaacgctgtgtacaagtgtaaaaacgggggcaactgtgtgatggatatgtacatgcgaagaaagtgtcaagagtgtcgactaaggaaatgcaaagagatgggaatgttggctgaatgcttgttaactgaaattcagtgtaaatctaagcgactgagaaaaaatgtgaagcagcatgcagatcagaccgtgaatgaagacagtgaaggtcgtgacttgcgacaagtgacctcgacaacaaagtcatgcagggagaaaactgaactcaccccagatcaacagactcttctacattttattatggattcatataacaaacagaggatgcctcaggaaataacaaataaaattttaaaagaagaattcagtgcagaagaaaattttctcattttgacggaaatggcaaccaatcatgtacaggttcttgtagaattcacaaaaaagctaccaggatttcagactttggaccatgaagaccagattgctttgctgaaagggtctgcggttgaagctatgttccttcgttcagctgagattttcaataagaaacttccgtctgggcattctgacctattggaagaaagaattcgaaatagtggtatctctgatgaatatataacacctatgtttagtttttataaaagtattggggaactgaaaatgactcaagaggagtatgctctgcttacagcaattgttatcctgtctccagatagacaatacataaaggatagagaggcagtagagaagcttcaggagccacttcttgatgtgctacaaaagttgtgtaagattcaccagcctgaaaatcctcaacactttgcctgtctcctgggtcgcctgactgaattacggacattcaatcatcaccacgctgagatgctgatgtcatggagagtaaacgaccacaagtttaccccacttctctgtgaaatctgggacgtgcagtgatggggattacaggggaggggtctagctcctttttctctctcatattaatctgatgtataactttcctttatttcacttgtacccagtttcactcaagaaatcttgatgaatatttatgttgtaattacatgtgtaacttccacaactgtaaatattgggctagatagaacaactttctctacattgtgttttaaaaggctccagggaatcctgcattctaattggcaagccctgtttgcctaattaaattgattgttacttcaattctatctgttgaactagggaaaatctcattttgctcatcttaccatattgcatatattttattaaagagttgtattcaatcttggcaataaagcaaacataatggcaacaggattttctttgggaacaaaatttgataaatatacaaactcatttctttaaatgttgaaagacatcctattgaatctgagggggtaatttacagaaagatactgtctctcgcacttttgtcatctctggaaaagtcctggtgaatagtcattcatttgtaatagccctctgatcatttccttttctttgaagttcaaagagaatagcaaacagaaaagttaacaattttcacataaaatattccctcaagcaatcctttcccccatagttagtcttgaggcaggattcacaaattcagagtatgcagctaactgcagtgatgggaccttcgctttcctctcttaaaagtgaggaaatgattggcttcattgtatccaatcatctttctgttttgttttgcttttgaaaacattcctacagctgggagcacagctgctgtatacttcccccaaagcaggaattagttcatttccttccttcattgttacactgttgcattcttctccctattatcctttggtgaatacaataaaacaccttctataagta

SEQ ID NO: 160872 - DNA, 1633 bp, Homo sapiens
  Payload ID: 11432
  Gene Symbol: NR1H4
  Gene Name: nuclear receptor subfamily 1, group H, member 4
  Uniprot ID: Q96RI1
  ENST ID: ENST00000549996
  CDS Start-End: 334-1611
tcacctcattgtctccccgacttatcctaatgcgaaattggattctgagcatttgtagcaaaatcgctgggatctggagaggaagactcagtccagaatcctcccagggccttgaaagtccatctctgacccaaaacaatccaaggaggtagaagacatcgtagaaggagtgaaagaagaaaagaagacttagaaacatagctcaaagtgaacactgcttctcttagtttcctggatttcttctggacatttcctcaagatgaaacttcagacactttggagttttttttgaagaccaccataaagaaagtgcatttcaattgaaaaatttggatgggatcaaaaatgaatctcattgaacattcccatttacctaccacagatgaattttctttttctgaaaatttatttggtgttttaacagaacaagtggcaggtcctctgggacagaacctggaagtggaaccatactcgcaatacagcaatgttcagtttccccaagttcaaccacagatttcctcgtcatcctattattccaacctgggtttctacccccagcagcctgaagagtggtactctcctggaatatatgaactcaggcgtatgccagctgagactctctaccagggagaaactgaggtagcagagatgcctgtaacaaagaagccccgcatgggcgcgtcagcagggaggatcaaaggggatgagctgtgtgttgtttgtggagacagagcctctggataccactataatgcactgacctgtgaggggtgtaaaggcttgttaactgaaattcagtgtaaatctaagcgactgagaaaaaatgtgaagcagcatgcagatcagaccgtgaatgaagacagtgaaggtcgtgacttgcgacaagtgacctcgacaacaaagtcatgcagggagaaaactgaactcaccccagatcaacagactcttctacattttattatggattcatataacaaacagaggatgcctcaggaaataacaaataaaattttaaaagaagaattcagtgcagaagaaaattttctcattttgacggaaatggcaaccaatcatgtacaggttcttgtagaattcacaaaaaagctaccaggatttcagactttggaccatgaagaccagattgctttgctgaaagggtctgcggttgaagctatgttccttcgttcagctgagattttcaataagaaacttccgtctgggcattctgacctattggaagaaagaattcgaaatagtggtatctctgatgaatatataacacctatgtttagtttttataaaagtattggggaactgaaaatgactcaagaggagtatgctctgcttacagcaattgttatcctgtctccagatagacaatacataaaggatagagaggcagtagagaagcttcaggagccacttcttgatgtgctacaaaagttgtgtaagattcaccagcctgaaaatcctcaacactttgcctgtctcctgggtcgcctgactgaattacggacattcaatcatcaccacgctgagatgctgatgtcatggagagtaaacgaccacaagtttaccccacttctctgtgaaatctgggacgtgcagtgatggggattacaggggaggggtc

SEQ ID NO: 160873 - DNA, 2743 bp, Homo sapiens
  Payload ID: 11433
  Gene Symbol: NR1I2
  Gene Name: nuclear receptor subfamily 1, group I, member 2
  Uniprot ID: O75469
  ENST ID: ENST00000337940
  CDS Start-End: 49-1470
ggcctgctgggttagtgctggcagccccctgaggccaaggacagcagcatgacagtcaccaggactcaccacttcaaggaggggtccctcagagcacctgccatacccctgcacagtgctgcggctgagttggcttcaaaccatccaagaggcccagaagcaaacctggaggtgagacccaaagaaagctggaaccatgctgactttgtacactgtgaggacacagagtctgttcctggaaagcccagtgtcaacgcagatgaggaagtcggaggtccccaaatctgccgtgtatgtggggacaaggccactggctatcacttcaatgtcatgacatgtgaaggatgcaagggctttttcaggagggccatgaaacgcaacgcccggctgaggtgccccttccggaagggcgcctgcgagatcacccggaagacccggcgacagtgccaggcctgccgcctgcgcaagtgcctggagagcggcatgaagaaggagatgatcatgtccgacgaggccgtggaggagaggcgggccttgatcaagcggaagaaaagtgaacggacagggactcagccactgggagtgcaggggctgacagaggagcagcggatgatgatcagggagctgatggacgctcagatgaaaacctttgacactaccttctcccatttcaagaatttccggctgccaggggtgcttagcagtggctgcgagttgccagagtctctgcaggccccatcgagggaagaagctgccaagtggagccaggtccggaaagatctgtgctctttgaaggtctctctgcagctgcggggggaggatggcagtgtctggaactacaaacccccagccgacagtggcgggaaagagatcttctccctgctgccccacatggctgacatgtcaacctacatgttcaaaggcatcatcagctttgccaaagtcatctcctacttcagggacttgcccatcgaggaccagatctccctgctgaagggggccgctttcgagctgtgtcaactgagattcaacacagtgttcaacgcggagactggaacctgggagtgtggccggctgtcctactgcttggaagacactgcaggtggcttccagcaacttctactggagcccatgctgaaattccactacatgctgaagaagctgcagctgcatgaggaggagtatgtgctgatgcaggccatctccctcttctccccagaccgcccaggtgtgctgcagcaccgcgtggtggaccagctgcaggagcaattcgccattactctgaagtcctacattgaatgcaatcggccccagcctgctcataggttcttgttcctgaagatcatggctatgctcaccgagctccgcagcatcaatgctcagcacacccagcggctgctgcgcatccaggacatacacccctttgctacgcccctcatgcaggagttgttcggcatcacaggtagctgagcggctgcccttgggtgacacctccgagaggcagccagacccagagccctctgagccgccactcccgggccaagacagatggacactgccaagagccgacaatgccctgctggcctgtctccctagggaattcctgctatgacagctggctagcattcctcaggaaggacatgggtgccccccacccccagttcagtctgtagggagtgaagccacagactcttacgtggagagtgcactgacctgtaggtcaggaccatcagagaggcaaggttgccctttccttttaaaaggccctgtggtctggggagaaatccctcagatcccactaaagtgtcaaggtgtggaagggaccaagcgaccaaggatgggccatctggggtctatgcccacatacccacgtttgttcgcttcctgagtcttttcattgctacctctaatagtcctgtctcccacttcccactcgttcccctcctcttccgagctgctttgtgggctccaggcctgtactcatcggcaggcgcatgagtatctgtgggagtcctctagagagatgagaagccaggaggcctgcaccaaatgtcagaagcttggcatgacctcattccggccacatcattctgtgtctctgcatccatttgaacacattattaagcaccgataataggtagcctgctgtggggtatacagcattgactcagatatagatcctgagctcacagagtttatagttaaaaaaacaaacagaaacacaaacgatttggatcaaaaggagaaatgataagtgacaaaagcagcacaaggaatttccctgtgtggatgctgagctgtgatggcgggcactgggtacccaagtgaaggttcccaaggacatgagtctgtaggagcaagggcacaaactgcagctgtgagtgcgtgtgtgtgatttggtgtaggtaggtctgtttgccacttgatggggcctgggtttgttcctggggctggaatgctgggtatgctctgtgacaaggctacgctgacaatcagttaaacacaccggagaagaaccatttacatgcaccttatatttctgtgtacacatctattctcaaagctaaagggtatgaaagtgcctgccttgtttatagccacttgtgagtaaaaatttttttgcattttcacaaattatactttatataaggcattccacacctaagaactagttttgggaaatgtagccctgggtttaatgtcaaatcaaggcaaaaggaattaaataatgtacttttggcta

SEQ ID NO: 160874 - DNA, 4417 bp, Homo sapiens
  Payload ID: 11433
  Gene Symbol: NR1I2
  Gene Name: nuclear receptor subfamily 1, group I, member 2
  ENST ID: ENST00000393716
  CDS Start-End: 1840-3144
ttcttaaccctttccagctttcccaccctctttggctttagccatggccttctgatctgtgtttctcaggggacctgcaggccccagatatagccccatgctgtcctcctaccccagagcacactgttcaggctacttccactggtactgaaatccagtatttcacttactctttttctttccaatatcctcatgacattcaatatttcacttactctaggtcctccctgcctaaggcccaagtcaactttctgtccagtgggatttgtaatccaatacctcctagccctagcagaatcccatgtggataatcagaaatgtgactggaaaaaggacagagctctatggctgtgggtcccagtccccactgctggcagtaagtccccagcagtgagctgtgtaagcaccttacattctgcgcttggttgaaaacagcaaggcaagcatccacttgagaaatgtcaacccctaggaaatcccagcctcaagtctttctcatcccttgggaagtgcaaattggatagagaagaaaccaattaaaaacaaaacaaacaaatcatacttagatattctggcttttctcaccagggctggattaaagcatgtacttcaaaataataacaacttaagtcaataaataaatgtaaggaagtccaaatgttcacctgaagacaactgtggtcattttttggcaatcccaggttctcttttctacctgtttgctcaatcgtggtctccctctccctctcttgttggggcccatgcccctgctttactgttgccagaggcttgtacttgtttgccttttaggtaggagcagttacttccactcccctcacctgccataaagcatctttataaacaaagcaagtagaagaaacacatcctggtatccaccacattcggcttttgttgattctgttcacttgggagcacctgctgctagggaataagaaggttgaggctgaagagtgaggactcttcagctcccctctggcaggacccgggagaggaaagagccctcagctggtccatcctccccactcctggtcagccttctgttctgagatcaaagtggtggggtcacattctcgagaactgtgctcagccccctcatctcacaccctttccctctccctgtgtgcctgcccccctcttacataaccatgctggtgattggcaccgtcataaatcaatactttgctcactttcacatcaagtaacactatccagggaggtggtttcaacaaaggaggaagtataaggagatctaggttcaaattaatgttgcccctagtggtaaaggacagagaccctcagactgatgaaatgcactcagaattacttagacaaagcggatatttgccactctcttccccttttcctgtgtttttgtagtgaagagacctgaaagaaaaaagtagggagaacataatgagaacaaatacggtaatctcttcatttgctagttcaagtgctggacttgggacttaggaggggcaatggagccgcttagtgcctacatctgacttggactgaaatataggtgagagacaagattgtctcatatccggggaaatcataacctatgactaggacgggaagaggaagcactgcctttacttcagtgggaatctcggcctcagcctgcaagccaagtgttcacagtgagaaaagcaagagaataagctaatactcctgtcctgaacaaggcagcggctccttggtaaagctactccttgatcgatcctttgcaccggattgttcaaagtggaccccaggggagaagtcggagcaaagaacttaccaccaagcagtccaagaggcccagaagcaaacctggaggtgagacccaaagaaagctggaaccatgctgactttgtacactgtgaggacacagagtctgttcctggaaagcccagtgtcaacgcagatgaggaagtcggaggtccccaaatctgccgtgtatgtggggacaaggccactggctatcacttcaatgtcatgacatgtgaaggatgcaagggctttttcaggagggccatgaaacgcaacgcccggctgaggtgccccttccggaagggcgcctgcgagatcacccggaagacccggcgacagtgccaggcctgccgcctgcgcaagtgcctggagagcggcatgaagaaggagatgatcatgtccgacgaggccgtggaggagaggcgggccttgatcaagcggaagaaaagtgaacggacagggactcagccactgggagtgcaggggctgacagaggagcagcggatgatgatcagggagctgatggacgctcagatgaaaacctttgacactaccttctcccatttcaagaatttccggctgccaggggtgcttagcagtggctgcgagttgccagagtctctgcaggccccatcgagggaagaagctgccaagtggagccaggtccggaaagatctgtgctctttgaaggtctctctgcagctgcggggggaggatggcagtgtctggaactacaaacccccagccgacagtggcgggaaagagatcttctccctgctgccccacatggctgacatgtcaacctacatgttcaaaggcatcatcagctttgccaaagtcatctcctacttcagggacttgcccatcgaggaccagatctccctgctgaagggggccgctttcgagctgtgtcaactgagattcaacacagtgttcaacgcggagactggaacctgggagtgtggccggctgtcctactgcttggaagacactgcaggtggcttccagcaacttctactggagcccatgctgaaattccactacatgctgaagaagctgcagctgcatgaggaggagtatgtgctgatgcaggccatctccctcttctccccagaccgcccaggtgtgctgcagcaccgcgtggtggaccagctgcaggagcaattcgccattactctgaagtcctacattgaatgcaatcggccccagcctgctcataggttcttgttcctgaagatcatggctatgctcaccgagctccgcagcatcaatgctcagcacacccagcggctgctgcgcatccaggacatacacccctttgctacgcccctcatgcaggagttgttcggcatcacaggtagctgagcggctgcccttgggtgacacctccgagaggcagccagacccagagccctctgagccgccactcccgggccaagacagatggacactgccaagagccgacaatgccctgctggcctgtctccctagggaattcctgctatgacagctggctagcattcctcaggaaggacatgggtgccccccacccccagttcagtctgtagggagtgaagccacagactcttacgtggagagtgcactgacctgtaggtcaggaccatcagagaggcaaggttgccctttccttttaaaaggccctgtggtctggggagaaatccctcagatcccactaaagtgtcaaggtgtggaagggaccaagcgaccaaggatgggccatctggggtctatgcccacatacccacgtttgttcgcttcctgagtcttttcattgctacctctaatagtcctgtctcccacttcccactcgttcccctcctcttccgagctgctttgtgggctccaggcctgtactcatcggcaggcgcatgagtatctgtgggagtcctctagagagatgagaagccaggaggcctgcaccaaatgtcagaagcttggcatgacctcattccggccacatcattctgtgtctctgcatccatttgaacacattattaagcaccgataataggtagcctgctgtggggtatacagcattgactcagatatagatcctgagctcacagagtttatagttaaaaaaacaaacagaaacacaaacgatttggatcaaaaggagaaatgataagtgacaaaagcagcacaaggaatttccctgtgtggatgctgagctgtgatggcgggcactgggtacccaagtgaaggttcccaaggacatgagtctgtaggagcaagggcacaaactgcagctgtgagtgcgtgtgtgtgatttggtgtaggtaggtctgtttgccacttgatggggcctgggtttgttcctggggctggaatgctgggtatgctctgtgacaaggctacgctgacaatcagttaaacacaccggagaagaaccatttacatgcaccttatatttctgtgtacacatctattctcaaagctaaagggtatgaaagtgcctgccttgtttatagccacttgtgagtaaaaatttttttgcattttcacaaattatactttatataaggcattccacacctaagaactagttttgggaaatgtagccctgggtttaatgtcaaatcaaggcaaaaggaattaaataatgtacttttggcta

SEQ ID NO: 160875 - DNA, 4306 bp, Homo sapiens
  Payload ID: 11433
  Gene Symbol: NR1I2
  Gene Name: nuclear receptor subfamily 1, group I, member 2
  ENST ID: ENST00000466380
  CDS Start-End: 1840-3033
ttcttaaccctttccagctttcccaccctctttggctttagccatggccttctgatctgtgtttctcaggggacctgcaggccccagatatagccccatgctgtcctcctaccccagagcacactgttcaggctacttccactggtactgaaatccagtatttcacttactctttttctttccaatatcctcatgacattcaatatttcacttactctaggtcctccctgcctaaggcccaagtcaactttctgtccagtgggatttgtaatccaatacctcctagccctagcagaatcccatgtggataatcagaaatgtgactggaaaaaggacagagctctatggctgtgggtcccagtccccactgctggcagtaagtccccagcagtgagctgtgtaagcaccttacattctgcgcttggttgaaaacagcaaggcaagcatccacttgagaaatgtcaacccctaggaaatcccagcctcaagtctttctcatcccttgggaagtgcaaattggatagagaagaaaccaattaaaaacaaaacaaacaaatcatacttagatattctggcttttctcaccagggctggattaaagcatgtacttcaaaataataacaacttaagtcaataaataaatgtaaggaagtccaaatgttcacctgaagacaactgtggtcattttttggcaatcccaggttctcttttctacctgtttgctcaatcgtggtctccctctccctctcttgttggggcccatgcccctgctttactgttgccagaggcttgtacttgtttgccttttaggtaggagcagttacttccactcccctcacctgccataaagcatctttataaacaaagcaagtagaagaaacacatcctggtatccaccacattcggcttttgttgattctgttcacttgggagcacctgctgctagggaataagaaggttgaggctgaagagtgaggactcttcagctcccctctggcaggacccgggagaggaaagagccctcagctggtccatcctccccactcctggtcagccttctgttctgagatcaaagtggtggggtcacattctcgagaactgtgctcagccccctcatctcacaccctttccctctccctgtgtgcctgcccccctcttacataaccatgctggtgattggcaccgtcataaatcaatactttgctcactttcacatcaagtaacactatccagggaggtggtttcaacaaaggaggaagtataaggagatctaggttcaaattaatgttgcccctagtggtaaaggacagagaccctcagactgatgaaatgcactcagaattacttagacaaagcggatatttgccactctcttccccttttcctgtgtttttgtagtgaagagacctgaaagaaaaaagtagggagaacataatgagaacaaatacggtaatctcttcatttgctagttcaagtgctggacttgggacttaggaggggcaatggagccgcttagtgcctacatctgacttggactgaaatataggtgagagacaagattgtctcatatccggggaaatcataacctatgactaggacgggaagaggaagcactgcctttacttcagtgggaatctcggcctcagcctgcaagccaagtgttcacagtgagaaaagcaagagaataagctaatactcctgtcctgaacaaggcagcggctccttggtaaagctactccttgatcgatcctttgcaccggattgttcaaagtggaccccaggggagaagtcggagcaaagaacttaccaccaagcagtccaagaggcccagaagcaaacctggaggtgagacccaaagaaagctggaaccatgctgactttgtacactgtgaggacacagagtctgttcctggaaagcccagtgtcaacgcagatgaggaagtcggaggtccccaaatctgccgtgtatgtggggacaaggccactggctatcacttcaatgtcatgacatgtgaaggatgcaagggctttttcaggagggccatgaaacgcaacgcccggctgaggtgccccttccggaagggcgcctgcgagatcacccggaagacccggcgacagtgccaggcctgccgcctgcgcaagtgcctggagagcggcatgaagaaggagatgatcatgtccgacgaggccgtggaggagaggcgggccttgatcaagcggaagaaaagtgaacggacagggactcagccactgggagtgcaggggctgacagaggagcagcggatgatgatcagggagctgatggacgctcagatgaaaacctttgacactaccttctcccatttcaagaatttccgggtctctctgcagctgcggggggaggatggcagtgtctggaactacaaacccccagccgacagtggcgggaaagagatcttctccctgctgccccacatggctgacatgtcaacctacatgttcaaaggcatcatcagctttgccaaagtcatctcctacttcagggacttgcccatcgaggaccagatctccctgctgaagggggccgctttcgagctgtgtcaactgagattcaacacagtgttcaacgcggagactggaacctgggagtgtggccggctgtcctactgcttggaagacactgcaggtggcttccagcaacttctactggagcccatgctgaaattccactacatgctgaagaagctgcagctgcatgaggaggagtatgtgctgatgcaggccatctccctcttctccccagaccgcccaggtgtgctgcagcaccgcgtggtggaccagctgcaggagcaattcgccattactctgaagtcctacattgaatgcaatcggccccagcctgctcataggttcttgttcctgaagatcatggctatgctcaccgagctccgcagcatcaatgctcagcacacccagcggctgctgcgcatccaggacatacacccctttgctacgcccctcatgcaggagttgttcggcatcacaggtagctgagcggctgcccttgggtgacacctccgagaggcagccagacccagagccctctgagccgccactcccgggccaagacagatggacactgccaagagccgacaatgccctgctggcctgtctccctagggaattcctgctatgacagctggctagcattcctcaggaaggacatgggtgccccccacccccagttcagtctgtagggagtgaagccacagactcttacgtggagagtgcactgacctgtaggtcaggaccatcagagaggcaaggttgccctttccttttaaaaggccctgtggtctggggagaaatccctcagatcccactaaagtgtcaaggtgtggaagggaccaagcgaccaaggatgggccatctggggtctatgcccacatacccacgtttgttcgcttcctgagtcttttcattgctacctctaatagtcctgtctcccacttcccactcgttcccctcctcttccgagctgctttgtgggctccaggcctgtactcatcggcaggcgcatgagtatctgtgggagtcctctagagagatgagaagccaggaggcctgcaccaaatgtcagaagcttggcatgacctcattccggccacatcattctgtgtctctgcatccatttgaacacattattaagcaccgataataggtagcctgctgtggggtatacagcattgactcagatatagatcctgagctcacagagtttatagttaaaaaaacaaacagaaacacaaacgatttggatcaaaaggagaaatgataagtgacaaaagcagcacaaggaatttccctgtgtggatgctgagctgtgatggcgggcactgggtacccaagtgaaggttcccaaggacatgagtctgtaggagcaagggcacaaactgcagctgtgagtgcgtgtgtgtgatttggtgtaggtaggtctgtttgccacttgatggggcctgggtttgttcctggggctggaatgctgggtatgctctgtgacaaggctacgctgacaatcagttaaacacaccggagaagaaccatttacatgcaccttatatttctgtgtacacatctattctcaaagctaaagggtatgaaagtgcctgccttgtttatagccacttgtgagtaaaaatttttttgcattttcacaaattatactttatataaggcattccacacctaagaactagttttgggaaatgtagccctgggtttaatgtcaaatcaaggcaaaaggaattaaataatgtacttttggcta

SEQ ID NO: 160876 - DNA, 1074 bp, Homo sapiens
  Payload ID: 11434
  Gene Symbol: NR1I3
  Gene Name: nuclear receptor subfamily 1, group I, member 3
  Uniprot ID: Q14994
  ENST ID: ENST00000367979
  CDS Start-End: 1-1074
atggccagtagggaagatgagctgaggaactgtgtggtatgtggggaccaagccacaggctaccactttaatgcgctgacttgtgagggctgcaagggtttcttcaggagaacagtcagcaaaagcattggtcccacctgcccctttgctggaagctgtgaagtcagcaagactcagaggcgccactgcccagcctgcaggttgcagaagtgcttagatgctggcatgaggaaagacatgatactgtcggcagaagccctggcattgcggcgagcaaagcaggcccagcggcgggcacagcaaacacctgtgcaactgagtaaggagcaagaagagctgatccggacactcctgggggcccacacccgccacatgggcaccatgtttgaacagtttgtgcagtttaggcctccagctcatctgttcatccatcaccagcccttgcccaccctggcccctgtgctgcctctggtcacacacttcgcagacatcaacactttcatggtactgcaagtcatcaagtttactaaggacctgcccgtcttccgttccctgcccattgaagaccagatctcccttctcaagggagcagctgtggaaatctgtcacatcgtactcaataccactttctgtctccaaacacaaaacttcctctgcgggcctcttcgctacacaattgaagatggagcccgtgtatctcccacagtggggttccaggtagagtttttggagttgctctttcacttccatggaacactacgaaaactgcagctccaagagcctgagtatgtgctcttggctgccatggccctcttctctcctgctccctatcttacagaccgacctggagttacccagagagatgagattgatcagctgcaagaggagatggcactgactctgcaaagctacatcaagggccagcagcgaaggccccgggatcggtttctgtatgcgaagttgctaggcctgctggctgagctccggagcattaatgaggcctacgggtaccaaatccagcacatccagggcctgtctgccatgatgccgctgctccaggagatctgcagctga

SEQ ID NO: 160877 - DNA, 1403 bp, Homo sapiens
  Payload ID: 11434
  Gene Symbol: NR1I3
  Gene Name: nuclear receptor subfamily 1, group I, member 3
  Uniprot ID: Q14994
  ENST ID: ENST00000367980
  CDS Start-End: 204-1277
ataaaacagacatctcttgttttccagatactacgggtcataatccctaactccaatcactggcaactcctgagatcagaggaaaaccagcaacagcgtgggagtttggggagaggcattccataccagattctgtggcctgcaggtgacatgctgcctaagagaagcaggagtctgtgacagccaccccaacacgtgacgtcatggccagtagggaagatgagctgaggaactgtgtggtatgtggggaccaagccacaggctaccactttaatgcgctgacttgtgagggctgcaagggtttcttcaggagaacagtcagcaaaagcattggtcccacctgcccctttgctggaagctgtgaagtcagcaagactcagaggcgccactgcccagcctgcaggttgcagaagtgcttagatgctggcatgaggaaagacatgatactgtcggcagaagccctggcattgcggcgagcaaagcaggcccagcggcgggcacagcaaacacctgtgcaactgagtaaggagcaagaagagctgatccggacactcctgggggcccacacccgccacatgggcaccatgtttgaacagtttgtgcagtttaggcctccagctcatctgttcatccatcaccagcccttgcccaccctggcccctgtgctgcctctggtcacacacttcgcagacatcaacactttcatggtactgcaagtcatcaagtttactaaggacctgcccgtcttccgttccctgcccattgaagaccagatctcccttctcaagggagcagctgtggaaatctgtcacatcgtactcaataccactttctgtctccaaacacaaaacttcctctgcgggcctcttcgctacacaattgaagatggagcccgtgtatctcccacagtggggttccaggtagagtttttggagttgctctttcacttccatggaacactacgaaaactgcagctccaagagcctgagtatgtgctcttggctgccatggccctcttctctcctgctccctatcttacagaccgacctggagttacccagagagatgagattgatcagctgcaagaggagatggcactgactctgcaaagctacatcaagggccagcagcgaaggccccgggatcggtttctgtatgcgaagttgctaggcctgctggctgagctccggagcattaatgaggcctacgggtaccaaatccagcacatccagggcctgtctgccatgatgccgctgctccaggagatctgcagctgaggccatgctcacttccttccccagctcacctggaacaccctggatacactggagtgggaaaatgctgggaccaaagattgggccgggttcaaagggagcccagtggttgcaatgaaagactaaagc

SEQ ID NO: 160878 - DNA, 1076 bp, Homo sapiens
  Payload ID: 11434
  Gene Symbol: NR1I3
  Gene Name: nuclear receptor subfamily 1, group I, member 3
  Uniprot ID: Q14994
  ENST ID: ENST00000367981
  CDS Start-End: 42-1016
ggagaggcattccataccagattctgtggcctgcaggtgacatgctgcctaagagaagcaggagaacagtcagcaaaagcattggtcccacctgcccctttgctggaagctgtgaagtcagcaagactcagaggcgccactgcccagcctgcaggttgcagaagtgcttagatgctggcatgaggaaagacatgatactgtcggcagaagccctggcattgcggcgagcaaagcaggcccagcggcgggcacagcaaacacctgtgcaactgagtaaggagcaagaagagctgatccggacactcctgggggcccacacccgccacatgggcaccatgtttgaacagtttgtgcagtttaggcctccagctcatctgttcatccatcaccagcccttgcccaccctggcccctgtgctgcctctggtcacacacttcgcagacatcaacactttcatggtactgcaagtcatcaagtttactaaggacctgcccgtcttccgttccctgcccattgaagaccagatctcccttctcaagggagcagctgtggaaatctgtcacatcgtactcaataccactttctgtctccaaacacaaaacttcctctgcgggcctcttcgctacacaattgaagatggagcccgtgtggggttccaggtagagtttttggagttgctctttcacttccatggaacactacgaaaactgcagctccaagagcctgagtatgtgctcttggctgccatggccctcttctctcctgctccctatcttacagaccgacctggagttacccagagagatgagattgatcagctgcaagaggagatggcactgactctgcaaagctacatcaagggccagcagcgaaggccccgggatcggtttctgtatgcgaagttgctaggcctgctggctgagctccggagcattaatgaggcctacgggtaccaaatccagcacatccagggcctgtctgccatgatgccgctgctccaggagatctgcagctgaggccatgctcacttccttccccagctcacctggaacaccctggatacactggagtgggaa

SEQ ID NO: 160879 - DNA, 1322 bp, Homo sapiens
  Payload ID: 11434
  Gene Symbol: NR1I3
  Gene Name: nuclear receptor subfamily 1, group I, member 3
  Uniprot ID: Q14994
  ENST ID: ENST00000367982
  CDS Start-End: 157-1215
taactccaatcactggcaactcctgagatcagaggaaaaccagcaacagcgtgggagtttggggagaggcattccataccagattctgtggcctgcaggtgacatgctgcctaagagaagcaggagtctgtgacagccaccccaacacgtgacgtcatggccagtagggaagatgagctgaggaactgtgtggtatgtggggaccaagccacaggctaccactttaatgcgctgacttgtgagggctgcaagggtttcttcaggagaacagtcagcaaaagcattggtcccacctgcccctttgctggaagctgtgaagtcagcaagactcagaggcgccactgcccagcctgcaggttgcagaagtgcttagatgctggcatgaggaaagacatgatactgtcggcagaagccctggcattgcggcgagcaaagcaggcccagcggcgggcacagcaaacacctgtgcaactgagtaaggagcaagaagagctgatccggacactcctgggggcccacacccgccacatgggcaccatgtttgaacagtttgtgcagtttaggcctccagctcatctgttcatccatcaccagcccttgcccaccctggcccctgtgctgcctctggtcacacacttcgcagacatcaacactttcatggtactgcaagtcatcaagtttactaaggacctgcccgtcttccgttccctgcccattgaagaccagatctcccttctcaagggagcagctgtggaaatctgtcacatcgtactcaataccactttctgtctccaaacacaaaacttcctctgcgggcctcttcgctacacaattgaagatggagcccgtgtatctcccacagtggggttccaggtagagtttttggagttgctctttcacttccatggaacactacgaaaactgcagctccaagagcctgagtatgtgctcttggctgccatggccctcttctctcctgaccgacctggagttacccagagagatgagattgatcagctgcaagaggagatggcactgactctgcaaagctacatcaagggccagcagcgaaggccccgggatcggtttctgtatgcgaagttgctaggcctgctggctgagctccggagcattaatgaggcctacgggtaccaaatccagcacatccagggcctgtctgccatgatgccgctgctccaggagatctgcagctgaggccatgctcacttccttccccagctcacctggaacaccctggatacactggagtgggaaaatgctgggaccaaagattgggccgggttcaaagggagcccagtggt

SEQ ID NO: 160880 - DNA, 1473 bp, Homo sapiens
  Payload ID: 11434
  Gene Symbol: NR1I3
  Gene Name: nuclear receptor subfamily 1, group I, member 3
  Uniprot ID: Q14994
  ENST ID: ENST00000367983
  CDS Start-End: 296-1342
gtcatgctgggaaaacctcccacccaggcctttgccctgagtccagggtctgtgccctaaccccacagtcactgagagcaactggaggccacataaaacagacatctcttgttttccagatactacgggtcataatccctaactccaatcactggcaactcctgagatcagaggaaaaccagcaacagcgtgggagtttggggagaggcattccataccagattctgtggcctgcaggtgacatgctgcctaagagaagcaggagtctgtgacagccaccccaacacgtgacgtcatggccagtagggaagatgagctgaggaactgtgtggtatgtggggaccaagccacaggctaccactttaatgcgctgacttgtgagggctgcaagggtttcttcaggagaacagtcagcaaaagcattggtcccacctgcccctttgctggaagctgtgaagtcagcaagactcagaggcgccactgcccagcctgcaggttgcagaagtgcttagatgctggcatgaggaaagacatgatactgtcggcagaagccctggcattgcggcgagcaaagcaggcccagcggcgggcacagcaaacacctgtgcaactgagtaaggagcaagaagagctgatccggacactcctgggggcccacacccgccacatgggcaccatgtttgaacagtttgtgcagtttaggcctccagctcatctgttcatccatcaccagcccttgcccaccctggcccctgtgctgcctctggtcacacacttcgcagacatcaacactttcatggtactgcaagtcatcaagtttactaaggacctgcccgtcttccgttccctgcccattgaagaccagatctcccttctcaagggagcagctgtggaaatctgtcacatcgtactcaataccactttctgtctccaaacacaaaacttcctctgcgggcctcttcgctacacaattgaagatggagcccgtgtggggttccaggtagagtttttggagttgctctttcacttccatggaacactacgaaaactgcagctccaagagcctgagtatgtgctcttggctgccatggccctcttctctcctgaccgacctggagttacccagagagatgagattgatcagctgcaagaggagatggcactgactctgcaaagctacatcaagggccagcagcgaaggccccgggatcggtttctgtatgcgaagttgctaggcctgctggctgagctccggagcattaatgaggcctacgggtaccaaatccagcacatccagggcctgtctgccatgatgccgctgctccaggagatctgcagctgaggccatgctcacttccttccccagctcacctggaacaccctggatacactggagtgggaaaatgctgggaccaaagattgggccgggttcaaagggagcccagtggttgcaatgaaagactaaagcaataa

SEQ ID NO: 160881 - DNA, 1059 bp, Homo sapiens
  Payload ID: 11434
  Gene Symbol: NR1I3
  Gene Name: nuclear receptor subfamily 1, group I, member 3
  Uniprot ID: Q14994
  ENST ID: ENST00000367984
  CDS Start-End: 105-1034
gggagtttggggagaggcattccataccagattctgtggcctgcaggtgacatgctgcctaagagaagcaggagtctgtgacagccaccccaacacgtgacgtcatggccagtagggaagatgagctgaggaactgtgtggtatgtggggaccaagccacaggctaccactttaatgcgctgacttgtgagggctgcaagggtttcttcaggagaacagtcagcaaaagcattggtcccacctgcccctttgctggaagctgtgaagtcagcaagactcagaggcgccactgcccagcctgcaggttgcagaagtgcttagatgctggcatgaggaaagacatgatactgtcggcagaagccctggcattgcggcgagcaaagcaggcccagcggcgggcacagcaaacacctgtgcaactgagtaaggagcaagaagagctgatccggacactcctgggggcccacacccgccacatgggcaccatgtttgaacagtttgtgcagtttaggcctccagctcatctgttcatccatcaccagcccttgcccaccctggcccctgtgctgcctctggtcacacacttcgcagacatcaacactttcatggtactgcaagtcatcaagtttactaaggacctgcccgtcttccgttccctgcccattgaagaccagatctcccttctcaagggagcagctgtggaaatctgtcacatcgtactcaataccactttctgtctccaaacacaaaacttcctctgcgggcctcttcgctacacaattgaagatggagcccgtgaccgacctggagttacccagagagatgagattgatcagctgcaagaggagatggcactgactctgcaaagctacatcaagggccagcagcgaaggccccgggatcggtttctgtatgcgaagttgctaggcctgctggctgagctccggagcattaatgaggcctacgggtaccaaatccagcacatccagggcctgtctgccatgatgccgctgctccaggagatctgcagctgaggccatgctcacttccttccccagc

SEQ ID NO: 160882 - DNA, 1074 bp, Homo sapiens
  Payload ID: 11434
  Gene Symbol: NR1I3
  Gene Name: nuclear receptor subfamily 1, group I, member 3
  Uniprot ID: Q14994
  ENST ID: ENST00000367985
  CDS Start-End: 105-1049
gggagtttggggagaggcattccataccagattctgtggcctgcaggtgacatgctgcctaagagaagcaggagtctgtgacagccaccccaacacgtgacgtcatggccagtagggaagatgagctgaggaactgtgtggtatgtggggaccaagccacaggctaccactttaatgcgctgacttgtgagggctgcaagggtttcttcaggagaacagtcagcaaaagcattggtcccacctgcccctttgctggaagctgtgaagtcagcaagactcagaggcgccactgcccagcctgcaggttgcagaagtgcttagatgctggcatgaggaaagacatgatactgtcggcagaagccctggcattgcggcgagcaaagcaggcccagcggcgggcacagcaaacacctgtgcaactgagtaaggagcaagaagagctgatccggacactcctgggggcccacacccgccacatgggcaccatgtttgaacagtttgtgcagtttaggcctccagctcatctgttcatccatcaccagcccttgcccaccctggcccctgtgctgcctctggtcacacacttcgcagacatcaacactttcatggtactgcaagtcatcaagtttactaaggacctgcccgtcttccgttccctgcccattgaagaccagatctcccttctcaagggagcagctgtggaaatctgtcacatcgtactcaataccactttctgtctccaaacacaaaacttcctctgcgggcctcttcgctacacaattgaagatggagcccgtgctccctatcttacagaccgacctggagttacccagagagatgagattgatcagctgcaagaggagatggcactgactctgcaaagctacatcaagggccagcagcgaaggccccgggatcggtttctgtatgcgaagttgctaggcctgctggctgagctccggagcattaatgaggcctacgggtaccaaatccagcacatccagggcctgtctgccatgatgccgctgctccaggagatctgcagctgaggccatgctcacttccttccccagc

SEQ ID NO: 160883 - DNA, 989 bp, Homo sapiens
  Payload ID: 11434
  Gene Symbol: NR1I3
  Gene Name: nuclear receptor subfamily 1, group I, member 3
  Uniprot ID: Q14994
  ENST ID: ENST00000412844
  CDS Start-End: 42-989
ggagaggcattccataccagattctgtggcctgcaggtgacatgctgcctaagagaagcaggagaacagtcagcaaaagcattggtcccacctgcccctttgctggaagctgtgaagtcagcaagactcagaggcgccactgcccagcctgcaggttgcagaagtgcttagatgctggcatgaggaaagacatgatactgtcggcagaagccctggcattgcggcgagcaaagcaggcccagcggcgggcacagcaaacacctgtgcaactgagtaaggagcaagaagagctgatccggacactcctgggggcccacacccgccacatgggcaccatgtttgaacagtttgtgcagtttaggcctccagctcatctgttcatccatcaccagcccttgcccaccctggcccctgtgctgcctctggtcacacacttcgcagacatcaacactttcatggtactgcaagtcatcaagtttactaaggacctgcccgtcttccgttccctgcccattgaagaccagatctcccttctcaagggagcagctgtggaaatctgtcacatcgtactcaataccactttctgtctccaaacacaaaacttcctctgcgggcctcttcgctacacaattgaagatggagcccgtgtatctcccacagtggggttccaggtagagtttttggagttgctctttcacttccatggaacactacgaaaactgcagctccaagagcctgagtatgtgctcttggctgccatggccctcttctctcctgctccctatcttacagaccgacctggagttacccagagagatgagattgatcagctgcaagaggagatggcactgactctgcaaagctacatcaagggccagcagcgaaggccccgggatcgctcacctggaacaccctggatacactggagtgggaaaatgctgggaccaaagattgggccgggttcaaagggagcccagtggttgcaatga

SEQ ID NO: 160884 - DNA, 1114 bp, Homo sapiens
  Payload ID: 11434
  Gene Symbol: NR1I3
  Gene Name: nuclear receptor subfamily 1, group I, member 3
  Uniprot ID: Q14994
  ENST ID: ENST00000442691
  CDS Start-End: 95-1114
ggagaggcattccataccagattctgtggcctgcaggtgacatgctgcctaagagaagcaggagtctgtgacagccaccccaacacgtgacgtcatggccagtagggaagatgagctgaggaactgtgtggtatgtggggaccaagccacaggctaccactttaatgcgctgacttgtgagggctgcaagggtttcttcaggagaacagtcagcaaaagcattggtcccacctgcccctttgctggaagctgtgaagtcagcaagactcagaggcgccactgcccagcctgcaggttgcagaagtgcttagatgctggcatgaggaaagacatgatactgtcggcagaagccctggcattgcggcgagcaaagcaggcccagcggcgggcacagcaaacacctgtgcaactgagtaaggagcaagaagagctgatccggacactcctgggggcccacacccgccacatgggcaccatgtttgaacagtttgtgcagtttaggcctccagctcatctgttcatccatcaccagcccttgcccaccctggcccctgtgctgcctctggtcacacacttcgcagacatcaacactttcatggtactgcaagtcatcaagtttactaaggacctgcccgtcttccgttccctgcccattgaagaccagatctcccttctcaagggagcagctgtggaaatctgtcacatcgtactcaataccactttctgtctccaaacacaaaacttcctctgcgggcctcttcgctacacaattgaagatggagcccgtgtatctcccacagtggggttccaggtagagtttttggagttgctctttcacttccatggaacactacgaaaactgcagctccaagagcctgagtatgtgctcttggctgccatggccctcttctctcctgaccgacctggagttacccagagagatgagattgatcagctgcaagaggagatggcactgactctgcaaagctacatcaagggccagcagcgaaggccccgggatcgctcacctggaacaccctggatacactggagtgggaaaatgctgggaccaaagattgggccgggttcaaagggagcccagtggttgcaatga

SEQ ID NO: 160885 - DNA, 973 bp, Homo sapiens
  Payload ID: 11434
  Gene Symbol: NR1I3
  Gene Name: nuclear receptor subfamily 1, group I, member 3
  Uniprot ID: Q14994
  ENST ID: ENST00000437437
  CDS Start-End: 42-962
ggagaggcattccataccagattctgtggcctgcaggtgacatgctgcctaagagaagcaggagaacagtcagcaaaagcattggtcccacctgcccctttgctggaagctgtgaagtcagcaagactcagaggcgccactgcccagcctgcaggttgcagaagtgcttagatgctggcatgaggaaagacatgatactgtcggcagaagccctggcattgcggcgagcaaagcaggcccagcggcgggcacagcaaacacctgtgcaactgagtaaggagcaagaagagctgatccggacactcctgggggcccacacccgccacatgggcaccatgtttgaacagtttgtgcagtttaggcctccagctcatctgttcatccatcaccagcccttgcccaccctggcccctgtgctgcctctggtcacacacttcgcagacatcaacactttcatggtactgcaagtcatcaagtttactaaggacctgcccgtcttccgttccctgcccattgaagaccagatctcccttctcaagggagcagctgtggaaatctgtcacatcgtactcaataccactttctgtctccaaacacaaaacttcctctgcgggcctcttcgctacacaattgaagatggagcccgtgtggggttccaggtagagtttttggagttgctctttcacttccatggaacactacgaaaactgcagctccaagagcctgagtatgtgctcttggctgccatggccctcttctctcctgaccgacctggagttacccagagagatgagattgatcagctgcaagaggagatggcactgactctgcaaagctacatcaagggccagcagcgaaggccccgggatcgctcacctggaacaccctggatacactggagtgggaaaatgctgggaccaaagattgggccgggttcaaagggagcccagtggttgcaatgaaagactaaagc

SEQ ID NO: 160886 - DNA, 1117 bp, Homo sapiens
  Payload ID: 11434
  Gene Symbol: NR1I3
  Gene Name: nuclear receptor subfamily 1, group I, member 3
  Uniprot ID: Q14994
  ENST ID: ENST00000428574
  CDS Start-End: 95-1117
ggagaggcattccataccagattctgtggcctgcaggtgacatgctgcctaagagaagcaggagtctgtgacagccaccccaacacgtgacgtcatggccagtagggaagatgagctgaggaactgtgtggtatgtggggaccaagccacaggctaccactttaatgcgctgacttgtgagggctgcaagggtttcttcaggagaacagtcagcaaaagcattggtcccacctgcccctttgctggaagctgtgaagtcagcaagactcagaggcgccactgcccagcctgcaggttgcagaagtgcttagatgctggcatgaggaaagacatgatactgtcggcagaagccctggcattgcggcgagcaaagcaggcccagcggcgggcacagcaaacacctgtgcaactgagtaaggagcaagaagagctgatccggacactcctgggggcccacacccgccacatgggcaccatgtttgaacagtttgtgcagtttaggcctccagctcatctgttcatccatcaccagcccttgcccaccctggcccctgtgctgcctctggtcacacacttcgcagacatcaacactttcatggtactgcaagtcatcaagtttactaaggacctgcccgtcttccgttccctgcccattgaagaccagatctcccttctcaagggagcagctgtggaaatctgtcacatcgtactcaataccactttctgtctccaaacacaaaacttcctctgcgggcctcttcgctacacaattgaagatggagcccgtgtggggttccaggtagagtttttggagttgctctttcacttccatggaacactacgaaaactgcagctccaagagcctgagtatgtgctcttggctgccatggccctcttctctcctgctccctatcttacagaccgacctggagttacccagagagatgagattgatcagctgcaagaggagatggcactgactctgcaaagctacatcaagggccagcagcgaaggccccgggatcgctcacctggaacaccctggatacactggagtgggaaaatgctgggaccaaagattgggccgggttcaaagggagcccagtggttgcaatga

SEQ ID NO: 160887 - DNA, 774 bp, Homo sapiens
  Payload ID: 11434
  Gene Symbol: NR1I3
  Gene Name: nuclear receptor subfamily 1, group I, member 3
  ENST ID: ENST00000502985
  CDS Start-End: 95-538
ggagaggcattccataccagattctgtggcctgcaggtgacatgctgcctaagagaagcaggagtctgtgacagccaccccaacacgtgacgtcatggccagtagggaagatgagctgaggaactgtgtggtatgtggggaccaagccacaggctaccactttaatgcgctgacttgtgagggctgcaagggtttcttcaggagaacagtcagcaaaagcattggtcccacctgcccctttgctggaagctgtgaagtcagcaagactcagaggcgccactgcccagcctgcaggttgcagaagtgcttagatgctggcatgaggaaagacattccctgcccattgaagaccagatctcccttctcaagggagcagctgtggaaatctgtcacatcgtactcaataccactttctgtctccaaacacaaaacttcctctgcgggcctcttcgctacacaattgaagatggagcccgtgaccgacctggagttacccagagagatgagattgatcagctgcaagaggagatggcactgactctgcaaagctacatcaagggccagcagcgaaggccccgggatcggtttctgtatgcgaagttgctaggcctgctggctgagctccggagcattaatgaggcctacgggtaccaaatccagcacatccagggcctgtctgccatgatgccgctgctccaggagatctgcagctgaggccatgctcacttccttccccagctcacctggaacaccctggatacactggagtgggaa

SEQ ID NO: 160888 - DNA, 1130 bp, Homo sapiens
  Payload ID: 11434
  Gene Symbol: NR1I3
  Gene Name: nuclear receptor subfamily 1, group I, member 3
  ENST ID: ENST00000515621
  CDS Start-End: 249-1070
ggagaggcattccataccagattctgtggcctgcaggtgacatgctgcctaagagaagcaggagtctgtgacagccaccccaacacgtgacgtcatggccagtagggaagatgagctgaggaactgtgtggagaacagtcagcaaaagcattggtcccacctgcccctttgctggaagctgtgaagtcagcaagactcagaggcgccactgcccagcctgcaggttgcagaagtgcttagatgctggcatgaggaaagacatgatactgtcggcagaagccctggcattgcggcgagcaaagcaggcccagcggcgggcacagcaaacacctgtgcaactgagtaaggagcaagaagagctgatccggacactcctgggggcccacacccgccacatgggcaccatgtttgaacagtttgtgcagtttaggcctccagctcatctgttcatccatcaccagcccttgcccaccctggcccctgtgctgcctctggtcacacacttcgcagacatcaacactttcatggtactgcaagtcatcaagtttactaaggacctgcccgtcttccgttccctgcccattgaagaccagatctcccttctcaagggagcagctgtggaaatctgtcacatcgtactcaataccactttctgtctccaaacacaaaacttcctctgcgggcctcttcgctacacaattgaagatggagcccgtgtggggttccaggtagagtttttggagttgctctttcacttccatggaacactacgaaaactgcagctccaagagcctgagtatgtgctcttggctgccatggccctcttctctcctgaccgacctggagttacccagagagatgagattgatcagctgcaagaggagatggcactgactctgcaaagctacatcaagggccagcagcgaaggccccgggatcggtttctgtatgcgaagttgctaggcctgctggctgagctccggagcattaatgaggcctacgggtaccaaatccagcacatccagggcctgtctgccatgatgccgctgctccaggagatctgcagctgaggccatgctcacttccttccccagctcacctggaacaccctggatacactggagtgggaa

SEQ ID NO: 160889 - DNA, 634 bp, Homo sapiens
  Payload ID: 11434
  Gene Symbol: NR1I3
  Gene Name: nuclear receptor subfamily 1, group I, member 3
  ENST ID: ENST00000508387
  CDS Start-End: 42-398
ggagaggcattccataccagattctgtggcctgcaggtgacatgctgcctaagagaagcaggagaacagtcagcaaaagcattggtcccacctgcccctttgctggaagctgtgaagtcagcaagactcagaggcgccactgcccagcctgcaggttgcagaagtgcttagatgctggcatgaggaaagacattccctgcccattgaagaccagatctcccttctcaagggagcagctgtggaaatctgtcacatcgtactcaataccactttctgtctccaaacacaaaacttcctctgcgggcctcttcgctacacaattgaagatggagcccgtgaccgacctggagttacccagagagatgagattgatcagctgcaagaggagatggcactgactctgcaaagctacatcaagggccagcagcgaaggccccgggatcggtttctgtatgcgaagttgctaggcctgctggctgagctccggagcattaatgaggcctacgggtaccaaatccagcacatccagggcctgtctgccatgatgccgctgctccaggagatctgcagctgaggccatgctcacttccttccccagctcacctggaacaccctggatacactggagtgggaa

SEQ ID NO: 160890 - DNA, 891 bp, Homo sapiens
  Payload ID: 11434
  Gene Symbol: NR1I3
  Gene Name: nuclear receptor subfamily 1, group I, member 3
  ENST ID: ENST00000512340
  CDS Start-End: 42-314
ggagaggcattccataccagattctgtggcctgcaggtgacatgctgcctaagagaagcaggagaacagtcagcaaaagcattggtcccacctgcccctttgctggaagctgtgaagtcagcaagactcagaggcgccactgcccagcctgcaggttgcagaagtgcttagatgctggcatgaggaaagacacctccagctcatctgttcatccatcaccagcccttgcccaccctggcccctgtgctgcctctggtcacacacttcgcagacatcaacactttcatggtactgcaagtcatcaagtttactaaggacctgcccgtcttccgttccctgcccattgaagaccagatctcccttctcaagggagcagctgtggaaatctgtcacatcgtactcaataccactttctgtctccaaacacaaaacttcctctgcgggcctcttcgctacacaattgaagatggagcccgtgtggggttccaggtagagtttttggagttgctctttcacttccatggaacactacgaaaactgcagctccaagagcctgagtatgtgctcttggctgccatggccctcttctctcctgaccgacctggagttacccagagagatgagattgatcagctgcaagaggagatggcactgactctgcaaagctacatcaagggccagcagcgaaggccccgggatcggtttctgtatgcgaagttgctaggcctgctggctgagctccggagcattaatgaggcctacgggtaccaaatccagcacatccagggcctgtctgccatgatgccgctgctccaggagatctgcagctgaggccatgctcacttccttccccagctcacctggaacaccctggatacactggagtgggaa

SEQ ID NO: 160891 - DNA, 1441 bp, Homo sapiens
  Payload ID: 11434
  Gene Symbol: NR1I3
  Gene Name: nuclear receptor subfamily 1, group I, member 3
  ENST ID: ENST00000506209
  CDS Start-End: 144-1037
agacatctcttgttttccagatactacgggtcataatccctaactccaatcactggcaactcctgagatcagaggaaaaccagcaacagcgtgggagtttggggagaggcattccataccagattctgtggcctgcaggtgacatgctgcctaagagaagcaggagaacagtcagcaaaagcattggtcccacctgcccctttgctggaagctgtgaagtcagcaagactcagaggcgccactgcccagcctgcaggttgcagaagtgcttagatgctggcatgaggaaagacatgatactgtcggcagaagccctggcattgcggcgagcaaagcaggcccagcggcgggcacagcaaacacctgtgcaactgagtaaggagcaagaagagctgatccggacactcctgggggcccacacccgccacatgggcaccatgtttgaacagtttgtgcagtttaggcctccagctcatctgttcatccatcaccagcccttgcccaccctggcccctgtgctgcctctggtcacacacttcgcagacatcaacactttcatggtactgcaagtcatcaagtttactaaggacctgcccgtcttccgttccctgcccattgaagaccagatctcccttctcaagggagcagctgtggaaatctgtcacatcgtactcaataccactttctgtctccaaacacaaaacttcctctgcgggcctcttcgctacacaattgaagatggagcccgtgtggggttccaggtagagtttttggagttgctctttcacttccatggaacactacgaaaactgcagctccaagagcctgagtatgtgctcttggctgccatggccctcttctctcctgaccgacctggagttacccagagagatgagattgatcagctgcaagaggagatggcactgactctgcaaagctacatcaagggccagcagcgaaggccccgggatcggtacggtgggacactgagggcttggaggccacaccagggcaggaaggggttggtgaaacattgagcttgggaggaatgtttttttactgtcctttccttagggaattcaggtatcgtggggtctagtccttccccctggccatccctgtctcacatcgtttcagcatccaaattgctgtatttggatactgctgtttcatctcactttttccagattttttttttattcagtacagatgcaaagtagtagctcagaggctctgggtaatagcattcctgagattgatgacatccattacctcactagtccaacttctccagactaacgcagacttttctcttcccttggcctttcctctcctcgccattgggccaattccttcgatttctcatttcccttgaagttagggccattcacagtttcatggtcaaagccagttccaggttcaatagtctgtgatttatcca

SEQ ID NO: 160892 - DNA, 977 bp, Homo sapiens
  Payload ID: 11434
  Gene Symbol: NR1I3
  Gene Name: nuclear receptor subfamily 1, group I, member 3
  Uniprot ID: Q14994
  ENST ID: ENST00000508740
  CDS Start-End: 42-977
ggagaggcattccataccagattctgtggcctgcaggtgacatgctgcctaagagaagcaggagaacagtcagcaaaagcattggtcccacctgcccctttgctggaagctgtgaagtcagcaagactcagaggcgccactgcccagcctgcaggttgcagaagtgcttagatgctggcatgaggaaagacatgatactgtcggcagaagccctggcattgcggcgagcaaagcaggcccagcggcgggcacagcaaacacctgtgcaactgagtaaggagcaagaagagctgatccggacactcctgggggcccacacccgccacatgggcaccatgtttgaacagtttgtgcagtttaggcctccagctcatctgttcatccatcaccagcccttgcccaccctggcccctgtgctgcctctggtcacacacttcgcagacatcaacactttcatggtactgcaagtcatcaagtttactaaggacctgcccgtcttccgttccctgcccattgaagaccagatctcccttctcaagggagcagctgtggaaatctgtcacatcgtactcaataccactttctgtctccaaacacaaaacttcctctgcgggcctcttcgctacacaattgaagatggagcccgtgtggggttccaggtagagtttttggagttgctctttcacttccatggaacactacgaaaactgcagctccaagagcctgagtatgtgctcttggctgccatggccctcttctctcctgctccctatcttacagaccgacctggagttacccagagagatgagattgatcagctgcaagaggagatggcactgactctgcaaagctacatcaagggccagcagcgaaggccccgggatcgctcacctggaacaccctggatacactggagtgggaaaatgctgggaccaaagattgggccgggttcaaagggagcccagtggttgcaatga

SEQ ID NO: 160893 - DNA, 944 bp, Homo sapiens
  Payload ID: 11434
  Gene Symbol: NR1I3
  Gene Name: nuclear receptor subfamily 1, group I, member 3
  Uniprot ID: Q14994
  ENST ID: ENST00000504010
  CDS Start-End: 42-884
ggagaggcattccataccagattctgtggcctgcaggtgacatgctgcctaagagaagcaggagaacagtcagcaaaagcattggtcccacctgcccctttgctggaagctgtgaagtcagcaagactcagaggcgccactgcccagcctgcaggttgcagaagtgcttagatgctggcatgaggaaagacatgatactgtcggcagaagccctggcattgcggcgagcaaagcaggcccagcggcgggcacagcaaacacctgtgcaactgagtaaggagcaagaagagctgatccggacactcctgggggcccacacccgccacatgggcaccatgtttgaacagtttgtgcagtttaggcctccagctcatctgttcatccatcaccagcccttgcccaccctggcccctgtgctgcctctggtcacacacttcgcagacatcaacactttcatggtactgcaagtcatcaagtttactaaggacctgcccgtcttccgttccctgcccattgaagaccagatctcccttctcaagggagcagctgtggaaatctgtcacatcgtactcaataccactttctgtctccaaacacaaaacttcctctgcgggcctcttcgctacacaattgaagatggagcccgtgaccgacctggagttacccagagagatgagattgatcagctgcaagaggagatggcactgactctgcaaagctacatcaagggccagcagcgaaggccccgggatcggtttctgtatgcgaagttgctaggcctgctggctgagctccggagcattaatgaggcctacgggtaccaaatccagcacatccagggcctgtctgccatgatgccgctgctccaggagatctgcagctgaggccatgctcacttccttccccagctcacctggaacaccctggatacactggagtgggaa

SEQ ID NO: 160894 - DNA, 1380 bp, Homo sapiens
  Payload ID: 11434
  Gene Symbol: NR1I3
  Gene Name: nuclear receptor subfamily 1, group I, member 3
  ENST ID: ENST00000506018
  CDS Start-End: 104-928
taactccaatcactggcaactcctgagatcagaggaaaaccagcaacagcgtgggagtttggggagaggcattccataccagattctgtggcctgcaggtgacatgctgcctaagagaagcaggagaacagtcagcaaaagcattggtcccacctgcccctttgctggaagctgtgaagtcagcaagactcagaggcgccactgcccagcctgcaggttgcagaagtgcttagatgctggcatgaggaaagacatgatactgtcggcagaagccctggcattgcggcgagcaaagcaggcccagcggcgggcacagcaaacacctgtgcaactgagtaaggagcaagaagagctgatccggacactcctgggggcccacacccgccacatgggcaccatgtttgaacagtttgtgcagtttaggcctccagctcatctgttcatccatcaccagcccttgcccaccctggcccctgtgctgcctctggtcacacacttcgcagacatcaacactttcatggtactgcaagtcatcaagtttactaaggacctgcccgtcttccgttccctgcccattgaagaccagatctcccttctcaagggagcagctgtggaaatctgtcacatcgtactcaataccactttctgtctccaaacacaaaacttcctctgcgggcctcttcgctacacaattgaagatggagcccgtgtatctcccacagtggggttccaggtagagtttttggagttgctctttcacttccatggaacactacgaaaactgcagctccaagagcctgagtatgtgctcttggctgccatggccctcttctctcctggtgagcacctcccaaagcccagagccttttgctgcaccacctctgcccaaatactcagctccttgagtccatccacccaggccttctagcctagctatcaaacctgcagactaggtctatcccagcctcagtccccggggcaccacgcaggcccacccctgccacccaacttgtccttcccagctccctatcttacagaccgacctggagttacccagagagatgagattgatcagctgcaagaggagatggcactgactctgcaaagctacatcaagggccagcagcgaaggccccgggatcggtttctgtatgcgaagttgctaggcctgctggctgagctccggagcattaatgaggcctacgggtaccaaatccagcacatccagggcctgtctgccatgatgccgctgctccaggagatctgcagctgaggccatgctcacttccttccccagctcacctggaacaccctggatacactggagtgggaaaatgctgggaccaaagattgggccgggttcaaagggagcccagtggt

SEQ ID NO: 160895 - DNA, 985 bp, Homo sapiens
  Payload ID: 11434
  Gene Symbol: NR1I3
  Gene Name: nuclear receptor subfamily 1, group I, member 3
  Uniprot ID: Q14994
  ENST ID: ENST00000505005
  CDS Start-End: 95-985
ggagaggcattccataccagattctgtggcctgcaggtgacatgctgcctaagagaagcaggagtctgtgacagccaccccaacacgtgacgtcatggccagtagggaagatgagctgaggaactgtgtggtatgtggggaccaagccacaggctaccactttaatgcgctgacttgtgagggctgcaagggtttcttcaggagaacagtcagcaaaagcattggtcccacctgcccctttgctggaagctgtgaagtcagcaagactcagaggcgccactgcccagcctgcaggttgcagaagtgcttagatgctggcatgaggaaagacatgatactgtcggcagaagccctggcattgcggcgagcaaagcaggcccagcggcgggcacagcaaacacctgtgcaactgagtaaggagcaagaagagctgatccggacactcctgggggcccacacccgccacatgggcaccatgtttgaacagtttgtgcagtttaggcctccagctcatctgttcatccatcaccagcccttgcccaccctggcccctgtgctgcctctggtcacacacttcgcagacatcaacactttcatggtactgcaagtcatcaagtttactaaggacctgcccgtcttccgttccctgcccattgaagaccagatctcccttctcaagggagcagctgtggaaatctgtcacatcgtactcaataccactttctgtctccaaacacaaaacttcctctgcgggcctcttcgctacacaattgaagatggagcccgtgaccgacctggagttacccagagagatgagattgatcagctgcaagaggagatggcactgactctgcaaagctacatcaagggccagcagcgaaggccccgggatcgctcacctggaacaccctggatacactggagtgggaaaatgctgggaccaaagattgggccgggttcaaagggagcccagtggttgcaatga

SEQ ID NO: 160896 - DNA, 861 bp, Homo sapiens
  Payload ID: 11434
  Gene Symbol: NR1I3
  Gene Name: nuclear receptor subfamily 1, group I, member 3
  Uniprot ID: Q14994
  ENST ID: ENST00000512372
  CDS Start-End: 42-845
ggagaggcattccataccagattctgtggcctgcaggtgacatgctgcctaagagaagcaggagaacagtcagcaaaagcattggtcccacctgcccctttgctggaagctgtgaagtcagcaagactcagaggcgccactgcccagcctgcaggttgcagaagtgcttagatgctggcatgaggaaagacatgatactgtcggcagaagccctggcattgcggcgagcaaagcaggcccagcggcgggcacagcaaacacctgtgcaactgagtaaggagcaagaagagctgatccggacactcctgggggcccacacccgccacatgggcaccatgtttgaacagtttgtgcagtttaggcctccagctcatctgttcatccatcaccagcccttgcccaccctggcccctgtgctgcctctggtcacacacttcgcagacatcaacactttcatggtactgcaagtcatcaagtttactaaggacctgcccgtcttccgttccctgcccattgaagaccagatctcccttctcaagggagcagctgtggaaatctgtcacatcgtactcaataccactttctgtctccaaacacaaaacttcctctgcgggcctcttcgctacacaattgaagatggagcccgtgaccgacctggagttacccagagagatgagattgatcagctgcaagaggagatggcactgactctgcaaagctacatcaagggccagcagcgaaggccccgggatcgctcacctggaacaccctggatacactggagtgggaaaatgctgggaccaaagattgggccgggttcaaagggagcccagtggttgcaatgaaagactaaagcaataa

SEQ ID NO: 160897 - DNA, 774 bp, Homo sapiens
  Payload ID: 11434
  Gene Symbol: NR1I3
  Gene Name: nuclear receptor subfamily 1, group I, member 3
  ENST ID: ENST00000510951
  CDS Start-End: 42-314
ggagaggcattccataccagattctgtggcctgcaggtgacatgctgcctaagagaagcaggagaacagtcagcaaaagcattggtcccacctgcccctttgctggaagctgtgaagtcagcaagactcagaggcgccactgcccagcctgcaggttgcagaagtgcttagatgctggcatgaggaaagacacctccagctcatctgttcatccatcaccagcccttgcccaccctggcccctgtgctgcctctggtcacacacttcgcagacatcaacactttcatggtactgcaagtcatcaagtttactaaggacctgcccgtcttccgttccctgcccattgaagaccagatctcccttctcaagggagcagctgtggaaatctgtcacatcgtactcaataccactttctgtctccaaacacaaaacttcctctgcgggcctcttcgctacacaattgaagatggagcccgtgaccgacctggagttacccagagagatgagattgatcagctgcaagaggagatggcactgactctgcaaagctacatcaagggccagcagcgaaggccccgggatcggtttctgtatgcgaagttgctaggcctgctggctgagctccggagcattaatgaggcctacgggtaccaaatccagcacatccagggcctgtctgccatgatgccgctgctccaggagatctgcagctgaggccatgctcacttccttccccagctcacctggaacaccctggatacactggagtgggaa

SEQ ID NO: 160898 - DNA, 620 bp, Homo sapiens
  Payload ID: 11434
  Gene Symbol: NR1I3
  Gene Name: nuclear receptor subfamily 1, group I, member 3
  ENST ID: ENST00000507215
  CDS Start-End: 42-314
ggagaggcattccataccagattctgtggcctgcaggtgacatgctgcctaagagaagcaggagaacagtcagcaaaagcattggtcccacctgcccctttgctggaagctgtgaagtcagcaagactcagaggcgccactgcccagcctgcaggttgcagaagtgcttagatgctggcatgaggaaagacacctccagctcatctgttcatccatcaccagcccttgcccaccctggcccctgtgctgcctctggtcacacacttcgcagacatcaacactttcatggtactgcaagtcatcaagtttactaaggacctgcccgtcttccgttccctgcccattgaagaccagatctcccttctcaagggagcagctgtggaaatctgtcacatcgtactcaataccactttctgtctccaaacacaaaacttcctctgcgggcctcttcgctacacaattgaagatggagcccgtgaccgacctggagttacccagagagatgagattgatcagctgcaagaggagatggcactgactctgcaaagctacatcaagggccagcagcgaaggccccgggatcgctcacctggaacaccctggatacactggagtgggaa

SEQ ID NO: 160899 - DNA, 914 bp, Homo sapiens
  Payload ID: 11434
  Gene Symbol: NR1I3
  Gene Name: nuclear receptor subfamily 1, group I, member 3
  ENST ID: ENST00000502848
  CDS Start-End: 95-454
ggagaggcattccataccagattctgtggcctgcaggtgacatgctgcctaagagaagcaggagtctgtgacagccaccccaacacgtgacgtcatggccagtagggaagatgagctgaggaactgtgtggtatgtggggaccaagccacaggctaccactttaatgcgctgacttgtgagggctgcaagggtttcttcaggagaacagtcagcaaaagcattggtcccacctgcccctttgctggaagctgtgaagtcagcaagactcagaggcgccactgcccagcctgcaggttgcagaagtgcttagatgctggcatgaggaaagacacctccagctcatctgttcatccatcaccagcccttgcccaccctggcccctgtgctgcctctggtcacacacttcgcagacatcaacactttcatggtactgcaagtcatcaagtttactaaggacctgcccgtcttccgttccctgcccattgaagaccagatctcccttctcaagggagcagctgtggaaatctgtcacatcgtactcaataccactttctgtctccaaacacaaaacttcctctgcgggcctcttcgctacacaattgaagatggagcccgtgaccgacctggagttacccagagagatgagattgatcagctgcaagaggagatggcactgactctgcaaagctacatcaagggccagcagcgaaggccccgggatcggtttctgtatgcgaagttgctaggcctgctggctgagctccggagcattaatgaggcctacgggtaccaaatccagcacatccagggcctgtctgccatgatgccgctgctccaggagatctgcagctgaggccatgctcacttccttccccagctcacctggaacaccctggatacactggagtgggaa

SEQ ID NO: 160900 - DNA, 620 bp, Homo sapiens
  Payload ID: 11434
  Gene Symbol: NR1I3
  Gene Name: nuclear receptor subfamily 1, group I, member 3
  ENST ID: ENST00000511944
  CDS Start-End: 95-538
ggagaggcattccataccagattctgtggcctgcaggtgacatgctgcctaagagaagcaggagtctgtgacagccaccccaacacgtgacgtcatggccagtagggaagatgagctgaggaactgtgtggtatgtggggaccaagccacaggctaccactttaatgcgctgacttgtgagggctgcaagggtttcttcaggagaacagtcagcaaaagcattggtcccacctgcccctttgctggaagctgtgaagtcagcaagactcagaggcgccactgcccagcctgcaggttgcagaagtgcttagatgctggcatgaggaaagacattccctgcccattgaagaccagatctcccttctcaagggagcagctgtggaaatctgtcacatcgtactcaataccactttctgtctccaaacacaaaacttcctctgcgggcctcttcgctacacaattgaagatggagcccgtgaccgacctggagttacccagagagatgagattgatcagctgcaagaggagatggcactgactctgcaaagctacatcaagggccagcagcgaaggccccgggatcgctcacctggaacaccctggatacactggagtgggaa

SEQ ID NO: 160901 - DNA, 1093 bp, Homo sapiens
  Payload ID: 11434
  Gene Symbol: NR1I3
  Gene Name: nuclear receptor subfamily 1, group I, member 3
  ENST ID: ENST00000515452
  CDS Start-End: 238-954
aaccccacagtcactgagagcaactggaggccacataaaacagacatctcttgttttccagatactacgggtcataatccctaactccaatcactggcaactcctgagatcagaggaaaaccagcaacagcgtgggagtttggggagaggcattccataccagattctgtggcctgcaggtgacatgctgcctaagagaagcaggagtctgtgacagccaccccaacacgtgacgtcatggccagtagggaagatgagctgaggaactgtgtggtatgtggggaccaagccacaggctaccactttaatgcgctgacttgtgagggctgcaagggtttcttcaggagaacagtcagcaaaagcattggtcccacctgcccctttgctggaagctgtgaagtcagcaagactcagaggcgccactgcccagcctgcaggttgcagaagtgcttagatgctggcatgaggaaagacatgatactgtcggcagaagccctggcattgcggcgagcaaagcaggcccagcggcgggcacagcaaacacctgtgcaactgagtaaggagcaagaagagctgatccggacactcctgggggcccacacccgccacatgggcaccatgtttgaacagtttgtgcagtttaggcctccagctcatctgttcatccatcaccagcccttgcccaccctggcccctgtgctgcctctggtcacacacttcgcagacatcaacactttcatggtactgcaagtcatcaagtttactaaggacctgcccgtcttccgttccctgcccattgaagaccagatctcccttctcaagggagcagctgtggaaatctgtcacatcgtactcaataccactttctgtctccaaacacaaaacttcctctgcgggcctcttcgctacacaattgaagatggagcccgtggtgagatggtgctagagcaatagggggcatgtgtcctcatggtacaggatgtggtcaggtgacctagaggctcctaatcctagtatctcccacagtggggttccaggtagagtttttggagttgctctttcacttccatggaacactacgaaaactgcagct

SEQ ID NO: 160902 - DNA, 1061 bp, Homo sapiens
  Payload ID: 11434
  Gene Symbol: NR1I3
  Gene Name: nuclear receptor subfamily 1, group I, member 3
  Uniprot ID: Q14994
  ENST ID: ENST00000511676
  CDS Start-End: 42-1001
ggagaggcattccataccagattctgtggcctgcaggtgacatgctgcctaagagaagcaggagaacagtcagcaaaagcattggtcccacctgcccctttgctggaagctgtgaagtcagcaagactcagaggcgccactgcccagcctgcaggttgcagaagtgcttagatgctggcatgaggaaagacatgatactgtcggcagaagccctggcattgcggcgagcaaagcaggcccagcggcgggcacagcaaacacctgtgcaactgagtaaggagcaagaagagctgatccggacactcctgggggcccacacccgccacatgggcaccatgtttgaacagtttgtgcagtttaggcctccagctcatctgttcatccatcaccagcccttgcccaccctggcccctgtgctgcctctggtcacacacttcgcagacatcaacactttcatggtactgcaagtcatcaagtttactaaggacctgcccgtcttccgttccctgcccattgaagaccagatctcccttctcaagggagcagctgtggaaatctgtcacatcgtactcaataccactttctgtctccaaacacaaaacttcctctgcgggcctcttcgctacacaattgaagatggagcccgtgtggggttccaggtagagtttttggagttgctctttcacttccatggaacactacgaaaactgcagctccaagagcctgagtatgtgctcttggctgccatggccctcttctctcctgaccgacctggagttacccagagagatgagattgatcagctgcaagaggagatggcactgactctgcaaagctacatcaagggccagcagcgaaggccccgggatcggtttctgtatgcgaagttgctaggcctgctggctgagctccggagcattaatgaggcctacgggtaccaaatccagcacatccagggcctgtctgccatgatgccgctgctccaggagatctgcagctgaggccatgctcacttccttccccagctcacctggaacaccctggatacactggagtgggaa

SEQ ID NO: 160903 - DNA, 480 bp, Homo sapiens
  Payload ID: 11434
  Gene Symbol: NR1I3
  Gene Name: nuclear receptor subfamily 1, group I, member 3
  ENST ID: ENST00000511748
  CDS Start-End: 42-398
ggagaggcattccataccagattctgtggcctgcaggtgacatgctgcctaagagaagcaggagaacagtcagcaaaagcattggtcccacctgcccctttgctggaagctgtgaagtcagcaagactcagaggcgccactgcccagcctgcaggttgcagaagtgcttagatgctggcatgaggaaagacattccctgcccattgaagaccagatctcccttctcaagggagcagctgtggaaatctgtcacatcgtactcaataccactttctgtctccaaacacaaaacttcctctgcgggcctcttcgctacacaattgaagatggagcccgtgaccgacctggagttacccagagagatgagattgatcagctgcaagaggagatggcactgactctgcaaagctacatcaagggccagcagcgaaggccccgggatcgctcacctggaacaccctggatacactggagtgggaa

SEQ ID NO: 160904 - DNA, 1201 bp, Homo sapiens
  Payload ID: 11434
  Gene Symbol: NR1I3
  Gene Name: nuclear receptor subfamily 1, group I, member 3
  ENST ID: ENST00000628566
  CDS Start-End: 204-563
ataaaacagacatctcttgttttccagatactacgggtcataatccctaactccaatcactggcaactcctgagatcagaggaaaaccagcaacagcgtgggagtttggggagaggcattccataccagattctgtggcctgcaggtgacatgctgcctaagagaagcaggagtctgtgacagccaccccaacacgtgacgtcatggccagtagggaagatgagctgaggaactgtgtggtatgtggggaccaagccacaggctaccactttaatgcgctgacttgtgagggctgcaagggtttcttcaggagaacagtcagcaaaagcattggtcccacctgcccctttgctggaagctgtgaagtcagcaagactcagaggcgccactgcccagcctgcaggttgcagaagtgcttagatgctggcatgaggaaagacacctccagctcatctgttcatccatcaccagcccttgcccaccctggcccctgtgctgcctctggtcacacacttcgcagacatcaacactttcatggtactgcaagtcatcaagtttactaaggacctgcccgtcttccgttccctgcccattgaagaccagatctcccttctcaagggagcagctgtggaaatctgtcacatcgtactcaataccactttctgtctccaaacacaaaacttcctctgcgggcctcttcgctacacaattgaagatggagcccgtgtggggttccaggtagagtttttggagttgctctttcacttccatggaacactacgaaaactgcagctccaagagcctgagtatgtgctcttggctgccatggccctcttctctcctgaccgacctggagttacccagagagatgagattgatcagctgcaagaggagatggcactgactctgcaaagctacatcaagggccagcagcgaaggccccgggatcggtttctgtatgcgaagttgctaggcctgctggctgagctccggagcattaatgaggcctacgggtaccaaatccagcacatccagggcctgtctgccatgatgccgctgctccaggagatctgcagctgaggccatgctcacttccttccccagctcacctggaacaccctggatacactggagtgggaaaatgctgggaccaaagattgggccgggttcaaagggagcccagtggttgcaatgaaagact

SEQ ID NO: 160905 - DNA, 2014 bp, Homo sapiens
  Payload ID: 11435
  Gene Symbol: NR2C1
  Gene Name: nuclear receptor subfamily 2, group C, member 1
  Uniprot ID: P13056
  ENST ID: ENST00000330677
  CDS Start-End: 166-1617
ccaaacacagaaagctctctccgccgtgaatctcgatcccacatcccgtcggctttcttcaacctctcttcccggagcgccccccaatccacgagtggcagccgcgggactgtcgcgtcggcgcccgacgccggagtcagcagggcgcaaaagcgccggtagatcatggcaaccatagaagaaattgcacatcaaattattgaacaacagatgggagagattgttacagagcagcaaactgggcagaaaatccagattgtgacagcacttgatcataatacccaaggcaagcagttcattctgacaaatcacgacggctctactccaagcaaagtcattctggccaggcaagattccactccgggaaaagttttccttacaactccagatgcagcaggtgtcaaccagttattttttaccactcctgatctgtctgcacaacacctgcagctcctaacagataattctccagaccaaggaccaaataaggtttttgatctttgcgtagtatgtggagacaaagcatcaggacgtcattatggagcagtaacttgtgaaggctgcaaaggattttttaaaagaagcatccgaaaaaatttagtatattcatgtcgaggatcaaaggattgtattattaataagcaccaccgaaaccgctgtcaatactgcaggttacagagatgtattgcgtttggaatgaagcaagactctgtccaatgtgaaagaaaacccattgaagtatcacgagaaaaatcttccaactgtgccgcttcaacagaaaaaatctatatccgaaaggaccttcgtagcccattaactgcaactccaacttttgtaacagatagtgaaagtacaaggtcaacaggactgttagattcaggaatgttcatgaatattcatccatctggagtaaaaactgagtcagctgtgctgatgacatcagataaggctgaatcatgtcagggagatttaagtacattggccaatgtggttacatcattagcgaatcttggaaaaactaaagatctttctcaaaatagtaatgaaatgtctatgattgaaagcttaagcaatgatgatacctctttgtgtgaatttcaagaaatgcagaccaacggtgatgtttcaagggcatttgacactcttgcaaaagcattgaatcctggagagagcacagcctgccagagctcagtagcgggcatggaaggaagtgtacacctaatcactggagattcaagcataaattacaccgaaaaagaggggccacttctcagcgattcacatgtagctttcaggctcaccatgccttctcctatgcctgagtacctgaatgtgcactacattggggagtctgcctccagactgctgttcttatcaatgcactgggcactttcgattccttctttccaggctctagggcaagaaaacagcatatcactggtgaaagcttactggaatgaactttttactcttggtcttgcccagtgctggcaagtgatgaatgtagcaactatattagcaacatttgtcaattgtcttcacaatagtcttcaacaagatgccaaggtaattgcagccctcattcatttcacaagacgagcaatcactgatttataaatgcttaactatagaatggcttatgactacccaaaacagtgccccatcaacaaatggggaaaattgccttttgagctcaggaataatttataaattggggactaccttttagttctttagcatattctatttcttattgttttatataatttttaaatcatttgcttcctccttatgtttaacagcagaggggtaatcaccttaaaatgtcatcaaaaatagatctactagaaggcagcatcacattcccatcttacttatggactcctacccctggttcatgtcttatatgcctgtaatggttataaagcctaccttcaggaaagctatggttgactaattactaatggatgggttttaaacatgtccctctacaataaattaaaatctttattgt

SEQ ID NO: 160906 - DNA, 4143 bp, Homo sapiens
  Payload ID: 11435
  Gene Symbol: NR2C1
  Gene Name: nuclear receptor subfamily 2, group C, member 1
  Uniprot ID: P13056
  ENST ID: ENST00000333003
  CDS Start-End: 332-2143
gtggactcacagagccgctgctcggccctccgatccctccaccccaccctgggaacgtcacgacctcctctcgccgcttctccccgttgctaatgcgcaggcgctggcgggatagcgcgccgccgagccgagaaagaggtcacgaactctgaccccccagaaatacccaaacacagaaagctctctccgccgtgaatctcgatcccacatcccgtcggctttcttcaacctctcttcccggagcgccccccaatccacgagtggcagccgcgggactgtcgcgtcggcgcccgacgccggagtcagcagggcgcaaaagcgccggtagatcatggcaaccatagaagaaattgcacatcaaattattgaacaacagatgggagagattgttacagagcagcaaactgggcagaaaatccagattgtgacagcacttgatcataatacccaaggcaagcagttcattctgacaaatcacgacggctctactccaagcaaagtcattctggccaggcaagattccactccgggaaaagttttccttacaactccagatgcagcaggtgtcaaccagttattttttaccactcctgatctgtctgcacaacacctgcagctcctaacagataattctccagaccaaggaccaaataaggtttttgatctttgcgtagtatgtggagacaaagcatcaggacgtcattatggagcagtaacttgtgaaggctgcaaaggattttttaaaagaagcatccgaaaaaatttagtatattcatgtcgaggatcaaaggattgtattattaataagcaccaccgaaaccgctgtcaatactgcaggttacagagatgtattgcgtttggaatgaagcaagactctgtccaatgtgaaagaaaacccattgaagtatcacgagaaaaatcttccaactgtgccgcttcaacagaaaaaatctatatccgaaaggaccttcgtagcccattaactgcaactccaacttttgtaacagatagtgaaagtacaaggtcaacaggactgttagattcaggaatgttcatgaatattcatccatctggagtaaaaactgagtcagctgtgctgatgacatcagataaggctgaatcatgtcagggagatttaagtacattggccaatgtggttacatcattagcgaatcttggaaaaactaaagatctttctcaaaatagtaatgaaatgtctatgattgaaagcttaagcaatgatgatacctctttgtgtgaatttcaagaaatgcagaccaacggtgatgtttcaagggcatttgacactcttgcaaaagcattgaatcctggagagagcacagcctgccagagctcagtagcgggcatggaaggaagtgtacacctaatcactggagattcaagcataaattacaccgaaaaagaggggccacttctcagcgattcacatgtagctttcaggctcaccatgccttctcctatgcctgagtacctgaatgtgcactacattggggagtctgcctccagactgctgttcttatcaatgcactgggcactttcgattccttctttccaggctctagggcaagaaaacagcatatcactggtgaaagcttactggaatgaactttttactcttggtcttgcccagtgctggcaagtgatgaatgtagcaactatattagcaacatttgtcaattgtcttcacaatagtcttcaacaagataaaatgtcaacagaaagaagaaaattattgatggagcacatcttcaaactacaggagttttgtaacagcatggttaaactctgcattgatggatacgaatatgcctacctgaaggcaatagtactcttcagtccagatcatccaagcctagaaaacatggaacagatagagaaatttcaggaaaaggcttatgtggaattccaagattatataaccaaaacatatccagatgacacctacaggttatccagactactactcagattgccagctttaagactgatgaatgctaccatcactgaagaattgtttttcaaaggtctcattggcaatatacgaattgacagtgttatcccacatattttgaaaatggagcctgcagattataactctcaaataattggtcacagcatttgaaaactgtgactgcagtgctgtaaacttaactgttctttgccagaacacaagacaccaaattgaactcactgcttttgaggcatctggaaatttttactttaaaaagtaaccagaatccaaggtatttttattttagcttcccttaagaatttttgaagtgactgggcaggcagcagaaattaaatgaatttttcttcctgattcctttaaatgaatatgaaacactacaaatttattcttggtgaagatgatacctgaagctgtcacctcttgattatctaaactaagcgctcattctattttataaaacaaataaattagtctcttttttctgaattgtgttctagtcatatttaacttcattatgaactagtaaaaatacttaatggtcagaaatccctaaggagttagttccttgcattttactctgccataataatttttgtttaattaccatatcaaaataagattattttatgcttactggtataatgacagtattagaactataggaaataattgaatacatattttttgtcttctctaaatatcatggtgtcccttagcatatactactctcattgctggcagtgagacaggccattcatgatcttaagagttgccatttttaatgtatattattagttacaagcactttatatagcagaaaattgtttttgagaataagctagtgttgatattttaatatttttagcttactgctcgtgtttttgtttttgttttcgtttatagaggtgggtttcactgttgcccaggctggtctcaaactcctgggctcaagtgatcctgcctcagcctcccaaagtactgggattacaggcgcgtgccaccgtgcctggcctactgctgtctttgaaaataatagagactagccaggtgtagtggctcatgcctataatcccagcactttgggaggctgaggcaggcagattgcttgagctcaggagttcgagaccagcctgggcaatatagcaagacctcgtctctgtaaaaagaaagaaagtaataaagactaattgagcccaaaatgtttcactatttcaaaaaagatatttaaattgttgctctttcattccataaaaaggatctgatctctctcccacttttctgacctgagttagagcttcccaaacctgtcatgtatgggttttagccaatttcttttagatcactaaaaaaactcacccaatatgtcaaataatggatttatcatagccagtacatgttctcaaggcaagtttaaacattattttgaagctattgataattttttaaaataaagaaatattcactgatttttttcactgtaaagcacgggagggctgctttaacaacagtataagaatcagcctgaagccttgttactgctacaacaaattcattttagactcctcggatgtcttccacagtaatttattcttttagcaaacctgatactgataactgtttctttgctttgatttcttgatgaattattttggtatgtttgttgatttttaaagcaaacacggataatgcactcagagtacattttttgtaaagatttttgcaatagaagaaaagtgaagtttttgtggggatgtggattttattgcttactactttatagtaatcaaaagtttgaaaatatcaacttacagtctttaccagtttactaagggaaacttttttccctatttaaaacatgatcttagtcaacaattttatttataattatcagctaaattacatttagtataatactcaaatggaaaaatcagtagtttatacctttataaatacagtttagtaagccaaggaatcagggaaataatcctttaaaataatgtactaatagttaagatgtttcaggtgttttttctgattaaatttgctactatatttggaagactttaaaactatattaaaatgtgacttgcattacaaatttctgtgtcttaccagtatatttgtaaatatattattcattttccttttca

SEQ ID NO: 160907 - DNA, 1822 bp, Homo sapiens
  Payload ID: 11435
  Gene Symbol: NR2C1
  Gene Name: nuclear receptor subfamily 2, group C, member 1
  Uniprot ID: P13056
  ENST ID: ENST00000393101
  CDS Start-End: 209-1612
cgagccgagaaagaggtcacgaactctgaccccccagaaatacccaaacacagaaagctctctccgccgtgaatctcgatcccacatcccgtcggctttcttcaacctctcttcccggagcgccccccaatccacgagtggcagccgcgggactgtcgcgtcggcgcccgacgccggagtcagcagggcgcaaaagcgccggtagatcatggcaaccatagaagaaattgcacatcaaattattgaacaacagatgggagagattgttacagagcagcaaactgggcagaaaatccagattgtgacagcacttgatcataatacccaaggcaagcagttcattctgacaaatcacgacggctctactccaagcaaagtcattctggccaggcaagattccactccgggaaaagttttccttacaactccagatgcagcaggtgtcaaccagttattttttaccactcctgatctgtctgcacaacacctgcagctcctaacagataattctccagaccaaggaccaaataaggtttttgatctttgcgtagtatgtggagacaaagcatcaggacgtcattatggagcagtaacttgtgaaggctgcaaaggattttttaaaagaagcatccgaaaaaatttagtatattcatgtcgaggatcaaaggattgtattattaataagcaccaccgaaaccgctgtcaatactgcaggttacagagatgtattgcgtttggaatgaagcaagactctgtccaatgtgaaagaaaacccattgaagtatcacgagaaaaatcttccaactgtgccgcttcaacagaaaaaatctatatccgaaaggaccttcgtagcccattaactgcaactccaacttttgtaacagatagtgaaagtacaaggtcaacaggactgttagattcaggaatgttcatgaatattcatccatctggagtaaaaactgagtcagctgtgctgatgacatcagataaggctgaatcatgtcagggagatttaagtacattggccaatgtggttacatcattagcgaatcttggaaaaactaaagatctttctcaaaatagtaatgaaatgtctatgattgaaagcttaagcaatgatgatacctctttgtgtgaatttcaagaaatgcagaccaacggtgatgtttcaagggcatttgacactcttgcaaaagcattgaatcctggagagagcacagcctgccagagctcagtagcgggcatggaaggaagtgtacacctaatcactggagattcaagcataaattacaccgaaaaagaggggccacttctcagcgattcacatgtagctttcaggctcaccatgccttctcctatgcctgagtacctgaatgtgcactacattggggagtctgcctccagactgctgttcttatcaatgcactgggcactttcgattccttctttccaggctctagggcaagaaaacagcatatcactggtgaaagcttactggaatgaactttttactcttggtcttgcccagtgctggcaagtgatgaatgtagcaactatattagcaacatttgtcaattgtcttcacaatagtcttcaacaagcagaggggtaatcaccttaaaatgtcatcaaaaatagatctactagaaggcagcatcacattcccatcttacttatggactcctacccctggttcatgtcttatatgcctgtaatggttataaagcctaccttcaggaaagctatggttgactaattactaatggatgggttttaaacatgtccctctacaataaattaaaatctttattgtaaaacttta

SEQ ID NO: 160908 - DNA, 591 bp, Homo sapiens
  Payload ID: 11435
  Gene Symbol: NR2C1
  Gene Name: nuclear receptor subfamily 2, group C, member 1
  ENST ID: ENST00000552791
  CDS Start-End: 1-142
agatctttctcaaaatagtaatgaaatgtctatgattgaaagcttaagcaatgatgatacctctttgtgtgaatttcaagaaatgcagaccaacggtgatgtttcaagctcaccatgccttctcctatgcctgagtacctgaatgtgcactacattggggagtctgcctccagactgctgttcttatcaatgcactgggcactttcgattccttctttccaggctctagggcaagaaaacagcatatcactggtgaaagcttactggaatgaactttttactcttggtcttgcccagtgctggcaagtgatgaatgtagcaactatattagcaacatttgtcaattgtcttcacaatagtcttcaacaagcagaggggtaatcaccttaaaatgtcatcaaaaatagatctactagaaggcagcatcacattcccatcttacttatggactcctacccctggttcatgtcttatatgcctgtaatggttataaagcctaccttcaggaaagctatggttgactaattactaatggatgggttttaaacatgtccctctacaataaattaaaatctttattgtaaaacttta

SEQ ID NO: 160909 - DNA, 433 bp, Homo sapiens
  Payload ID: 11435
  Gene Symbol: NR2C1
  Gene Name: nuclear receptor subfamily 2, group C, member 1
  ENST ID: ENST00000547469
  CDS Start-End: 386-433
gggagagccgcgcgcagcgccggggcttccagggcgcacggctaacgccggcacgagtgagacgtgggagaggccgaccctcggctagtggccgcaagtcccggcctgcatcccgtcactaactcccgtgctttcacgggacggacagaatgactccccccactttcacttttctctcacggcaaatctggccagggtcgtcgctgcctgtgggcctggatcttttcagaagaaatggaacggccccagggttctcactgcagggggcatgtccaagcttccgatagatagctcttttgttaagaaataattcttccaactcgggcagataccatttttgtgcagtacgaatgttgccaggttgtcccataatcttcagtagatcatggcaaccatagaagaaattgcacatcaaattattgaacaacagatg

SEQ ID NO: 160910 - DNA, 740 bp, Homo sapiens
  Payload ID: 11435
  Gene Symbol: NR2C1
  Gene Name: nuclear receptor subfamily 2, group C, member 1
  ENST ID: ENST00000551647
  CDS Start-End: 1-220
gctcaccatgccttctcctatgcctgagtacctgaatgtgcactacattggggagtctgcctccagactgctgttcttatcaatgcactgggcactttcgattccttctttccaggctctaggatcatccaagcctagaaaacatggaacagatagagaaatttcaggaaaaggcttatgtggaattccaagattatataaccaaaacatatccagatgacacctacaggttatccagactactactcagattgccagctttaagactgatgaatgctaccatcactgaagaattgtttttcaaaggtctcattggcaatatacgaattgacagtgttatcccacatattttgaaaatggagcctgcagattataactctcaaataattggtcacagcatttgaaaactgtgactgcagtgctgtaaacttaactgttctttgccagaacacaagacaccaaattgaactcactgcttttgaggcatctggaaatttttactttaaaaagtaaccagaatccaaggtatttttattttagcttcccttaagaatttttgaagtgactgggcaggcagcagaaattaaatgaatttttcttcctgattcctttaaatgaatatgaaacactacaaatttattcttggtgaagatgatacctgaagctgtcacctcttgattatctaaactaagcgctcattctattttataaaacaaataaattagtctcttttttctgaa

SEQ ID NO: 160911 - DNA, 1561 bp, Homo sapiens
  Payload ID: 11435
  Gene Symbol: NR2C1
  Gene Name: nuclear receptor subfamily 2, group C, member 1
  ENST ID: ENST00000622476
  CDS Start-End: 257-1561
gcttctccccgttgctaatgcgcaggcgctggcgggatagcgcgccgccgagccgagaaagaggtcacgaactctgaccccccagaaatacccaaacacagaaagctctctccgccgtgaatctcgatcccacatcccgtcggctttcttcaacctctcttcccggagcgccccccaatccacgagtggcagccgcgggactgtcgcgtcggcgcccgacgccggagtcagcagggcgcaaaagcgccggtagatcatggcaaccatagaagaaattgcacatcaaattattgaacaacagatgggagagattgttacagagcagcaaactgggcagaaaatccagattgtgacagcacttgatcataatacccaaggcaagcagttcattctgacaaatcacgacggctctactccaagcaaagtcattctggccaggcaagattccactccgggaaaagttttccttacaactccagatgcagcaggtgtcaaccagttattttttaccactcctgatctgtctgcacaacacctgcagctcctaacagataattctccagaccaaggaccaaataaggtttttgatctttgcgtagtatgtggagacaaagcatcaggacgtcattatggagcagtaacttgtgaaggctgcaaaggattttttaaaagaagcatccgaaaaaatttagtatattcatgtcgaggatcaaaggattgtattattaataagcaccaccgaaaccgctgtcaatactgcaggttacagagatgtattgcgtttggaatgaagcaagactctgtccaatgtgaaagaaaacccattgaagtatcacgagaaaaatcttccaactgtgccgcttcaacagaaaaaatctatatccgaaaggaccttcgtagcccattaactgcaactccaacttttgtaacagatagtgaaagtacaaggtcaacaggactgttagattcaggaatgttcatgaatattcatccatctggagtaaaaactgagtcagctgtgctgatgacatcagataaggctgaatcatgtcagggagatttaagtacattggccaatgtggttacatcattagcgaatcttggaaaaactaaagatctttctcaaaatagtaatgaaatgtctatgattgaaagcttaagcaatgatgatacctctttgtgtgaatttcaagaaatgcagaccaacggtgatgtttcaagggcatttgacactcttgcaaaagcattgaatcctggagagagcacagcctgccagagctcagtagcgggcatggaaggaagtgtacacctaatcactggagattcaagcataaattacaccgaaaaagaggggccacttctcagcgattcacatgtagctttcaggctcaccatgccttctcctatgcctgagtacctgaatgtgcactacattggggagtctgcctccagactgctgttcttatcaatgcactgggcactttcgattccttctttccaggctctaggaaagaagaaaattattgatggagcacatcttcaaactacaggagttttgtaa

SEQ ID NO: 160912 - DNA, 2406 bp, Homo sapiens
  Payload ID: 11436
  Gene Symbol: NR2C2
  Gene Name: nuclear receptor subfamily 2, group C, member 2
  Uniprot ID: P49116
  ENST ID: ENST00000323373
  CDS Start-End: 218-2065
ccgctcccacctcggcgtctcgtctctcgcccgctgccccgcgagcccgcggcccccgggctcccgccatccgccgacaccgggagcccgggctccccgcgccctgccctccgcgccgggggccgcccgccgcagacacgggacccgcttcgaggccgctttggcgccaaatcctgaggtaacacgtacacagacctctcggccggaatctccagggatgaccagcccctccccacgcatccagataatctccaccgactctgctgtagcctcacctcagcgcattcagggctctgaacctgcctctggcccattgagtgttttcacatctttgaacaaagagaagattgtcacagaccagcagacaggacagaaaatccagatagtcaccgcagtggacgcctccggatcccccaaacagcagttcatcctgaccagcccagatggagctggaactgggaaggtgatcctggcttccccagagacatccagcgccaagcaactcatattcaccacctcagacaacctcgtccctggcaggatccagattgtcacggattctgcctctgtggagcgtttactggggaagacggacgtccagcggccccaggtggtagagtactgtgtggtctgtggcgacaaagcctccggccgtcactatggggctgtcagttgtgaaggttgcaaaggtttcttcaaaaggagtgtgaggaaaaatttgacctacagctgccggagcaaccaagactgcatcatcaataaacatcaccggaaccgctgtcagttttgccggctgaaaaaatgcttagagatgggcatgaaaatggaatctgtgcagagtgaacggaagcccttcgatgtgcaacgggagaaaccaagcaattgtgctgcttcaactgagaaaatctatatccggaaagacctgagaagtcccctgatagctactcccacgtttgtggcagacaaagatggagcaagacaaacaggtcttcttgatccagggatgcttgtgaacatccagcagcctttgatacgtgaggatggtacagttctcctggccacggattctaaggctgaaacaagccagggagctctgggcacactggcaaatgtagtgacctcccttgccaacctaagtgaatctttgaacaacggtgacacttcagaaatccagccagaggaccagtctgcaagtgagataactcgggcatttgataccttagctaaagcacttaataccacagacagctcctcttctccaagcttggcagatgggatagacaccagtggaggagggagcatccacgtcatcagcagagaccagtcgacacccatcattgaggttgaaggccccctcctttcagacacacacgtcacatttaagctaacaatgcccagtccaatgccagagtacctcaacgtgcactacatctgtgagtctgcatcccgtctgcttttcctctcaatgcactgggctcggtcaatcccagcctttcaggcacttgggcaggactgcaacaccagccttgtgcgggcctgctggaatgagctcttcaccctcggcctggcccagtgtgcccaggtcatgagtctctccaccatcctggctgccattgtcaaccacctgcagaacagcatccaggaagataaactttctggtgaccggataaagcaagtcatggagcacatctggaagctgcaggagttctgtaacagcatggcgaagctggatatagatggctatgagtatgcataccttaaagctatagttctctttagccccgatcatccaggtttgaccagcacaagccagattgaaaaattccaagaaaaggcacagatggagttgcaggactatgttcagaaaacctactcagaagacacctaccgattggcccggatcctcgttcgcctgccggcactcaggctgatgagctccaacataacagaagaacttttttttactggtctcattggcaatgtttcgatagacagcataatcccctacatcctcaagatggagacagcagagtataatggccagatcaccggagccagtctatagcgcaaaccacacacctgccaaggagcaacagaatccttccaggaccgttcacatacaaagaaaagtagtggtattttggtatgtgcaaatatttccatatgttagccatttcctgtctggtttctccttatctgttaatcccagacaatagcaattaaaagactagtaggatcctttcctgacataagaaatgttttaatgccttttgatgaagcagcagattttggaacaatcttttaactcaatttgtatttagaaattctcaaagggcaaaaaacaaaaaaaaaggttttataatgtcagagactagtattaaagaaaactgaaagaacctgagagaa

SEQ ID NO: 160913 - DNA, 1937 bp, Homo sapiens
  Payload ID: 11436
  Gene Symbol: NR2C2
  Gene Name: nuclear receptor subfamily 2, group C, member 2
  Uniprot ID: P49116
  ENST ID: ENST00000393102
  CDS Start-End: 126-1916
aggttctctaatgatcttggttcaccatggctacaaatatggaggggctggttcagcacagagtggggacccagcaggtggctgaggtaacacgtacacagacctctcggccggaatctccagggatgaccagcccctccccacgcatccagataatctccaccgactctgctgtagcctcacctcagcgcattcagattgtcacagaccagcagacaggacagaaaatccagatagtcaccgcagtggacgcctccggatcccccaaacagcagttcatcctgaccagcccagatggagctggaactgggaaggtgatcctggcttccccagagacatccagcgccaagcaactcatattcaccacctcagacaacctcgtccctggcaggatccagattgtcacggattctgcctctgtggagcgtttactggggaagacggacgtccagcggccccaggtggtagagtactgtgtggtctgtggcgacaaagcctccggccgtcactatggggctgtcagttgtgaaggttgcaaaggtttcttcaaaaggagtgtgaggaaaaatttgacctacagctgccggagcaaccaagactgcatcatcaataaacatcaccggaaccgctgtcagttttgccggctgaaaaaatgcttagagatgggcatgaaaatggaatctgtgcagagtgaacggaagcccttcgatgtgcaacgggagaaaccaagcaattgtgctgcttcaactgagaaaatctatatccggaaagacctgagaagtcccctgatagctactcccacgtttgtggcagacaaagatggagcaagacaaacaggtcttcttgatccagggatgcttgtgaacatccagcagcctttgatacgtgaggatggtacagttctcctggccacggattctaaggctgaaacaagccagggagctctgggcacactggcaaatgtagtgacctcccttgccaacctaagtgaatctttgaacaacggtgacacttcagaaatccagccagaggaccagtctgcaagtgagataactcgggcatttgataccttagctaaagcacttaataccacagacagctcctcttctccaagcttggcagatgggatagacaccagtggaggagggagcatccacgtcatcagcagagaccagtcgacacccatcattgaggttgaaggccccctcctttcagacacacacgtcacatttaagctaacaatgcccagtccaatgccagagtacctcaacgtgcactacatctgtgagtctgcatcccgtctgcttttcctctcaatgcactgggctcggtcaatcccagcctttcaggcacttgggcaggactgcaacaccagccttgtgcgggcctgctggaatgagctcttcaccctcggcctggcccagtgtgcccaggtcatgagtctctccaccatcctggctgccattgtcaaccacctgcagaacagcatccaggaagataaactttctggtgaccggataaagcaagtcatggagcacatctggaagctgcaggagttctgtaacagcatggcgaagctggatatagatggctatgagtatgcataccttaaagctatagttctctttagccccgatcatccaggtttgaccagcacaagccagattgaaaaattccaagaaaaggcacagatggagttgcaggactatgttcagaaaacctactcagaagacacctaccgattggcccggatcctcgttcgcctgccggcactcaggctgatgagctccaacataacagaagaacttttttttactggtctcattggcaatgtttcgatagacagcataatcccctacatcctcaagatggagacagcagagtataatggccagatcaccggagccagtctatagcgcaaaccacacacctgccaa

SEQ ID NO: 160914 - DNA, 1791 bp, Homo sapiens
  Payload ID: 11436
  Gene Symbol: NR2C2
  Gene Name: nuclear receptor subfamily 2, group C, member 2
  Uniprot ID: P49116
  ENST ID: ENST00000406272
  CDS Start-End: 1-1791
atgaccagcccctccccacgcatccagataatctccaccgactctgctgtagcctcacctcagcgcattcagattgtcacagaccagcagacaggacagaaaatccagatagtcaccgcagtggacgcctccggatcccccaaacagcagttcatcctgaccagcccagatggagctggaactgggaaggtgatcctggcttccccagagacatccagcgccaagcaactcatattcaccacctcagacaacctcgtccctggcaggatccagattgtcacggattctgcctctgtggagcgtttactggggaagacggacgtccagcggccccaggtggtagagtactgtgtggtctgtggcgacaaagcctccggccgtcactatggggctgtcagttgtgaaggttgcaaaggtttcttcaaaaggagtgtgaggaaaaatttgacctacagctgccggagcaaccaagactgcatcatcaataaacatcaccggaaccgctgtcagttttgccggctgaaaaaatgcttagagatgggcatgaaaatggaatctgtgcagagtgaacggaagcccttcgatgtgcaacgggagaaaccaagcaattgtgctgcttcaactgagaaaatctatatccggaaagacctgagaagtcccctgatagctactcccacgtttgtggcagacaaagatggagcaagacaaacaggtcttcttgatccagggatgcttgtgaacatccagcagcctttgatacgtgaggatggtacagttctcctggccacggattctaaggctgaaacaagccagggagctctgggcacactggcaaatgtagtgacctcccttgccaacctaagtgaatctttgaacaacggtgacacttcagaaatccagccagaggaccagtctgcaagtgagataactcgggcatttgataccttagctaaagcacttaataccacagacagctcctcttctccaagcttggcagatgggatagacaccagtggaggagggagcatccacgtcatcagcagagaccagtcgacacccatcattgaggttgaaggccccctcctttcagacacacacgtcacatttaagctaacaatgcccagtccaatgccagagtacctcaacgtgcactacatctgtgagtctgcatcccgtctgcttttcctctcaatgcactgggctcggtcaatcccagcctttcaggcacttgggcaggactgcaacaccagccttgtgcgggcctgctggaatgagctcttcaccctcggcctggcccagtgtgcccaggtcatgagtctctccaccatcctggctgccattgtcaaccacctgcagaacagcatccaggaagataaactttctggtgaccggataaagcaagtcatggagcacatctggaagctgcaggagttctgtaacagcatggcgaagctggatatagatggctatgagtatgcataccttaaagctatagttctctttagccccgatcatccaggtttgaccagcacaagccagattgaaaaattccaagaaaaggcacagatggagttgcaggactatgttcagaaaacctactcagaagacacctaccgattggcccggatcctcgttcgcctgccggcactcaggctgatgagctccaacataacagaagaacttttttttactggtctcattggcaatgtttcgatagacagcataatcccctacatcctcaagatggagacagcagagtataatggccagatcaccggagccagtctatag

SEQ ID NO: 160915 - DNA, 2494 bp, Homo sapiens
  Payload ID: 11436
  Gene Symbol: NR2C2
  Gene Name: nuclear receptor subfamily 2, group C, member 2
  Uniprot ID: P49116
  ENST ID: ENST00000425241
  CDS Start-End: 363-2153
aacattcgccctcctcctaccagcgcgcgggcggcggcggcggcggcaccggggtcacgaactctgacctttcactgacaaaaacaataacaaacccccccttctccgcgaccccggcggcgcccccgggcccgtccccgccaccccgctcccacctcggcgtctcgtctctcgcccgctgccccgcgagcccgcggcccccgggctcccgccatccgccgacaccgggagcccgggctccccgcgccctgccctccgcgccgggggccgcccgccgcagacacgggacccgcttcgaggccgctttggcgccaaatcctgaggtaacacgtacacagacctctcggccggaatctccagggatgaccagcccctccccacgcatccagataatctccaccgactctgctgtagcctcacctcagcgcattcagattgtcacagaccagcagacaggacagaaaatccagatagtcaccgcagtggacgcctccggatcccccaaacagcagttcatcctgaccagcccagatggagctggaactgggaaggtgatcctggcttccccagagacatccagcgccaagcaactcatattcaccacctcagacaacctcgtccctggcaggatccagattgtcacggattctgcctctgtggagcgtttactggggaagacggacgtccagcggccccaggtggtagagtactgtgtggtctgtggcgacaaagcctccggccgtcactatggggctgtcagttgtgaaggttgcaaaggtttcttcaaaaggagtgtgaggaaaaatttgacctacagctgccggagcaaccaagactgcatcatcaataaacatcaccggaaccgctgtcagttttgccggctgaaaaaatgcttagagatgggcatgaaaatggaatctgtgcagagtgaacggaagcccttcgatgtgcaacgggagaaaccaagcaattgtgctgcttcaactgagaaaatctatatccggaaagacctgagaagtcccctgatagctactcccacgtttgtggcagacaaagatggagcaagacaaacaggtcttcttgatccagggatgcttgtgaacatccagcagcctttgatacgtgaggatggtacagttctcctggccacggattctaaggctgaaacaagccagggagctctgggcacactggcaaatgtagtgacctcccttgccaacctaagtgaatctttgaacaacggtgacacttcagaaatccagccagaggaccagtctgcaagtgagataactcgggcatttgataccttagctaaagcacttaataccacagacagctcctcttctccaagcttggcagatgggatagacaccagtggaggagggagcatccacgtcatcagcagagaccagtcgacacccatcattgaggttgaaggccccctcctttcagacacacacgtcacatttaagctaacaatgcccagtccaatgccagagtacctcaacgtgcactacatctgtgagtctgcatcccgtctgcttttcctctcaatgcactgggctcggtcaatcccagcctttcaggcacttgggcaggactgcaacaccagccttgtgcgggcctgctggaatgagctcttcaccctcggcctggcccagtgtgcccaggtcatgagtctctccaccatcctggctgccattgtcaaccacctgcagaacagcatccaggaagataaactttctggtgaccggataaagcaagtcatggagcacatctggaagctgcaggagttctgtaacagcatggcgaagctggatatagatggctatgagtatgcataccttaaagctatagttctctttagccccgatcatccaggtttgaccagcacaagccagattgaaaaattccaagaaaaggcacagatggagttgcaggactatgttcagaaaacctactcagaagacacctaccgattggcccggatcctcgttcgcctgccggcactcaggctgatgagctccaacataacagaagaacttttttttactggtctcattggcaatgtttcgatagacagcataatcccctacatcctcaagatggagacagcagagtataatggccagatcaccggagccagtctatagcgcaaaccacacacctgccaaggagcaacagaatccttccaggaccgttcacatacaaagaaaagtagtggtattttggtatgtgcaaatatttccatatgttagccatttcctgtctggtttctccttatctgttaatcccagacaatagcaattaaaagactagtaggatcctttcctgacataagaaatgttttaatgccttttgatgaagcagcagattttggaacaatcttttaactcaatttgtatttagaaattctcaaagggcaaaaaacaaaaaaaaaggttttataatgtcagagactagtattaaagaaaactgaaagaacctgagagaa

SEQ ID NO: 160916 - DNA, 495 bp, Homo sapiens
  Payload ID: 11436
  Gene Symbol: NR2C2
  Gene Name: nuclear receptor subfamily 2, group C, member 2
  ENST ID: ENST00000435454
  CDS Start-End: 388-495
gcccccgggcccgtccccgccaccccgctcccacctcggcgtctcgtctctcgcccgctgccccgcgagcccgcggcccccgggctcccgccatccgccgacaccgggagcccgggctccccgcgccctgccctccgcgccgggggccgcccgccgcagacacgggacccgcttcgaggccgctttggcgccaaatcctgaggaccgcctatggctgcggtagcagtgagagaagctctcagaaggtgcacattcctccttgttcatttttaagcagcttccaaagctgctgttgatgatgcctgatgctgctttgaaggcagaaaaccaacagtgagatcaagaattgtaacacgtacacagacctctcggccggaatctccagggatgaccagcccctccccacgcatccagataatctccaccgactctgctgtagcctcacctcagcgcattcagggctctgaacctgcctctggcccattgagtgttttc

SEQ ID NO: 160917 - DNA, 739 bp, Homo sapiens
  Payload ID: 11436
  Gene Symbol: NR2C2
  Gene Name: nuclear receptor subfamily 2, group C, member 2
  ENST ID: ENST00000437120
  CDS Start-End: 124-739
gttctctaatgatcttggttcaccatggctacaaatatggaggggctggttcagcacagagtggggacccagcaggtggctgaggtaacacgtacacagacctctcggccggaatctccagggatgaccagcccctccccacgcatccagataatctccaccgactctgctgtagcctcacctcagcgcattcagggctctgaacctgcctctggcccattgagtgttttcacatctttgaacaaagagaagattgtcacagaccagcagacaggacagaaaatccagatagtcaccgcagtggacgcctccggatcccccaaacagcagttcatcctgaccagcccagatggagctggaactgggaaggtgatcctggcttccccagagacatccagcgccaagcaactcatattcaccacctcagacaacctcgtccctggcaggatccagattgtcacggattctgcctctgtggagcgtttactggggaagacggacgtccagcggccccaggtggtagagtactgtgtggtctgtggcgacaaagcctccggccgtcactatggggctgtcagttgtgaaggttgcaaaggtttcttcaaaaggagtgtgaggaaaaatttgacctacagctgccggagcaaccaagactgcatcatcaataaacatcaccggaaccgctgtcagttttgccggctgaaaaaatgcttagagatgggcatgaaaatggaatgtg

SEQ ID NO: 160918 - DNA, 564 bp, Homo sapiens
  Payload ID: 11436
  Gene Symbol: NR2C2
  Gene Name: nuclear receptor subfamily 2, group C, member 2
  ENST ID: ENST00000413118
  CDS Start-End: 363-564
aacattcgccctcctcctaccagcgcgcgggcggcggcggcggcggcaccggggtcacgaactctgacctttcactgacaaaaacaataacaaacccccccttctccgcgaccccggcggcgcccccgggcccgtccccgccaccccgctcccacctcggcgtctcgtctctcgcccgctgccccgcgagcccgcggcccccgggctcccgccatccgccgacaccgggagcccgggctccccgcgccctgccctccgcgccgggggccgcccgccgcagacacgggacccgcttcgaggccgctttggcgccaaatcctgaggtaacacgtacacagacctctcggccggaatctccagggatgaccagcccctccccacgcatccagataatctccaccgactctgctgtagcctcacctcagcgcattcagattgtcacagaccagcagacaggacagaaaatccagatagtcaccgcagtggacgcctccggatcccccaaacagcagttcatcctgaccagcccagatggagctggaactgggaaggtgatcctggctt

SEQ ID NO: 160919 - DNA, 698 bp, Homo sapiens
  Payload ID: 11436
  Gene Symbol: NR2C2
  Gene Name: nuclear receptor subfamily 2, group C, member 2
  ENST ID: ENST00000439011
  CDS Start-End: 1-669
tgtgagtctgcatcccgtctgcttttcctctcaatgcactgggctcggtcaatcccagcctttcaggcacttgggcaggactgcaacaccagccttgtgcgggcctgctggaatgagctcttcaccctcggcctggcccagtgtgcccaggtcatgagtctctccaccatcctggctgccattgtcaaccacctgcagaacagcatccaggaagataaactttctggtgaccggataaagcaagtcatggagcacatctggaagctgcaggagttctgtaacagcatggcgaagctggatatagatggctatgagtatgcataccttaaagctatagttctctttagccccgatcatccaggtttgaccagcacaagccagattgaaaaattccaagaaaaggcacagatggagttgcaggactatgttcagaaaacctactcagaagacacctaccggtcaaaccaaacaactcactcattcttccccaagatttttctgatgtgctccatgatctccttattgctcttggtctccacatccaccaggacctgctccccagaatctggaaacggaaagcacggggcagaagagaaacagaactcacagcgcactcagcctcaaaaagttgtaatttgggacttgcttttagtggcagaaacattttaataataaaatagatatacttgtttacataa

SEQ ID NO: 160920 - DNA, 551 bp, Homo sapiens
  Payload ID: 11436
  Gene Symbol: NR2C2
  Gene Name: nuclear receptor subfamily 2, group C, member 2
  ENST ID: ENST00000413194
  CDS Start-End: 1-522
cctttctatattcctaggcaggactgcaacaccagccttgtgcgggcctgctggaatgagctcttcaccctcggcctggcccagtgtgcccaggtcatgagtctctccaccatcctggctgccattgtcaaccacctgcagaacagcatccaggaagataaactttctggtgaccggataaagcaagtcatggagcacatctggaagctgcaggagttctgtaacagcatggcgaagctggatatagatggctatgagtatgcataccttaaagctatagttctctttagccccgatcatccaggtttgaccagcacaagccagattgaaaaattccaagaaaaggcacagatggagttgcaggactatgttcagaaaacctactcagaagacacctaccggacctgctccccagaatctggaaacggaaagcacggggcagaagagaaacagaactcacagcgcactcagcctcaaaaagttgtaatttgggacttgcttttagtggcagaaacattttaataataaaatagatatacttgtttacataa

SEQ ID NO: 160921 - DNA, 8113 bp, Homo sapiens
  Payload ID: 11436
  Gene Symbol: NR2C2
  Gene Name: nuclear receptor subfamily 2, group C, member 2
  Uniprot ID: P49116
  ENST ID: ENST00000617312
  CDS Start-End: 1-1848
atgaccagcccctccccacgcatccagataatctccaccgactctgctgtagcctcacctcagcgcattcagggctctgaacctgcctctggcccattgagtgttttcacatctttgaacaaagagaagattgtcacagaccagcagacaggacagaaaatccagatagtcaccgcagtggacgcctccggatcccccaaacagcagttcatcctgaccagcccagatggagctggaactgggaaggtgatcctggcttccccagagacatccagcgccaagcaactcatattcaccacctcagacaacctcgtccctggcaggatccagattgtcacggattctgcctctgtggagcgtttactggggaagacggacgtccagcggccccaggtggtagagtactgtgtggtctgtggcgacaaagcctccggccgtcactatggggctgtcagttgtgaaggttgcaaaggtttcttcaaaaggagtgtgaggaaaaatttgacctacagctgccggagcaaccaagactgcatcatcaataaacatcaccggaaccgctgtcagttttgccggctgaaaaaatgcttagagatgggcatgaaaatggaatctgtgcagagtgaacggaagcccttcgatgtgcaacgggagaaaccaagcaattgtgctgcttcaactgagaaaatctatatccggaaagacctgagaagtcccctgatagctactcccacgtttgtggcagacaaagatggagcaagacaaacaggtcttcttgatccagggatgcttgtgaacatccagcagcctttgatacgtgaggatggtacagttctcctggccacggattctaaggctgaaacaagccagggagctctgggcacactggcaaatgtagtgacctcccttgccaacctaagtgaatctttgaacaacggtgacacttcagaaatccagccagaggaccagtctgcaagtgagataactcgggcatttgataccttagctaaagcacttaataccacagacagctcctcttctccaagcttggcagatgggatagacaccagtggaggagggagcatccacgtcatcagcagagaccagtcgacacccatcattgaggttgaaggccccctcctttcagacacacacgtcacatttaagctaacaatgcccagtccaatgccagagtacctcaacgtgcactacatctgtgagtctgcatcccgtctgcttttcctctcaatgcactgggctcggtcaatcccagcctttcaggcacttgggcaggactgcaacaccagccttgtgcgggcctgctggaatgagctcttcaccctcggcctggcccagtgtgcccaggtcatgagtctctccaccatcctggctgccattgtcaaccacctgcagaacagcatccaggaagataaactttctggtgaccggataaagcaagtcatggagcacatctggaagctgcaggagttctgtaacagcatggcgaagctggatatagatggctatgagtatgcataccttaaagctatagttctctttagccccgatcatccaggtttgaccagcacaagccagattgaaaaattccaagaaaaggcacagatggagttgcaggactatgttcagaaaacctactcagaagacacctaccgattggcccggatcctcgttcgcctgccggcactcaggctgatgagctccaacataacagaagaacttttttttactggtctcattggcaatgtttcgatagacagcataatcccctacatcctcaagatggagacagcagagtataatggccagatcaccggagccagtctatagcgcaaaccacacacctgccaaggagcaacagaatccttccaggaccgttcacatacaaagaaaagtagtggtattttggtatgtgcaaatatttccatatgttagccatttcctgtctggtttctccttatctgttaatcccagacaatagcaattaaaagactagtaggatcctttcctgacataagaaatgttttaatgccttttgatgaagcagcagattttggaacaatcttttaactcaatttgtatttagaaattctcaaagggcaaaaaacaaaaaaaaaggttttataatgtcagagactagtattaaagaaaactgaaagaacctgagagaatagtatgtgtgtatatatatatataaaaaagtccttggaattatagatactaattaccagggtaataatattagcactttctaagcacttatcaatgtgtaacgttagcaacatcttgcctgtgggcagggcaaatggaaaactgtgtatgtcttttgccgaaatgctaatgatttctgtgaaaactcactagggtacaggagacaatcatttatgtttaagaaaagaaggcatcattcctaattgtgtgcacatgttgtggagttgagctgaattctgtgaatggaaacgtggctcatttgcatcatgcagtaagtgggagtgtggtagcacagtcggtggtgacccagttcagaagcttctagccatagagcagacacttgtcaggttccctgactacttggtcctggtctctgatgggcatctgcagactcctctagaacctggggttctcctttgatgactggttatctgaattggattgcaactagtcagacattaactgccaaatgagatgtacagttcctccagcaagtgaaaacatccccaagtcacatccgccgctcgtggcagatggagccttgtgaccaaaaagtgcaaggtgggcattttgagctcttgacagtacttccaatacaattgggggtgcttgtgtgtttgtccagatggaggagtgtggccttggagtgtgagcgttaccttcccagggctttccactccaaatgcccccttgaaaagggctcgtgtttctgcagctccatcataactgtgaggctggattggggctgggcaggagcctgctgccgcctggcgagagtggttagggcctggtaaagctggatggaaggtttcaggacaatttcttcctgttgaccttaaataccagagattttaaaaatgtgtatagactcagcatctctgttggcaagtctgttaatgttaccagcacactgtgcactttggttcccccaggtgtgtgccagccgaccaccccggagcattttaaatgcaggctgcttgctccttaaaaacaaccctcaatttccagggtgatagtctttctcctcataaattgtagcaaccagagtttacagcaagaacagtatgcgcttaaaaggaagttatgtctaacttcaaacacccgtaaattcccacggatgtgaatatatagcaagcttttcctgtttgagaacagtggcatgtggaagacccggtcaattgctttgtcttttgctttttaaatagtccagattaagaaaatacaccctgttgggttaaatttgcctctcttgatttgttaatcagatgatatccaaaaagatccctggacactcccctgactcacaggtgctctgatctggctcaggctggcgccacatgtgctccacaggggtgcagtctggccagctacagacgcccctgtggtgccacattggacagaatggaagctgctgcaggctcaaggcagaacaggatgcttgatcctgaagggttagcagcactttacgcaagtcagtgttagtagggtaagtgggaacagtgtttccaacttctaaattcttgtttggatttaattatatcattttataattcttgccttggcagcaaattttggagagtagtgggagtggccattataaaatgatggaaaggatttaattttgccagcttaaagtaatttttacttttctaaccctgatgtgttttcagtttcaaaattaagacaaaaaaccagctgagacaatggaattagggcaggtttgtttcatttctgcttgtgaaggcttttagtagcaggcatcctgcagctcagtggtgcctctaacacagattgttgcctgccttccgtcgttttgatccttgagagtgaccatgagggccatgttgcagttccctgggaatacaagcataacagctttcagatcccagttcttggtgttggtgaaaaggtctccaccagcccctcctctcattcccaggtcattcagtggcagccagtaggctgcttagactcaggctggataaggaagtgttgggctgtggtgaaacaaccttgcagaaaacgtgattttgcttggaaaggtgctgattctaacctggtcctgctctttaagtccccttgctggtgatggctgattccagggactgttttgggctttgaacacctcttggttggtttctgagatcctcttggccttactttgaagtggccttttctttaaggatcatgtccacgtaacctgtattcttgctgctttaactcatttcaagcctctgactgcaggtccatttcatctcctgtcaggttggttaagtaaagtcagcccaaagtcaagaattacttaaagagatgcaaaccaaatatttgggctccaactttcacagggcttatagcccttattagcagtttgtgaaactttgggtttcatgaagtgagacctgtcctctggctactgaactccatggagccacgttcatgctccctcttctactggcctggctgctcctccctcaatgaggagaggcagctggctcagagaggtgggacagacacatgctgtcatcagttaagtgagctcttttccagaagtatctcagataatgttgggttaagacagatagatgttgaaaatggtggagatcattacacattagcataaaacaggacaggaagagattttttgaaagaccaaattagttgagcaagtaatacttttcaagttactcctggaaggtgtttttaaggaagtgtgttacctaccatactctcctaatttgacatttctgtgtcctgaggagttacatttattgtctaacccttgccataaggctgtggtttgaggttcttttgctgttctgggctttatatttaatttcaggtgtagtcacttctaagatgtgtaattgccctcaagagggactgatttttagcttgtcattgtcagtattgaatgtggactcttctgaggcagttaggacaccagccatggtgttaacagtggatgcgttaggctccttaatctcaaggcaatatccacgctacacacatacttattagctgtcttacttgtttgggggatagttacggcaaggagcaaaaaattctaaggactctagctgtttctagtgcttttactttcatagtcctttgaggacatttcctgcagagcactcttgctcacagcccgccctctgcagggcttccagcccctggccgcaatcagcagttcatgccacatgtgtacatccatgttctgggacctgatctcattggagtccagaagcttgttgcccactttccagtgtaaatgactttatgtgcaatggggtcataggtaacattttaactcttttcttagtccaggtcataggaagtctcatcatctgacagccacttttctcccagggaaggcggtgcccactgggccctgggaatgcctgagccagcagagcagatgccccacgtgcttcctttatccagcttccattctctcagttatgaggctctttgaaaatgtcttaactttgatgtaaatttttaaagccaacccctcatcaagacagggttggtttgggtcttttgtacacagggtctggaccttctcattgtgtgcctcccaccagcgtgcacttcgtatgtccagccctgggtcccttcagcagcattgtgcgtgtacaggtttctaggctgtaagactgaatgaatgtacatgtgtttatatcctctccatatgtacagtgtatatagtgtgtgtatgtgtacatagatgtatattatgtatacagacatgtatccaaactttcctttaaagagagtttttcataaagttgctaatgtaaactgatatgggtgttccaaggtccctcggcagggaagatttgctggtgattttcttcactccattttcctttgggtgagcctgcctgggaagggccatgaagtcagaatctccactctgcaaaaggaagaattccaggcagaagaggttctgacagggtgacatttccgtatattctctaggttcggacaagagccaggaagctggaagacagtttatcttaatatccaaaactaagtgggaatttttaaccttttcatgcacctattcatggccctacctggaaggaacttggcagttgggttgagccatcagccttcccagctattcagctctgttgagtagcccagagacaggcgtcacggtcagagattcagaacggtctgtgtcagtgaggcctgactcccaaagatggtagcaatttcccaggcttgcgctgtgctcagtcagcaagatgtggggcactgtcctatgactgaataaatagtaattcccatctttctatcgccagttaaaaataaacaacctaccaagtattattctttaaaactaagcatggatgttgatggctaacttctgcggcatataagctacagatctcaagttacttctctaactgtaagcatgtaaatgactttaactcctttctataagttatgattttaaattttcagataagaattgcattttaatatggatatgtgtgcccttaaaagctacagataccaaattttcctcgtccaggtctactcggacgaattttcccccttaatctggccttaaactgagactcggcccttgagagccagggcctggcccagcagtagttgctcatagacctgggaagcaggggcctgctggaaggaatcactagattgctgcaaaaactcacataatccacagtttcctctttttctttttaaaataagttatcaaaatgttttaaaaacactttatgagaccatagtactcagtgccttttgtgagacagtgggtcatttagccttcagcttccctgtttttgatgtagagaaagcttctatttcactggcctcatcccacaagattgtgcgacctttccccgtcatagcctgtcgtgacaatcacgctattgaaagtggctttctagttaaaatgcaattggaaacttgacagtctctaaatgaattaaaagtttcctttggggctatttagcttaacagcagtctacaaataattaaagtgtgagcttaagaaaagtatctttgcggggagaaaaatgtcagatatttttaatgcccagctataaataattttggtgtcttgatatttatacatgcaaaatagaaaaaaaatgttcaacatttattgattgatagactgttaaaatttaatgtttggaataacatttggaagtagtagactttgcattaaaaaatggcttttctttaggaaagtataatcaattattttaatgaccatagcattcatggactcaaatgctgctgccacacacaactcaagtgctggaatatttttctacagtctctctgttctacggattatcttgtaaaccagtgttcaactagttttataactgaaaagctgcacatttttcacagtacaagccgtagtttttacctgtagtttggacttctctgttagaatgtaactgcattaccagcccttttaaaggcatctatctatcaaaggaaaatttgggtgttagattttcttgggaccgtttctgtaacctttgcccttcacaatatagaaaatattggttttgccattacattttaatgccaggtttaaaacctgttgaaagctgcagctttatacagctttcttctccctgtgaaatcactttgtttatgtgatggcatttaaaaaatagcatgttctttttaaactgaattttatatctaatcaatgtcttcagtcttgaagaagaatttgcattgttgtgtttgtatatagagtattgcagtgcatgaattagctttatgcattttattaaatgctgtttcaatgtggcattattgttgtggcttaatactactacctaaatgaggtttatactattaaaagtgaattaaagactaa

SEQ ID NO: 160922 - DNA, 2612 bp, Homo sapiens
  Payload ID: 11437
  Gene Symbol: NR2E1
  Gene Name: nuclear receptor subfamily 2, group E, member 1
  Uniprot ID: Q9Y466
  ENST ID: ENST00000368983
  CDS Start-End: 5-1273
agaaatgtttcgagctggggcagagggagcagagaaggagccctcaccgcggccggaatgcagagcggaccctggcccaggactgggtttccctttaggctcgggcctaccctggccctcgctgttggaatctccaggaggccgcattttagatatcccctgcaaagtgtgtggcgaccgcagctcggggaagcactacggggtctacgcctgcgacggctgctcaggttttttcaaacggagcatccgaaggaataggacctatgtctgcaaatctggaaaccagggaggctgtccggtggacaagacgcacagaaaccagtgcagggcgtgtcggctgaagaagtgtttggaagtcaacatgaacaaagacgccgtgcagcacgagcgggggcctcggacgtccaccatccgcaagcaagtggccctctacttccgtggacacaaggaggagaacggggccgccgcgcactttccctcggcggcgctccctgcgccggccttcttcaccgcggtcacgcagctggagccgcacggcctggagctggccgcggtgtccaccactccagagcggcagaccctcgtgagcctggctcagcccacgcccaagtacccccatgaagtgaatgggaccccaatgtatctctatgaagtggccacggagtcggtgtgtgaatcagctgccagacttctcttcatgagcatcaagtgggctaagagtgtgccagccttctccacgctgtctttgcaagaccagctgatgcttttggaagatgcttggagagaactgtttgttctaggaatagcacaatgggccattccggttgatgctaacactctactggctgtatctggcatgaacggtgacaacacagattcccagaagctgaacaagatcatatctgaaatacaggctttacaagaggtggtggctcgatttagacaactccggttagatgctactgaatttgcctgtctaaaatgcatcgtcactttcaaagccgttcctacacatagtggttctgaactgagaagtttccggaatgctgccgccattgcagcccttcaagatgaggctcagctaacgctcaacagctacatccataccagatatcccactcaaccctgtcgctttggaaaactcctgttgcttttgccagctttacgttctattagcccatcaactatagaagaagtgtttttcaaaaaaaccatcggcaatgtgccaattacaagactgctttcagatatgtacaaatccagtgatatctaagctcacaagatacccacttttcaggatgggacagtatcagatgaacttcaacccatggagaacaagcctcaactaacaaacccttcaggaagcatataccggggaatgtgtagccttcaggaaaaaaatgccaattgacacaaagcattccagtagctatgacctgccgccctgaccaggatagggcgggtgggaaggagaggggtgcaacaggaccgcctgcactgaaaactcactgctgccatgccctgggagggggcaaactgggggttgccacaggccgtgccattctgcctcttacctggaagatcaggctgaacgatcaaaagctgaaacataagtagtgctttctcttcctttttagcatacaaagtttggtaaccaaatatagctctgtgtataacatcgtactgcggccttcaaaactacgttatgttggagcatttattttaaaaataatggtaggttttaaattaaaagtgttatcaaaagtttcccctctattgtaatacattattaagtggccttcagaactgagttaataagtgaaaagtagcttatgccatgtgatttgctttttctctatcttcttttttcttttctttctctttcttttgttctttcttcttcttttttaataccataggccaggcaaccttgtcaaaggaattgatggacaaaatgagattctcaccaggacttcaggttggataacatgtcaaaaagagaagagctttactaaaagaacataagtcaagggaggatgaataaaaacagcaaaaccaaataaagtggagatgagtgattgagtgaggtagattgctgtcccgttaacatagtgctgaaaccaaaggcagtgggggtccaaactcgtggtgcagcaagtcacaccagacaggaaacgaatatggacgtaattgcagaaggaacttcaaggagatgaatgaatgctaaaagggttcttgactgatccattgctaacagcctgagactcttcaatgcctttccgaaaactggtttctagtaaagccttgaatgaacacacacacacacacacacacacacacacacacacacacacacacacaccgtcctacactttaagctgctcctttggtatgactctatacttatggaaatgtagaaacaaacatttttaaatagctgctgtacttttcacattttgatttattaggtactagcactgaggaaaaaaaattcagcacttggactatcataggatgagtaaaacttttcttgtacaaagtgaattaactgatttgtgaagttaaaaggttgtactcattgtatttacaaagaataaaaatatattgaattt

SEQ ID NO: 160923 - DNA, 3212 bp, Homo sapiens
  Payload ID: 11437
  Gene Symbol: NR2E1
  Gene Name: nuclear receptor subfamily 2, group E, member 1
  Uniprot ID: Q9Y466
  ENST ID: ENST00000368986
  CDS Start-End: 709-1866
ggagatattacaggggacccagcccgcagcgacaggcacaaagtcacggggtaatgaacttcggggacccttcgccgctgcgtgcgcggctctccccggaaacccggacctggccgcctcttccctcggaagatttcccagcaatctagttttcccactctgcgcttgggttccggcagcgcggagcccgtctgcctctgagactgcggtagtgttttccttctttccttgggagaccagcggtcggcagagattgcccacactctgcatgcctatgtagagggagagatcgaagactgagtgacaggaatggggaaaaagagggatttcgctccgtaggaaggccattttcgtgtctccatctctgtctttcaacatccctctcttgctgttcttccttcttcctcagtcttcctgtccatctctccatctgtctgtccatgtgtgtgtccatatcaagcagcattcccagcagctgcggttttgcaagagccgggaagaaacttaaggatgcttaaatttccactgttggacgaattctgagcgcccagggagcagcgcagcgcgcgactgacacccacctgtcccgcccaggagccttgcaggctggagggcagctggagagcggcggcgcccggcggcgaggcgggcgctgccggccgggactcgggcagcgcccaccaaccgctccgccccgggacagccagcatgagcaagccagccggatcaacaagccgcattttagatatcccctgcaaagtgtgtggcgaccgcagctcggggaagcactacggggtctacgcctgcgacggctgctcaggttttttcaaacggagcatccgaaggaataggacctatgtctgcaaatctggaaaccagggaggctgtccggtggacaagacgcacagaaaccagtgcagggcgtgtcggctgaagaagtgtttggaagtcaacatgaacaaagacgccgtgcagcacgagcgggggcctcggacgtccaccatccgcaagcaagtggccctctacttccgtggacacaaggaggagaacggggccgccgcgcactttccctcggcggcgctccctgcgccggccttcttcaccgcggtcacgcagctggagccgcacggcctggagctggccgcggtgtccaccactccagagcggcagaccctcgtgagcctggctcagcccacgcccaagtacccccatgaagtgaatgggaccccaatgtatctctatgaagtggccacggagtcggtgtgtgaatcagctgccagacttctcttcatgagcatcaagtgggctaagagtgtgccagccttctccacgctgtctttgcaagaccagctgatgcttttggaagatgcttggagagaactgtttgttctaggaatagcacaatgggccattccggttgatgctaacactctactggctgtatctggcatgaacggtgacaacacagattcccagaagctgaacaagatcatatctgaaatacaggctttacaagaggtggtggctcgatttagacaactccggttagatgctactgaatttgcctgtctaaaatgcatcgtcactttcaaagccgttcctacacatagtggttctgaactgagaagtttccggaatgctgccgccattgcagcccttcaagatgaggctcagctaacgctcaacagctacatccataccagatatcccactcaaccctgtcgctttggaaaactcctgttgcttttgccagctttacgttctattagcccatcaactatagaagaagtgtttttcaaaaaaaccatcggcaatgtgccaattacaagactgctttcagatatgtacaaatccagtgatatctaagctcacaagatacccacttttcaggatgggacagtatcagatgaacttcaacccatggagaacaagcctcaactaacaaacccttcaggaagcatataccggggaatgtgtagccttcaggaaaaaaatgccaattgacacaaagcattccagtagctatgacctgccgccctgaccaggatagggcgggtgggaaggagaggggtgcaacaggaccgcctgcactgaaaactcactgctgccatgccctgggagggggcaaactgggggttgccacaggccgtgccattctgcctcttacctggaagatcaggctgaacgatcaaaagctgaaacataagtagtgctttctcttcctttttagcatacaaagtttggtaaccaaatatagctctgtgtataacatcgtactgcggccttcaaaactacgttatgttggagcatttattttaaaaataatggtaggttttaaattaaaagtgttatcaaaagtttcccctctattgtaatacattattaagtggccttcagaactgagttaataagtgaaaagtagcttatgccatgtgatttgctttttctctatcttcttttttcttttctttctctttcttttgttctttcttcttcttttttaataccataggccaggcaaccttgtcaaaggaattgatggacaaaatgagattctcaccaggacttcaggttggataacatgtcaaaaagagaagagctttactaaaagaacataagtcaagggaggatgaataaaaacagcaaaaccaaataaagtggagatgagtgattgagtgaggtagattgctgtcccgttaacatagtgctgaaaccaaaggcagtgggggtccaaactcgtggtgcagcaagtcacaccagacaggaaacgaatatggacgtaattgcagaaggaacttcaaggagatgaatgaatgctaaaagggttcttgactgatccattgctaacagcctgagactcttcaatgcctttccgaaaactggtttctagtaaagccttgaatgaacacacacacacacacacacacacacacacacacacacacacacacacaccgtcctacactttaagctgctcctttggtatgactctatacttatggaaatgtagaaacaaacatttttaaatagctgctgtacttttcacattttgatttattaggtactagcactgaggaaaaaaaattcagcacttggactatcataggatgagtaaaacttttcttgtacaaagtgaattaactgatttgtgaagttaaaaggttgtactcattgtatttacaaagaataaaaatatattgaatttaaatgaa

SEQ ID NO: 160924 - DNA, 517 bp, Homo sapiens
  Payload ID: 11437
  Gene Symbol: NR2E1
  Gene Name: nuclear receptor subfamily 2, group E, member 1
  ENST ID: ENST00000426403
  CDS Start-End: 381-517
aggactgggtcgagcagacagagctgcagcccccgccttgcccggcttctcgcggctggagagcagagcgatgtcacccggagccccgcctgggtggtaacgagaccctggccagtcacccctgcagcccagactaacttctttcaacagcctctgatggccgcattttagatatcccctgcaaagtgtgtggcgaccgcagctcggggaagcactacggggtctacgcctgcgacggctgctcaggttttttcaaacggagcatccgaaggaataggacctatgtctgcaaatctggaaaccagggaggctgtccggtggacaagacgcacagaaaccagtgcagggcgtgtcggctgaagaagtgtttggaagtcaacatgaacaaagacgccgtgcagcacgagcgggggcctcggacgtccaccatccgcaagcaagtggccctctacttccgtggacacaaggaggagaacggggccgccgcgcactttccctcggcggcgctccctgcgcc

SEQ ID NO: 160925 - DNA, 2032 bp, Homo sapiens
  Payload ID: 11438
  Gene Symbol: NR2E3
  Gene Name: nuclear receptor subfamily 2, group E, member 3
  ENST ID: ENST00000621736
  CDS Start-End: 489-1457
cagcagcagagttaagtagtattgctttaattgcaacaagctgagctaatgtgggaagaatgcagtagagtggcacagaagaatgctaacccgaaactctaagcctgttccctggaatcttccatctggatggaggagagaaagttgacctggagtgaggttcaatgtaaggacaagatctgcacccggagaagctctctctcggagagcacaggcggcctgaggagtcaaaacaggtggcctgtggagtcagcacaggcagcctggaggaggtgaggaactgaagtttggacagattgagtcactttctcagggacacatggctggccggtgatggagaaggcgtgagcccctcgctccagtgccgcgtgtgcggagacagcagcagcgggaagcactatggcatctatgcctgcaacggctgcagcggcttcttcaagaggagcgtacggcggaggctcatctacaggtgccaggtgggggcagggatgtgccccgtggacaaggcccaccgcaaccagtgccaggcctgccggctgaagaagtgcctgcaggcggggatgaaccaggacgccgtgcagaacgagcgccagccgcgaagcacagcccaggtccacctggacagcatggagtccaacactgagtcccggccggagtccctggtggctcccccggccccggcagggcgcagcccacggggccccacacccatgtctgcagccagagccctgggccaccacttcatggccagccttataacagctgaaacctgtgctaagctggagccagaggatgctgatgagaatattgatgtcaccagcaatgaccctgagttcccctcctctccatactcctcttcctccccctgcggcctggacagcatccatgagacctcggctcgcctactcttcatggccgtcaagtgggccaagaacctgcctgtgttctccagcctgcccttccgggatcaggtgatcctgctggaagaggcgtggagtgaactctttctcctcggggccatccagtggtctctgcctctggacagctgtcctctgctggcaccgcccgaggcctctgctgccggtggtgcccagggccggctcacgctggccagcatggagacgcgtgtcctgcaggaaactatctctcggttccgggcattggcggtggaccccacggagtttgcctgcatgaaggccttggtcctcttcaagccagagacgcggggcctgaaggatcctgagcacgtagaggccttgcaggaccagtcccaagtgatgctgagccagcacagcaaggcccaccaccccagccagcccgtgaggtttgggaaattgctcctgctcctcccgtctttgaggtttatcactgcggaacgcatcgagctcctctttttccgcaagaccatagggaatactccaatggagaagctcctttgtgatatgttcaaaaactagtgggggtggaggtgaaatgtttccaagcactctggaaaacaatctactgaaacgaaacatttgcctactctttgccccagcaattcctcgtaggtgtgtgtacccagcagaaatgcccaccgaaagatattgtaagaatattcatagcagctttattcataatagccccaaactgtatattgatggtaggatgaattaacaagttgtggtatattcatataatgaaaaataatttaaaaagaatgaattacggatacatgtggcaacacaggtaaacttcacagacataaaagttgaatgaaagaagccaggccgaagttccatttatgcagagttcaggaacaggcaagactaattgacaataatagaagttggaatagtggttacttctgggtggtgggggattgatacagagggggctcatgggagccctctggtgtaccagaaatgttgattttgatctgggcagtggtttcacaaatgtattcatacgtaataattcattgagctgtgcactttattttgttagacctcaataaaaaagtaaaaaaaaaaaacaaaaaaaaccagaaaaa

SEQ ID NO: 160926 - DNA, 2064 bp, Homo sapiens
  Payload ID: 11438
  Gene Symbol: NR2E3
  Gene Name: nuclear receptor subfamily 2, group E, member 3
  Uniprot ID: Q9Y5X4
  ENST ID: ENST00000621098
  CDS Start-End: 153-1256
ttcgggaccttggggcagctcctgagttcagacagagttcaggaagggagacaggggcacagagagacagaggttcatggactgaggcaaaggctgggccaggctcagcaacccaggcctcccgcaggcaggcagaggctgccctgtaacccatggagaccagaccaacagctctgatgagctccacagtggctgcagctgcgcctgcagctggggctgcctccaggaaggagtctccaggcagatggggcctgggggaggatcccacaggcgtgagcccctcgctccagtgccgcgtgtgcggagacagcagcagcgggaagcactatggcatctatgcctgcaacggctgcagcggcttcttcaagaggagcgtacggcggaggctcatctacaggtgccaggtgggggcagggatgtgccccgtggacaaggcccaccgcaaccagtgccaggcctgccggctgaagaagtgcctgcaggcggggatgaaccaggacgccgtgcagaacgagcgccagccgcgaagcacagcccaggtccacctggacagcatggagtccaacactgagtcccggccggagtccctggtggctcccccggccccggcagggcgcagcccacggggccccacacccatgtctgcagccagagccctgggccaccacttcatggccagccttataacagctgaaacctgtgctaagctggagccagaggatgctgatgagaatattgatgtcaccagcaatgaccctgagttcccctcctctccatactcctcttcctccccctgcggcctggacagcatccatgagacctcggctcgcctactcttcatggccgtcaagtgggccaagaacctgcctgtgttctccagcctgcccttccgggatcaggtgatcctgctggaagaggcgtggagtgaactctttctcctcggggccatccagtggtctctgcctctggacagctgtcctctgctggcaccgcccgaggcctctgctgccggtggtgcccagggccggctcacgctggccagcatggagacgcgtgtcctgcaggaaactatctctcggttccgggcattggcggtggaccccacggagtttgcctgcatgaaggccttggtcctcttcaagccagagacgcggggcctgaaggatcctgagcacgtagaggccttgcaggaccagtcccaagtgatgctgagccagcacagcaaggcccaccaccccagccagcccgtgaggtgacctgagcatgcgcccacccactcatctgtccctgacctctaacctttctctgcctctcccacactctcccagagctcactgattagacagcacaagggtctcagttcaacagcatacagccaacatctatggtgtcccaggcacagtgccaggccccgggagtggggaccaagatgtacataagacaaagctactgccttctagagacaaccggcagtgacctcactgaagacaaaaactgccctagccaggtactgagggttgcatgaatctgcaggagacagagatccccttgcatgggaaacataaagcagaattgggagggactttgtggagacagggctggacttgaaaggaagaagaagtctaaaagaaaacatcatttgcaaagggagagaggggcaagcatgatatgttgttagaacaggagcccactttgaaggtataacaggttcctgccagtgagaaatggggagaataagccagaaaagtaccctaggaccagcccgttcaggactttgaatgccagccaaaggccacgtctgacttgggaggcagagggcagctactgcaggtttccgagcagagggtcatacacagggctggacctcacgcagactggcatggccatgggtccagaggatactactgggaaggggatggcagctactgccaccttccagatggttccatggagttctgatctttgggcatggccaggggaagcagaagggagactctaggagttgaaatgggtcagacccggtgtttgggtgaaggtaaggaatgagggaagaggagctctttg

SEQ ID NO: 160927 - DNA, 1998 bp, Homo sapiens
  Payload ID: 11438
  Gene Symbol: NR2E3
  Gene Name: nuclear receptor subfamily 2, group E, member 3
  Uniprot ID: Q9Y5X4
  ENST ID: ENST00000617575
  CDS Start-End: 191-1423
agaaatctcctcaagccagagcctgtgctgtgaggggcttcgggaccttggggcagctcctgagttcagacagagttcaggaagggagacaggggcacagagagacagaggttcatggactgaggcaaaggctgggccaggctcagcaacccaggcctcccgcaggcaggcagaggctgccctgtaacccatggagaccagaccaacagctctgatgagctccacagtggctgcagctgcgcctgcagctggggctgcctccaggaaggagtctccaggcagatggggcctgggggaggatcccacaggcgtgagcccctcgctccagtgccgcgtgtgcggagacagcagcagcgggaagcactatggcatctatgcctgcaacggctgcagcggcttcttcaagaggagcgtacggcggaggctcatctacaggtgccaggtgggggcagggatgtgccccgtggacaaggcccaccgcaaccagtgccaggcctgccggctgaagaagtgcctgcaggcggggatgaaccaggacgccgtgcagaacgagcgccagccgcgaagcacagcccaggtccacctggacagcatggagtccaacactgagtcccggccggagtccctggtggctcccccggccccggcagggcgcagcccacggggccccacacccatgtctgcagccagagccctgggccaccacttcatggccagccttataacagctgaaacctgtgctaagctggagccagaggatgctgatgagaatattgatgtcaccagcaatgaccctgagttcccctcctctccatactcctcttcctccccctgcggcctggacagcatccatgagacctcggctcgcctactcttcatggccgtcaagtgggccaagaacctgcctgtgttctccagcctgcccttccgggatcaggtgatcctgctggaagaggcgtggagtgaactctttctcctcggggccatccagtggtctctgcctctggacagctgtcctctgctggcaccgcccgaggcctctgctgccggtggtgcccagggccggctcacgctggccagcatggagacgcgtgtcctgcaggaaactatctctcggttccgggcattggcggtggaccccacggagtttgcctgcatgaaggccttggtcctcttcaagccagagacgcggggcctgaaggatcctgagcacgtagaggccttgcaggaccagtcccaagtgatgctgagccagcacagcaaggcccaccaccccagccagcccgtgaggtttgggaaattgctcctgctcctcccgtctttgaggtttatcactgcggaacgcatcgagctcctctttttccgcaagaccatagggaatactccaatggagaagctcctttgtgatatgttcaaaaactagtgggggtggaggtgaaatgtttccaagcactctggaaaacaatctactgaaacgaaacatttgcctactctttgccccagcaattcctcgtaggtgtgtgtacccagcagaaatgcccaccgaaagatattgtaagaatattcatagcagctttattcataatagccccaaactgtatattgatggtaggatgaattaacaagttgtggtatattcatataatgaaaaataatttaaaaagaatgaattacggatacatgtggcaacacaggtaaacttcacagacataaaagttgaatgaaagaagccaggccgaagttccatttatgcagagttcaggaacaggcaagactaattgacaataatagaagttggaatagtggttacttctgggtggtgggggattgatacagagggggctcatgggagccctctggtgtaccagaaatgttgattttgatctgggcagtggtttcacaaatgtattcatacgtaataattcattgagctgtgcactttattttgttagacctcaataaaaaagtaaaaaaaaaaaacaaaaaaaaccagaaaaa

SEQ ID NO: 160928 - DNA, 3732 bp, Homo sapiens
  Payload ID: 11439
  Gene Symbol: NR2F1
  Gene Name: nuclear receptor subfamily 2, group F, member 1
  Uniprot ID: P10589
  ENST ID: ENST00000327111
  CDS Start-End: 1688-2959
cctctttctcccccctctctccctcctctcctctctctctcctctcttctctgaacctctcttctctttctcttttcttacatattctactagttgttttccccttcttcttctcctttctctcctttttctccctcctccttgtctcttttactccattcctgcagaagagagagggctaaacttaaagaaaaaaaaaaggaggaggaggaggaggaggcacccccttcgtattcttcttatcgttattttatacatatatgattttttttggagggagggtgttggttgccggctgaagagcacttatttaaaatactaaaaaaagaacatttttgggcgatctccagggtttttttaactagctctgtgtgttatagcagaagaagcagaagaaggagcaagaaagaggaaaagaagaggattatttattcgacctactttggatgtctctctcgcttttcctttttcctttttttggcaattattttcttctgatttttattttttctatttcgctgtgatttcgtcgccggcgtgaattatcccgtatttttctcccccttccgtcacctcccgaaagaagaaggcagcgagagcccggcgccaccggcacaacaaaaagagcaaagtgtgtgatcttcctcgccggctgcctcccgctctccagcgctgccttcctgaatggctggctgcgtccggccctggacctggccccccgacacccgcgcgccctgatcgccggcggcagcctcgcccagcgccctgctcggctcaccgcgctccccgcactcccgagcccggcgagggctcccgccgggacagcggcggcgccgcgggcggccccggcctccgctcgcgctccggctgcggccccgactcctgctcggactccggcccgggtcccggctcctccagcggcgctcgccgcagcagctccggcggcagctccagcggcgcctgcagccgcgacctcctcctcctccgccgccgccgccgcctccgccctcgccggcttcctctatgtcggctcagcccgcgcgctgcgcgtagcccgagcggccggcgggcgggcgcccggcgcgggtgagcgactgtgtgtgcgagtgtgtgtgtgcgcgggggtgcgggcgaggcggagggcgagtgtgtgcgcgcgccgtggcccatgcccgccgcccccggcgctgcgccccgcgccgctcccggctgccgcctgtgccatttctgattttgcaacttggggaagaagaaaaaagcgagagaagggagcttgctcgccggggggtggggaggggggaaggagagcgcggcccccccaggaacggagcgcggggggagcgggcgaggggagcaggggtgttggggggggagcctgagagcctgggggggctgcaaaaagagagaaagaaaacagcaggaaccacaacaaaacgccagcagggcgggcgggcgcgcagcagcagcggggcggccgaggcagtagcggcggcagcggcggcggcggcggaggcagcggccggtgtccggctcgggctcggctcctgcgaccccggggcgcccggcgggccccccgccccctccccctccccccttccccttccccttcccctcccagcgcgcccgcgcgccccgcggccctcggcgagcagctcggctccccccagcgctccccgggcccaaagatatggcaatggtagttagcagctggcgagatccgcaggacgacgtggccgggggcaaccccggcggccccaaccccgcagcgcaggcggcccgcggcggcggcggcggcgccggcgagcagcagcagcaggcgggctcgggcgcgccgcacacgccgcagaccccgggccagcccggagcgcccgccacccccggcacggcgggggacaagggccagggcccgcccggttcgggccagagccagcagcacatcgagtgcgtggtgtgcggggacaagtcgagcggcaagcactacggccaattcacctgcgagggctgcaaaagtttcttcaagaggagcgtccgcaggaacttaacttacacatgccgtgccaacaggaactgtcccatcgaccagcaccaccgcaaccagtgccaatactgccgcctcaagaagtgcctcaaagtgggcatgaggcgggaagcggttcagcgaggaagaatgcctccaacccagcccaatccaggccagtacgcactcaccaacggggaccccctcaacggccactgctacctgtccggctacatctcgctgctgctgcgcgccgagccctaccccacgtcgcgctacggcagccagtgcatgcagcccaacaacattatgggcatcgagaacatctgcgagctggccgcgcgcctgctcttcagcgccgtcgagtgggcccgcaacatccccttcttcccggatctgcagatcaccgaccaggtgtccctgctacgcctcacctggagcgagctgttcgtgctcaacgcggcccagtgctctatgccgctgcacgtggcgccgttgctggccgccgccggcctgcatgcctcgcccatgtctgccgaccgcgtcgtggccttcatggaccacatccgcatcttccaggagcaggtggagaagctcaaggcgctacacgtcgactcagccgagtacagctgcctcaaagccatcgtgctgttcacgtcagacgcctgtggcctgtcggatgcggcccacatcgagagcctgcaggagaagtcgcagtgcgcactggaggagtacgtgaggagccagtaccccaaccagcccagccgttttggcaaactgctgctgcgactgccctcgctgcgcaccgtgtcctcctccgtcatcgagcagctcttcttcgtccgtttggtaggtaaaacccccatcgaaactctcatccgcgatatgttactgtctgggagcagcttcaactggccttacatgtccatccagtgctcctagaccttgggcgcttcccacctgccccgtccccctagagactcagaggacccacctgggccaaggactccaaagccgcggggacaccgggaagtgcagcgggccaggcaggctgggtgggagggaggagggccgagacaggagcagcccacccagcagaaatacaatccgagctacaaagcatgggaaaaagagactcttttaggatcagatctgtgagcacgttggcgaggaaaaacaaaacaaacaaaaaaaagaaccttgtgtctgtctggtgaaaaaaagaaaaacaaattggaagagaggaccatgagaattttaataaaacagaaggaaactaatggaccttccaggatttattgtggacggatgtggatatattctgtacaggaacaacacatatggaagtggactgaagcctatgtagaaacacacacacactgaacattgttattcattttgtaaaatactagtctttattttcattttttgtaaaatttaaacatcgtatgcgcataaagaaaaaggaaacaagaattaggggaaaataacattttccaaataattataaaaaattgtcctgtgtctatgtatctatatctgttttgtatttttttctggttccaaaccagatttcctgtgattctatactaataatttttgatataaccctttgcttcttataatgagtgcgatatatgttgtcgaggctgttcttcaagaattaaaattgaagtgaaaatttaaacaaaaataaaagaatttagcaaaaccca

SEQ ID NO: 160929 - DNA, 1427 bp, Homo sapiens
  Payload ID: 11439
  Gene Symbol: NR2F1
  Gene Name: nuclear receptor subfamily 2, group F, member 1
  ENST ID: ENST00000615873
  CDS Start-End: 1-1197
atggcaatggtagttagcagctggcgagatccgcaggacgacgtggccgggggcaaccccggcggccccaaccccgcagcgcagaccccgggccagcccggagcgcccgccacccccggcacggcgggggacaagggccagggcccgcccggttcgggccagagccagcagcacatcgagtgcgtggtgtgcggggacaagtcgagcggcaagcactacggccaattcacctgcgagggctgcaaaagtttcttcaagaggagcgtccgcaggaacttaacttacacatgccgtgccaacaggaactgtcccatcgaccagcaccaccgcaaccagtgccaatactgccgcctcaagaagtgcctcaaagtgggcatgaggcgggaagcggttcagcgaggaagaatgcctccaacccagcccaatccaggccagtacgcactcaccaacggggaccccctcaacggccactgctacctgtccggctacatctcgctgctgctgcgcgccgagccctaccccacgtcgcgctacggcagccagtgcatgcagcccaacaacattatgggcatcgagaacatctgcgagctggccgcgcgcctgctcttcagcgccgtcgagtgggcccgcaacatccccttcttcccggatctgcagatcaccgaccaggtgtccctgctacgcctcacctggagcgagctgttcgtgctcaacgcggcccagtgctctatgccgctgcacgtggcgccgttgctggccgccgccggcctgcatgcctcgcccatgtctgccgaccgcgtcgtggccttcatggaccacatccgcatcttccaggagcaggtggagaagctcaaggcgctacacgtcgactcagccgagtacagctgcctcaaagccatcgtgctgttcacgtcagacgcctgtggcctgtcggatgcggcccacatcgagagcctgcaggagaagtcgcagtgcgcactggaggagtacgtgaggagccagtaccccaaccagcccagccgttttggcaaactgctgctgcgactgccctcgctgcgcaccgtgtcctcctccgtcatcgagcagctcttcttcgtccgtttggtaggtaaaacccccatcgaaactctcatccgcgatatgttactgtctgggagcagcttcaactggccttacatgtccatccagtgctcctagaccttgggcgcttcccacctgccccgtccccctagagactcagaggacccacctgggccaaggactccaaagccgcggggacaccgggaagtgcagcgggccaggcaggctgggtgggagggaggagggccgagacaggagcagcccacccagcagaaatacaatccgagctacaaagcatgggaaaaagagactcttttaggatcagatctgtgagcacgttggcgagg

SEQ ID NO: 160930 - DNA, 5275 bp, Homo sapiens
  Payload ID: 11440
  Gene Symbol: NR2F2
  Gene Name: nuclear receptor subfamily 2, group F, member 2
  Uniprot ID: P24468
  ENST ID: ENST00000394166
  CDS Start-End: 1390-2634
agccccggcgcctataaatcgcattccctcccgcgcccccctttttagcatatttgatcactttgattctctgttcttttctctccgcggtgtgtgtgtgcgtgcgcgcgtgtgtgttttcttcttctcctcctcctctccccgagttgcctcctttctccgggtgccgtactgccttttttcccctctttcattctttctctccgtctttttctcccccctctgcgcacgaaggatgtgcttctaggtggtgatctgccctcctctctctcttttatcatttctcccccgccgccggcgagttgactctttccctatgtgtgtgaggcggcggcggcagcagcagcagcagcggctccggcggcggcagcagcggcagcagcgacttcagcggcggcggcggcgctagacgcagcggctccgggcccgacccggcggcttcggcggcggctccggcggcagcggcggcccgggcggcccgcagggaacggcgagcggcctccacccagcgactgcgggcggcggcggccggagagagcgaggcgcgcgccggacgcccggggcaggcggcggcggcggcggcccagcgccaggacgacgccgcgcagcgcccgacgcggaccactttcatgctgattcccccggacccgggcagcgctccggccactccgcgggccgccggcctccgccccggcctgcctggctccctgggcgcgcccgcacccggcgcctccgatctcctagtcctcctgatttcgatggctttcctgaatggctgactgtgggctgccctggacttggcccccggacagtcgcctctcctcctcctctacctcctccttcaccaccacctcctcttcctcctcctcctcctcctcctcctccgccaactcctcggctgcacaccagctctaagagcgagagtgaacgagagagggagggagagagtgagagcgagcgagatctttggagagatttttttttttgcctcctacttctgtcttgaagccagacaatcgacttcagctctccctcccctccctctttctccacgttctgctcccactcgctctcctgtccccttcccctcccctcccggcggaaagccccccgaaaccaacaaagctgagccgagagaaacaaacaaaacaaacacaccgggccagacaagccatcgacaaaactttgcaaaagcaaaaacaaaaaaggaaaaactaaccaacctcaaccaaccagcccccgagccacccggggcgccctcccgcgccctcttgcaccctcgcacacacaaaaggcggcgcgccggagcccgagacccggggagccgccgccgccccgccgccgcccgcagccaggggagcaggaagtccggacgcagcccccatagatatggcaatggtagtcagcacgtggcgcgacccccaggacgaggtgcccggctcacagggcagccaggcctcgcaggcgccgcccgtgcccggcccgccgcccggcgccccgcacacgccacagacgcccggccaagggggcccagccagcacgccagcccagacggcggccggtggccagggcggccctggcggcccgggtagcgacaagcagcagcagcagcaacacatcgagtgcgtggtgtgcggagacaagtcgagcggcaagcactacggccagttcacgtgcgagggctgcaagagcttcttcaagcgcagcgtgcggaggaacctgagctacacgtgccgcgccaaccggaactgtcccatcgaccagcaccatcgcaaccagtgccagtactgccgcctcaaaaagtgcctcaaagtgggcatgagacgggaagcggtgcagaggggcaggatgccgccgacccagccgacccacgggcagttcgcgctgaccaacggggatcccctcaactgccactcgtacctgtccggatatatttccctgctgttgcgcgcggagccctatcccacgtcgcgcttcggcagccaatgcatgcagcccaacaacatcatgggtatcgagaacatttgcgaactggccgcgaggatgctcttcagcgccgtcgagtgggcccggaacatccccttcttccccgacctgcagatcacggaccaggtggccctgcttcgcctcacctggagcgagctgtttgtgttgaatgcggcgcagtgctccatgcccctccacgtcgccccgctcctggccgccgccggcctgcatgcttcgcccatgtccgccgaccgggtggtcgcctttatggaccacatacggatcttccaagagcaagtggagaagctcaaggcgctgcacgttgactcagccgagtacagctgcctcaaggccatagtcctgttcacctcagatgcctgtggtctctctgatgtagcccatgtggaaagcttgcaggaaaagtctcagtgtgctttggaagaatacgttaggagccagtaccccaaccagccgacgagattcggaaagcttttgcttcgcctcccttccctccgcaccgtctcctcctcagtcatagagcaattgtttttcgtccgtttggtaggtaaaacccccatcgaaaccctcatccgggatatgttactgtccggcagcagttttaactggccgtatatggcaattcaataaataaataaaataagaagggggagtgaaacagagaaagaaaaggcaaaagactggtttgtttgcttaatttccttctgttaagaaaggatataaaaggatgttacaagtttgctaaaagaagagaggggaagaatttaatggactgtgaatttcaaaaaaaaaaaaaaagactgtcaaatgaacttttacagaatgcattaaaaaaaaaaaaaaactcctgtgtcggtcagaacaacttgctacttatcatttttgtataaaaaggaaattagtctttttctttttttggtaaatttttgaaaaatattgctaaaagtgcatttaaggagattgggagacaattagcagaatggagaaagtaagtcttttttttttccaaattattaattgtcctgtgtctatgtacctctagctgttcttttttgtacttttctggttccaaaccagtttattctgtggttctataataagttttgatataatcttggcttcttaaaaactgtgtatcattaaaatatatgttctgcaagaattaaaactgagtccatgaaaataccataggaagacataaaactttaaaaggcaactcaaagatgatggaaacgcacttacaagtggtgaccaaaatttttaggtgaagtcgagcactctaattagagaactggaggaaccacatataacacttaacttcccctaccctgcccctccccaaaagaaaccatgacaaacctagcttttaaaaaatattttaagaaagagaatgaactgtggaatttattggcagccaaggaatgtgtccaagacacatgctgaggttttgaataaaaagtgaacttttgtaatttgaattgggtcccgcttagttcttgaattgttatgaaaatcctatatctgtttgtatatttgcaaaccctttgtattataattgttgatattttccctttttaaaaaataccattgaaatcagcatgacaaaaataacactgttggcacttataggtaacgtgattgattcagtatcttagagtttacagtttgtgttttaaaaaaactgaaggttttttttttaagtgcaacatttctgtatactgtaaaagttataataactgaactgtttggtcgagtctttgtgtgttatattccaaggaaaattgaaagtattcagaaattaaaatattatttgatatctgaaacctggctgtccccactcactgtctttacatctagaagagcccctgtgagctctcgcttagctggccgggcggggggtggtgggggggggcatttgtttactcccctcagtcagtttgttcaaaggtggactactgtatttgcctgtttaatttgggtgtgtgtgtgttggggggggagctgaagttaatggtttatctatggtttaggaagtgccatactgatatagtaaaccacccccattcacctaatcctccttttaattaaaaatggattttccaggaaaaaaaaaaaggcccttatatttgtcacacttaagtgcctgcttagggaaggtattgtgaaaaagtattagaaatcttgagatcagtatctattttatgatcagaaaaaaatactcttttgtacatttctgacagttactcagaagatcgttcaagcaagctaatcacagcattgtaactagaggacagttgtttgcagtgagtttttccttaagtaggtacgattttttaaaatattctgtgattctactctagcgtggttgttgagagagtttcaaattcagtgatacaggttctaagactgaaaggtctacttttaatgtatatatgataacttgcagttggtttccctctcccctccccccctttaccttcagtctgtgagagcatgaccacagggtcaagggaatcttttccattggagttatgtacataaaaacacatcgacattttgacatttcagattgtgtggctacaatctgtactgctcttgggatcctttgtccttagaagccaaattaaggaagagaaagcaggacagagaaaaagaaagaaggaaggagggaaactttacagggtgtgctgatttggaagtagtaactatttcttttggagtctttttttcatttttcctctttctcttttcctggtttggaggaagctcggtgctgggagcttgcaattttgttcttattcaaggtttccaacccacccccccaccgccagtacttcatcatgttgtggtttaattctaattggtgggggggggggaggactagtgagggaggtgaaagaacagggataattttgtaaagtgtattaaacgttaatattcagatccagtcaatacatgcagaccagtaaaatctgatttgtgcagagttctccatctgactctcacttatttctgtagatatatacatatataaatacaagtatgttcttacggcacagtattgctgacctttagttcgaggttttgtcggttgttgttgattttcttcctcttgcaagtgctatccatgtgagtgtgtgaagtttctctaataagtaaaacacaggcccttttccttgtttgttttgtgttagtttattgtaaacagccatttgttgtaaattattattggcattaaattataatttatgattttcaaagcaaaagacaa

SEQ ID NO: 160931 - DNA, 3501 bp, Homo sapiens
  Payload ID: 11440
  Gene Symbol: NR2F2
  Gene Name: nuclear receptor subfamily 2, group F, member 2
  Uniprot ID: P24468
  ENST ID: ENST00000394171
  CDS Start-End: 75-860
ctccttccctcgtcctgggtcccggggtcctgggtacgtttggctagcctgctctggcggtgcagaggggcaggatgccgccgacccagccgacccacgggcagttcgcgctgaccaacggggatcccctcaactgccactcgtacctgtccggatatatttccctgctgttgcgcgcggagccctatcccacgtcgcgcttcggcagccaatgcatgcagcccaacaacatcatgggtatcgagaacatttgcgaactggccgcgaggatgctcttcagcgccgtcgagtgggcccggaacatccccttcttccccgacctgcagatcacggaccaggtggccctgcttcgcctcacctggagcgagctgtttgtgttgaatgcggcgcagtgctccatgcccctccacgtcgccccgctcctggccgccgccggcctgcatgcttcgcccatgtccgccgaccgggtggtcgcctttatggaccacatacggatcttccaagagcaagtggagaagctcaaggcgctgcacgttgactcagccgagtacagctgcctcaaggccatagtcctgttcacctcagatgcctgtggtctctctgatgtagcccatgtggaaagcttgcaggaaaagtctcagtgtgctttggaagaatacgttaggagccagtaccccaaccagccgacgagattcggaaagcttttgcttcgcctcccttccctccgcaccgtctcctcctcagtcatagagcaattgtttttcgtccgtttggtaggtaaaacccccatcgaaaccctcatccgggatatgttactgtccggcagcagttttaactggccgtatatggcaattcaataaataaataaaataagaagggggagtgaaacagagaaagaaaaggcaaaagactggtttgtttgcttaatttccttctgttaagaaaggatataaaaggatgttacaagtttgctaaaagaagagaggggaagaatttaatggactgtgaatttcaaaaaaaaaaaaaaagactgtcaaatgaacttttacagaatgcattaaaaaaaaaaaaaaactcctgtgtcggtcagaacaacttgctacttatcatttttgtataaaaaggaaattagtctttttctttttttggtaaatttttgaaaaatattgctaaaagtgcatttaaggagattgggagacaattagcagaatggagaaagtaagtcttttttttttccaaattattaattgtcctgtgtctatgtacctctagctgttcttttttgtacttttctggttccaaaccagtttattctgtggttctataataagttttgatataatcttggcttcttaaaaactgtgtatcattaaaatatatgttctgcaagaattaaaactgagtccatgaaaataccataggaagacataaaactttaaaaggcaactcaaagatgatggaaacgcacttacaagtggtgaccaaaatttttaggtgaagtcgagcactctaattagagaactggaggaaccacatataacacttaacttcccctaccctgcccctccccaaaagaaaccatgacaaacctagcttttaaaaaatattttaagaaagagaatgaactgtggaatttattggcagccaaggaatgtgtccaagacacatgctgaggttttgaataaaaagtgaacttttgtaatttgaattgggtcccgcttagttcttgaattgttatgaaaatcctatatctgtttgtatatttgcaaaccctttgtattataattgttgatattttccctttttaaaaaataccattgaaatcagcatgacaaaaataacactgttggcacttataggtaacgtgattgattcagtatcttagagtttacagtttgtgttttaaaaaaactgaaggttttttttttaagtgcaacatttctgtatactgtaaaagttataataactgaactgtttggtcgagtctttgtgtgttatattccaaggaaaattgaaagtattcagaaattaaaatattatttgatatctgaaacctggctgtccccactcactgtctttacatctagaagagcccctgtgagctctcgcttagctggccgggcggggggtggtgggggggggcatttgtttactcccctcagtcagtttgttcaaaggtggactactgtatttgcctgtttaatttgggtgtgtgtgtgttggggggggagctgaagttaatggtttatctatggtttaggaagtgccatactgatatagtaaaccacccccattcacctaatcctccttttaattaaaaatggattttccaggaaaaaaaaaaaggcccttatatttgtcacacttaagtgcctgcttagggaaggtattgtgaaaaagtattagaaatcttgagatcagtatctattttatgatcagaaaaaaatactcttttgtacatttctgacagttactcagaagatcgttcaagcaagctaatcacagcattgtaactagaggacagttgtttgcagtgagtttttccttaagtaggtacgattttttaaaatattctgtgattctactctagcgtggttgttgagagagtttcaaattcagtgatacaggttctaagactgaaaggtctacttttaatgtatatatgataacttgcagttggtttccctctcccctccccccctttaccttcagtctgtgagagcatgaccacagggtcaagggaatcttttccattggagttatgtacataaaaacacatcgacattttgacatttcagattgtgtggctacaatctgtactgctcttgggatcctttgtccttagaagccaaattaaggaagagaaagcaggacagagaaaaagaaagaaggaaggagggaaactttacagggtgtgctgatttggaagtagtaactatttcttttggagtctttttttcatttttcctctttctcttttcctggtttggaggaagctcggtgctgggagcttgcaattttgttcttattcaaggtttccaacccacccccccaccgccagtacttcatcatgttgtggtttaattctaattggtgggggggggggaggactagtgagggaggtgaaagaacagggataattttgtaaagtgtattaaacgttaatattcagatccagtcaatacatgcagaccagtaaaatctgatttgtgcagagttctccatctgactctcacttatttctgtagatatatacatatataaatacaagtatgttcttacggcacagtattgctgacctttagttcgaggttttgtcggttgttgttgattttcttcctcttgcaagtgctatccatgtgagtgtgtgaagtttctctaataagtaaaacacaggcccttttccttgtttgttttgtgttagtttattgtaaacagccatttgttgtaaattattattggcattaaattataatttatgattttcaaagcaaaagacaa

SEQ ID NO: 160932 - DNA, 1712 bp, Homo sapiens
  Payload ID: 11440
  Gene Symbol: NR2F2
  Gene Name: nuclear receptor subfamily 2, group F, member 2
  Uniprot ID: P24468
  ENST ID: ENST00000453270
  CDS Start-End: 713-1498
gcgaggggccctgggcggctgctttcgctctgcgcgagttgggtctttgtgatataaaattcgccgagcgccgcgagccgtgctttgccaatggcgcgctcggcgcggggcgcgggctccgggttggggcgagccaacgccggggtttctttgtgtttctgcgagagcgactctcccggtccggagtcagataacagcctgggcccgagcctcgccggctttccccggcccttacaggccctgcccaggctccgctagtgccggccgcctgctccctgcctctcccggcttcctctctctttagccggcctctctctctccgccctctccctccgtctctttctccgagcacactgattagacagacgccagacctccgctctctgcttgtctctcactgggggggttccccgccgggctggggctggggcttcggggtttgtgggagagtcgttccggagtggccacaggccgtctggggtggaccctcgtgccttttgcaaaagcgcctcaccctccccccagactcgcccctcccgctccctctcctccaatcaataagaaatatcagctgtttagcagtaaagaagaaagatgccctcagaatgctacatcccgcccacagcgccggggaccccgaggcaaggtggccaattctgggtcctcggcggaccagccccgagcgggcctcggagcggtgcagaggggcaggatgccgccgacccagccgacccacgggcagttcgcgctgaccaacggggatcccctcaactgccactcgtacctgtccggatatatttccctgctgttgcgcgcggagccctatcccacgtcgcgcttcggcagccaatgcatgcagcccaacaacatcatgggtatcgagaacatttgcgaactggccgcgaggatgctcttcagcgccgtcgagtgggcccggaacatccccttcttccccgacctgcagatcacggaccaggtggccctgcttcgcctcacctggagcgagctgtttgtgttgaatgcggcgcagtgctccatgcccctccacgtcgccccgctcctggccgccgccggcctgcatgcttcgcccatgtccgccgaccgggtggtcgcctttatggaccacatacggatcttccaagagcaagtggagaagctcaaggcgctgcacgttgactcagccgagtacagctgcctcaaggccatagtcctgttcacctcagatgcctgtggtctctctgatgtagcccatgtggaaagcttgcaggaaaagtctcagtgtgctttggaagaatacgttaggagccagtaccccaaccagccgacgagattcggaaagcttttgcttcgcctcccttccctccgcaccgtctcctcctcagtcatagagcaattgtttttcgtccgtttggtaggtaaaacccccatcgaaaccctcatccgggatatgttactgtccggcagcagttttaactggccgtatatggcaattcaataaataaataaaataagaagggggagtgaaacagagaaagaaaaggcaaaagactggtttgtttgcttaatttccttctgttaagaaaggatataaaaggatgttacaagtttgctaaaagaagagaggggaagaatttaatggactgtgaatttcaaaaaaaaaaaaaaagactgtcaaatgaacttttacagaatgcattaaaaaaaaaaaaaaa

SEQ ID NO: 160933 - DNA, 2214 bp, Homo sapiens
  Payload ID: 11440
  Gene Symbol: NR2F2
  Gene Name: nuclear receptor subfamily 2, group F, member 2
  Uniprot ID: P24468
  ENST ID: ENST00000421109
  CDS Start-End: 373-1218
aggatcactccagacatctcctacctacggtttggggttttttttcttaaaggcgaggcttgcattcctcagcagctatgtacaaagctccctgaaaccttgtctctctaaagttagtgtgcagggttttccaaggctgagagagcctaatacatggggaagcacttccttgaggtggaagatctctcccttcacctttcctctttttccctgcaggctagtgcctactttttatcagtttgcacaatcgcttagataaacaccgaggaggagattctctttaattatcaaagacacatcttttcagggggccaacaaagcatttatttcacccgccaaactaaaggagagttattccagtttaggaggaagatgcaagcggtttgggaccttgaacaaggcaaatatggttttgcggtgcagaggggcaggatgccgccgacccagccgacccacgggcagttcgcgctgaccaacggggatcccctcaactgccactcgtacctgtccggatatatttccctgctgttgcgcgcggagccctatcccacgtcgcgcttcggcagccaatgcatgcagcccaacaacatcatgggtatcgagaacatttgcgaactggccgcgaggatgctcttcagcgccgtcgagtgggcccggaacatccccttcttccccgacctgcagatcacggaccaggtggccctgcttcgcctcacctggagcgagctgtttgtgttgaatgcggcgcagtgctccatgcccctccacgtcgccccgctcctggccgccgccggcctgcatgcttcgcccatgtccgccgaccgggtggtcgcctttatggaccacatacggatcttccaagagcaagtggagaagctcaaggcgctgcacgttgactcagccgagtacagctgcctcaaggccatagtcctgttcacctcagatgcctgtggtctctctgatgtagcccatgtggaaagcttgcaggaaaagtctcagtgtgctttggaagaatacgttaggagccagtaccccaaccagccgacgagattcggaaagcttttgcttcgcctcccttccctccgcaccgtctcctcctcagtcatagagcaattgtttttcgtccgtttggtaggtaaaacccccatcgaaaccctcatccgggatatgttactgtccggcagcagttttaactggccgtatatggcaattcaataaataaataaaataagaagggggagtgaaacagagaaagaaaaggcaaaagactggtttgtttgcttaatttccttctgttaagaaaggatataaaaggatgttacaagtttgctaaaagaagagaggggaagaatttaatggactgtgaatttcaaaaaaaaaaaaaaagactgtcaaatgaacttttacagaatgcattaaaaaaaaaaaaaaactcctgtgtcggtcagaacaacttgctacttatcatttttgtataaaaaggaaattagtctttttctttttttggtaaatttttgaaaaatattgctaaaagtgcatttaaggagattgggagacaattagcagaatggagaaagtaagtcttttttttttccaaattattaattgtcctgtgtctatgtacctctagctgttcttttttgtacttttctggttccaaaccagtttattctgtggttctataataagttttgatataatcttggcttcttaaaaactgtgtatcattaaaatatatgttctgcaagaattaaaactgagtccatgaaaataccataggaagacataaaactttaaaaggcaactcaaagatgatggaaacgcacttacaagtggtgaccaaaatttttaggtgaagtcgagcactctaattagagaactggaggaaccacatataacacttaacttcccctaccctgcccctccccaaaagaaaccatgacaaacctagcttttaaaaaatattttaagaaagagaatgaactgtggaatttattggcagccaaggaatgtgtccaagacacatgctgaggttttgaataaaaagtgaacttttgtaatttgaattgggtcccgcttagttcttgaattgttatgaaaatcctatatctgtttgtatatttgcaaaccctttgtattataattgttgatattttccctttttaaaaaataccattgaaatcagcatgacaaaaataacactgttggcactta

SEQ ID NO: 160934 - DNA, 382 bp, Homo sapiens
  Payload ID: 11440
  Gene Symbol: NR2F2
  Gene Name: nuclear receptor subfamily 2, group F, member 2
  ENST ID: ENST00000559679
  CDS Start-End: 103-382
gagacgggaaggtatcggcctctcatttctccttccctcgtcctgggtcccggggtcctgggtacgtttggctagcctgctctggcggtgcagaggggcaggatgccgccgacccagccgacccacgggcagttcgcgctgaccaacggggatcccctcaactgccactcgtacctgtccggatatatttccctgctgttgcgcgcggagccctatcccacgtcgcgcttcggcagccaatgcatgcagcccaacaacatcatgggtatcgagaacatttgcgaactggccgcgaggatgctcttcagcgccgtcgagtgggcccggaacatccccttcttccccgacctgcagatcacggaccaggtggccctgcttcgcc

SEQ ID NO: 160935 - DNA, 2404 bp, Homo sapiens
  Payload ID: 11441
  Gene Symbol: NR2F6
  Gene Name: nuclear receptor subfamily 2, group F, member 6
  Uniprot ID: P10588
  ENST ID: ENST00000291442
  CDS Start-End: 721-1935
gcgaatggaacgctgtgtgtcaaaccggccgcagcgcgaggccggcgcgcggggtcggtggcggtggcggcggcgagagcgaggcttgggcccaggcgcaggcccaggccaggcaggagcggccgcagcgggggcggcagctccagaggcgccggcccagcggccctgcaggcccggagcggcagccgcgggcgccgggggacccagggggcgcggcgatcagccccggcgcgcacccgccgcccctccccccccgccacgggcggccgcgcaacttgcggccaaactttccccccggcctcccgcgctcggatggcggcccgctgagttggccgcagcccccgggcgagcggcggccaggccagaggacgccccctgcgcggctcgggccgggccatggcccgcgcgcccccgccggggccccagggcggcgggacgcgagtcctctgggcccccggcccgcgcctctagcgtgcccctcccggccccgggcccggccccgcgcacgcgtgggaaagttggcctggaaccggcccgaccagttccgcccgggcgcgaggaccggccgcaggaagttgctgcaaaacttttttggggggtgcagcccgtgccccccgcgcgccggggccgaatgcgcgccgcgtagggtcccccgggccgagaggggtgcccggagggaagagcgcggtgggggcgccccggccccgctgccctggggctatggccatggtgaccggcggctggggcggccccggcggcgacacgaacggcgtggacaaggcgggcggctacccgcgcgcggccgaggacgactcggcctcgccccccggtgccgccagcgacgccgagccgggcgacgaggagcggccggggctgcaggtggactgcgtggtgtgcggggacaagtcgagcggcaagcattacggtgtcttcacctgcgagggctgcaagagctttttcaagcgaagcatccgccgcaacctcagctacacctgccggtccaaccgtgactgccagatcgaccagcaccaccggaaccagtgccagtactgccgtctcaagaagtgcttccgggtgggcatgaggaaggaggcggtgcagcgcggccgcatcccgcactcgctgcctggtgccgtggccgcctcctcgggcagccccccgggctcggcgctggcggcagtggcgagcggcggagacctcttcccggggcagccggtgtccgaactgatcgcgcagctgctgcgcgctgagccctaccctgcggcggccggacgcttcggcgcagggggcggcgcggcgggcgcggtgctgggcatcgacaacgtgtgcgagctggcggcgcggctgctcttcagcaccgtggagtgggcgcgccacgcgcccttcttccccgagctgccggtggccgaccaggtggcgctgctgcgcctgagctggagcgagctcttcgtgctgaacgcggcgcaggcggcgctgcccctgcacacggcgccgctactggccgccgccggcctccacgccgcgcctatggccgccgagcgcgccgtggctttcatggaccaggtgcgcgccttccaggagcaggtggacaagctgggccgcctgcaggtcgactcggccgagtatggctgcctcaaggccatcgcgctcttcacgcccgacgcctgtggcctctcagacccggcccacgttgagagcctgcaggagaaggcgcaggtggccctcaccgagtatgtgcgggcgcagtacccgtcccagccccagcgcttcgggcgcctgctgctgcggctccccgccctgcgcgcggtccctgcctccctcatctcccagctgttcttcatgcgcctggtggggaagacgcccattgagacactgatcagagacatgctgctgtcggggagtaccttcaactggccctacggctcgggccagtgaccatgacggggccacgtgtgctgtggccaggcctgcagacagacctcaagggacagggaatgctgaggcctcgaggggcctcccggggcccaggactctggcttctctcctcagacttctattttttaaagactgtgaaatgtttgtcttttctgttttttaaatgatcatgaaaccaaaaagagactgatcatccaggcctcagcctcatcctccccaggacccctgtccaggatggagggtccaatcctaggacagccttgttcctcagcacccctagcatgaacttgtgggatggtggggttggcttccctggcatgatggacaaaggcctggcgtcggccagaggggctgctccagtgggcaggggtagctagcgtgtgccaggcagatcctctggacacgtaacctatgtcagacactacatgatgactcaaggccaataataaagacatttcctacctgcaca

SEQ ID NO: 160936 - DNA, 731 bp, Homo sapiens
  Payload ID: 11441
  Gene Symbol: NR2F6
  Gene Name: nuclear receptor subfamily 2, group F, member 6
  ENST ID: ENST00000596878
  CDS Start-End: 355-731
cggccgcgcggatcgatacggcgcgcccttggggtcaaatatcacttccaaagtcgctgtggctacggaggcggcagacggagggaggctggggtggcacggggcggccttcttcgcatgaggggcccagcggtgggggtgggggtgggagctgggcttgcccatctcagggaacccctctgggctcactctgggccttgggtcaccggaaatcgccactggaaggccggcagggccaccggaattgactgaaacgtccctctcccccaggggtccaaccgtgactgccagatcgaccagcaccaccggaaccagtgccagtactgccgtctcaagaagtgcttccgggtgggcatgaggaaggaggcggtgcagcgcggccgcatcccgcactcgctgcctggtgccgtggccgcctcctcgggcagccccccgggctcggcgctggcggcagtggcgagcggcggagacctcttcccggggcagccggtgtccgaactgatcgcgcagctgctgcgcgctgagccctaccctgcggcggccggacgcttcggcgcagggggcggcgcggcgggcgcggtgctgggcatcgacaacgtgtgcgagctggcggcgcggctgctcttcagcaccgtggagtgggcgcgccacgcgcccttcttccccgagctgccggtggccgaccaggtggcgctgctgcgcctgagctggagcgagctcttcgtgctgaa

SEQ ID NO: 160937 - DNA, 3556 bp, Homo sapiens
  Payload ID: 11442
  Gene Symbol: NR3C1
  Gene Name: nuclear receptor subfamily 3, group C, member 1 (glucocorticoid receptor)
  Uniprot ID: P04150
  ENST ID: ENST00000231509
  CDS Start-End: 493-2829
ggcgccgcctccacccgctccccgctcggtcccgctcgctcgcccaggccgggctgccctttcgcgtgtccgcgctctcttccctccgccgccgcctcctccattttgcgagctcgtgtctgtgacgggagcccgagtcaccgcctgcccgtcggggacggattctgtgggtggaaggagacgccgcagccggagcggccgaagcagctgggaccgggacggggcacgcgcgcccggaacctcgacccgcggagcccggcgcggggcggagggctggcttgtcagctgggcaatgggagactttcttaaataggggctctccccccacccatggagaaaggggcggctgtttacttcctttttttagaaaaaaaaaatatatttccctcctgctccttctgcgttcacaagctaagttgtttatctcggctgcggcgggaactgcggacggtggcgggcgagcggctcctctgccagagttgatattcactgatggactccaaagaatcattaactcctggtagagaagaaaaccccagcagtgtgcttgctcaggagaggggagatgtgatggacttctataaaaccctaagaggaggagctactgtgaaggtttctgcgtcttcaccctcactggctgtcgcttctcaatcagactccaagcagcgaagacttttggttgattttccaaaaggctcagtaagcaatgcgcagcagccagatctgtccaaagcagtttcactctcaatgggactgtatatgggagagacagaaacaaaagtgatgggaaatgacctgggattcccacagcagggccaaatcagcctttcctcgggggaaacagacttaaagcttttggaagaaagcattgcaaacctcaataggtcgaccagtgttccagagaaccccaagagttcagcatccactgctgtgtctgctgcccccacagagaaggagtttccaaaaactcactctgatgtatcttcagaacagcaacatttgaagggccagactggcaccaacggtggcaatgtgaaattgtataccacagaccaaagcacctttgacattttgcaggatttggagttttcttctgggtccccaggtaaagagacgaatgagagtccttggagatcagacctgttgatagatgaaaactgtttgctttctcctctggcgggagaagacgattcattccttttggaaggaaactcgaatgaggactgcaagcctctcattttaccggacactaaacccaaaattaaggataatggagatctggttttgtcaagccccagtaatgtaacactgccccaagtgaaaacagaaaaagaagatttcatcgaactctgcacccctggggtaattaagcaagagaaactgggcacagtttactgtcaggcaagctttcctggagcaaatataattggtaataaaatgtctgccatttctgttcatggtgtgagtacctctggaggacagatgtaccactatgacatgaatacagcatccctttctcaacagcaggatcagaagcctatttttaatgtcattccaccaattcccgttggttccgaaaattggaataggtgccaaggatctggagatgacaacttgacttctctggggactctgaacttccctggtcgaacagttttttctaatggctattcaagccccagcatgagaccagatgtaagctctcctccatccagctcctcaacagcaacaacaggaccacctcccaaactctgcctggtgtgctctgatgaagcttcaggatgtcattatggagtcttaacttgtggaagctgtaaagttttcttcaaaagagcagtggaaggtagacagcacaattacctatgtgctggaaggaatgattgcatcatcgataaaattcgaagaaaaaactgcccagcatgccgctatcgaaaatgtcttcaggctggaatgaacctggaagctcgaaaaacaaagaaaaaaataaaaggaattcagcaggccactacaggagtctcacaagaaacctctgaaaatcctggtaacaaaacaatagttcctgcaacgttaccacaactcacccctaccctggtgtcactgttggaggttattgaacctgaagtgttatatgcaggatatgatagctctgttccagactcaacttggaggatcatgactacgctcaacatgttaggagggcggcaagtgattgcagcagtgaaatgggcaaaggcaataccaggtttcaggaacttacacctggatgaccaaatgaccctactgcagtactcctggatgtttcttatggcatttgctctggggtggagatcatatagacaatcaagtgcaaacctgctgtgttttgctcctgatctgattattaatgagcagagaatgactctaccctgcatgtacgaccaatgtaaacacatgctgtatgtttcctctgagttacacaggcttcaggtatcttatgaagagtatctctgtatgaaaaccttactgcttctctcttcagttcctaaggacggtctgaagagccaagagctatttgatgaaattagaatgacctacatcaaagagctaggaaaagccattgtcaagagggaaggaaactccagccagaactggcagcggttttatcaactgacaaaactcttggattctatgcatgaagtggttgaaaatctccttaactattgcttccaaacatttttggataagaccatgagtattgaattccccgagatgttagctgaaatcatcaccaatcagataccaaaatattcaaatggaaatatcaaaaaacttctgtttcatcaaaagtgactgccttaataagaatggttgccttaaagaaagtcgaattaatagcttttattgtataaactatcagtttgtcctgtagaggttttgttgttttattttttattgttttcatctgttgttttgttttaaatacgcactacatgtggtttatagagggccaagacttggcaacagaagcagttgagtcgtcatcacttttcagtgatgggagagtagatggtgaaatttattagttaatatatcccagaaattagaaaccttaatatgtggacgtaatctccacagtcaaagaaggatggcacctaaaccaccagtgcccaaagtctgtgtgatgaactttctcttcatactttttttcacagttggctggatgaaattttctagactttctgttggtgtatcccccccctgtatagttaggatagcatttttgatttatgcatggaaacctgaaaaaaagtttacaagtgtatatcagaaaagggaagttgtgccttttatagctattactgtctggttttaacaatttcctttatatttagtgaactacgcttgctcattttttcttacataattttttattcaagttattgtacagctgtttaagatgggcagctagttcgtagctttcccaaataaactctaaacattaatcaatcatctgtgtgaaaatgggttggtgcttctaacctgatggcacttagctatcagaagaccacaaaaattg

SEQ ID NO: 160938 - DNA, 7286 bp, Homo sapiens
  Payload ID: 11442
  Gene Symbol: NR3C1
  Gene Name: nuclear receptor subfamily 3, group C, member 1 (glucocorticoid receptor)
  Uniprot ID: P04150
  ENST ID: ENST00000343796
  CDS Start-End: 995-3328
aggttatgtaagggtttgctttcaccccattcaaaaggtacctcttcctcttctcttgctccctctcgccctcattcttgtgcctatgcagacatttgagtagaggcgaatcactttcacttctgctggggaaattgcaacacgcttctttaaatggcagagagaaggagaaaacttagatcttctgataccaaatcactggaccttagaaggtcagaaatctttcaagccctgcaggaccgtaaaatgcgcatgtgtccaacggaagcactggggcatgagtggggaaggaatagaaacagaaagagggtaagagaagaaaaaagggaaagtggtgaaggcagggaggaaaattgcttagtgtgaatatgcacgcattcatttagttttcaaatccttgttgagcatgataaaattcccagcatcagacctcacatgttggtttccattaggatctgcctgggggaatatctgctgaatcagtggctctgagctgaactaggaaattcaccataattaggagagtcactgtatttctctccaaaaaaaaaaaagttatacccgagagacaggatcttctgatctgaaattttcttcacttctgaaattctctggtttgtgctcatcgttggtagctatttgttcatcaagagttgtgtagctggcttcttctgaaaaaaggaatctgcgtcatatctaagtcagatttcattctggtgctctcagagcagttagcccaggaaaggggccagcttctgtgacgactgctgcagaggcaggtgcagtttgtgtgccacagatattaactttgataagcacttaatgagtgccttctctgtgcgagaatggggaggaacaaaatgcagctcctaccctcctcgggctttagttgtaccttaataacaggaattttcatctgcctggctcctttcctcaaagaacaaagaagactttgcttcattaaagtgtctgagaaggaagttgatattcactgatggactccaaagaatcattaactcctggtagagaagaaaaccccagcagtgtgcttgctcaggagaggggagatgtgatggacttctataaaaccctaagaggaggagctactgtgaaggtttctgcgtcttcaccctcactggctgtcgcttctcaatcagactccaagcagcgaagacttttggttgattttccaaaaggctcagtaagcaatgcgcagcagccagatctgtccaaagcagtttcactctcaatgggactgtatatgggagagacagaaacaaaagtgatgggaaatgacctgggattcccacagcagggccaaatcagcctttcctcgggggaaacagacttaaagcttttggaagaaagcattgcaaacctcaataggtcgaccagtgttccagagaaccccaagagttcagcatccactgctgtgtctgctgcccccacagagaaggagtttccaaaaactcactctgatgtatcttcagaacagcaacatttgaagggccagactggcaccaacggtggcaatgtgaaattgtataccacagaccaaagcacctttgacattttgcaggatttggagttttcttctgggtccccaggtaaagagacgaatgagagtccttggagatcagacctgttgatagatgaaaactgtttgctttctcctctggcgggagaagacgattcattccttttggaaggaaactcgaatgaggactgcaagcctctcattttaccggacactaaacccaaaattaaggataatggagatctggttttgtcaagccccagtaatgtaacactgccccaagtgaaaacagaaaaagaagatttcatcgaactctgcacccctggggtaattaagcaagagaaactgggcacagtttactgtcaggcaagctttcctggagcaaatataattggtaataaaatgtctgccatttctgttcatggtgtgagtacctctggaggacagatgtaccactatgacatgaatacagcatccctttctcaacagcaggatcagaagcctatttttaatgtcattccaccaattcccgttggttccgaaaattggaataggtgccaaggatctggagatgacaacttgacttctctggggactctgaacttccctggtcgaacagttttttctaatggctattcaagccccagcatgagaccagatgtaagctctcctccatccagctcctcaacagcaacaacaggaccacctcccaaactctgcctggtgtgctctgatgaagcttcaggatgtcattatggagtcttaacttgtggaagctgtaaagttttcttcaaaagagcagtggaaggacagcacaattacctatgtgctggaaggaatgattgcatcatcgataaaattcgaagaaaaaactgcccagcatgccgctatcgaaaatgtcttcaggctggaatgaacctggaagctcgaaaaacaaagaaaaaaataaaaggaattcagcaggccactacaggagtctcacaagaaacctctgaaaatcctggtaacaaaacaatagttcctgcaacgttaccacaactcacccctaccctggtgtcactgttggaggttattgaacctgaagtgttatatgcaggatatgatagctctgttccagactcaacttggaggatcatgactacgctcaacatgttaggagggcggcaagtgattgcagcagtgaaatgggcaaaggcaataccaggtttcaggaacttacacctggatgaccaaatgaccctactgcagtactcctggatgtttcttatggcatttgctctggggtggagatcatatagacaatcaagtgcaaacctgctgtgttttgctcctgatctgattattaatgagcagagaatgactctaccctgcatgtacgaccaatgtaaacacatgctgtatgtttcctctgagttacacaggcttcaggtatcttatgaagagtatctctgtatgaaaaccttactgcttctctcttcagttcctaaggacggtctgaagagccaagagctatttgatgaaattagaatgacctacatcaaagagctaggaaaagccattgtcaagagggaaggaaactccagccagaactggcagcggttttatcaactgacaaaactcttggattctatgcatgaagtggttgaaaatctccttaactattgcttccaaacatttttggataagaccatgagtattgaattccccgagatgttagctgaaatcatcaccaatcagataccaaaatattcaaatggaaatatcaaaaaacttctgtttcatcaaaagtgactgccttaataagaatggttgccttaaagaaagtcgaattaatagcttttattgtataaactatcagtttgtcctgtagaggttttgttgttttattttttattgttttcatctgttgttttgttttaaatacgcactacatgtggtttatagagggccaagacttggcaacagaagcagttgagtcgtcatcacttttcagtgatgggagagtagatggtgaaatttattagttaatatatcccagaaattagaaaccttaatatgtggacgtaatctccacagtcaaagaaggatggcacctaaaccaccagtgcccaaagtctgtgtgatgaactttctcttcatactttttttcacagttggctggatgaaattttctagactttctgttggtgtatcccccccctgtatagttaggatagcatttttgatttatgcatggaaacctgaaaaaaagtttacaagtgtatatcagaaaagggaagttgtgccttttatagctattactgtctggttttaacaatttcctttatatttagtgaactacgcttgctcattttttcttacataattttttattcaagttattgtacagctgtttaagatgggcagctagttcgtagctttcccaaataaactctaaacattaatcaatcatctgtgtgaaaatgggttggtgcttctaacctgatggcacttagctatcagaagaccacaaaaattgactcaaatctccagtattcttgtcaaaaaaaaaaaaaaaaaagctcatattttgtatatatctgcttcagtggagaattatataggttgtgcaaattaacagtcctaactggtatagagcacctagtccagtgacctgctgggtaaactgtggatgatggttgcaaaagactaatttaaaaaataactaccaagaggccctgtctgtacctaacgccctatttttgcaatggctatatggcaagaaagctggtaaactatttgtctttcaggaccttttgaagtagtttgtataacttcttaaaagttgtgattccagataaccagctgtaacacagctgagagacttttaatcagacaaagtaattcctctcactaaactttacccaaaaactaaatctctaatatggcaaaaatggctagacacccattttcacattcccatctgtcaccaattggttaatctttcctgatggtacaggaaagctcagctactgatttttgtgatttagaactgtatgtcagacatccatgtttgtaaaactacacatccctaatgtgtgccatagagtttaacacaagtcctgtgaatttcttcactgttgaaaattattttaaacaaaatagaagctgtagtagccctttctgtgtgcaccttaccaactttctgtaaactcaaaacttaacatatttactaagccacaagaaatttgatttctattcaaggtggccaaattatttgtgtaatagaaaactgaaaatctaatattaaaaatatggaacttctaatatatttttatatttagttatagtttcagatatatatcatattggtattcactaatctgggaagggaagggctactgcagctttacatgcaatttattaaaatgattgtaaaatagcttgtatagtgtaaaataagaatgatttttagatgagattgttttatcatgacatgttatatattttttgtaggggtcaaagaaatgctgatggataacctatatgatttatagtttgtacatgcattcatacaggcagcgatggtctcagaaaccaaacagtttgctctaggggaagagggagatggagactggtcctgtgtgcagtgaaggttgctgaggctctgacccagtgagattacagaggaagttatcctctgcctcccattctgaccacccttctcattccaacagtgagtctgtcagcgcaggtttagtttactcaatctccccttgcactaaagtatgtaaagtatgtaaacaggagacaggaaggtggtgcttacatccttaaaggcaccatctaatagcgggttactttcacatacagccctcccccagcagttgaatgacaacagaagcttcagaagtttggcaatagtttgcatagaggtaccagcaatatgtaaatagtgcagaatctcataggttgccaataatacactaattcctttctatcctacaacaagagtttatttccaaataaaatgaggacatgtttttgttttctttgaatgctttttgaatgttatttgttattttcagtattttggagaaattatttaataaaaaaacaatcatttgctttttgaatgctctctaaaagggaatgtaatattttaagatggtgtgtaacccggctggataaatttttggtgcctaagaaaactgcttgaatattcttatcaatgacagtgttaagtttcaaaaagagcttctaaaacgtagattatcattcctttatagaatgttatgtggttaaaaccagaaagcacatctcacacattaatctgattttcatcccaacaatcttggcgctcaaaaaatagaactcaatgagaaaaagaagattatgtgcacttcgttgtcaataataagtcaactgatgctcatcgacaactataggaggcttttcattaaatgggaaaagaagctgtgcccttttaggatacgtgggggaaaagaaagtcatcttaattatgtttaattgtggatttaagtgctatatggtggtgctgtttgaaagcagatttatttcctatgtatgtgttatctggccatcccaacccaaactgttgaagtttgtagtaacttcagtgagagttggttactcacaacaaatcctgaaaagtatttttagtgtttgtaggtattctgtgggatactatacaagcagaactgaggcacttaggacataacacttttggggtatatatatccaaatgcctaaaactatgggaggaaaccttggccaccccaaaaggaaaactaacatgatttgtgtctatgaagtgctggataattagcatgggatgagctctgggcatgccatgaaggaaagccacgctcccttcagaattcagaggcagggagcaattccagtttcacctaagtctcataattttagttcccttttaaaaaccctgaaaactacatcaccatggaatgaaaaatattgttatacaatacattgatctgtcaaacttccagaaccatggtagccttcagtgagatttccatcttggctggtcactccctgactgtagctgtaggtgaatgtgtttttgtgtgtgtgtgtctggttttagtgtcagaagggaaataaaagtgtaaggaggacactttaaaccctttgggtggagtttcgtaatttcccagactattttcaagcaacctggtccacccaggattagtgaccaggttttcaggaaaggatttgcttctctctagaaaatgtctgaaaggattttattttctgatgaaaggctgtatgaaaataccctcctcaaataacttgcttaactacatatagattcaagtgtgtcaatattctattttgtatattaaatgctatataatggggacaaatctatattatactgtgtatggcattattaagaagctttttcattattttttatcacagtaattttaaaatgtgtaaaaattaaaaccagtgactcctgtttaaaaataaaagttgtagttttttattcatgctgaataataatctgtagttaaaaaaaaagtgtctttttacctacgcagtgaaatgtcagactgtaaaaccttgtgtggaaatgtttaacttttattttttcatttaaatttgctgttctggtattaccaaaccacacatttgtaccgaattggcagtaaatgttagccatttacagcaatgccaaatatggagaaacatcataataaaaaaatctgctttttcatta

SEQ ID NO: 160939 - DNA, 6795 bp, Homo sapiens
  Payload ID: 11442
  Gene Symbol: NR3C1
  Gene Name: nuclear receptor subfamily 3, group C, member 1 (glucocorticoid receptor)
  Uniprot ID: P04150
  ENST ID: ENST00000394464
  CDS Start-End: 504-2837
gtgcgcgccgtggcgccgcctccacccgctccccgctcggtcccgctcgctcgcccaggccgggctgccctttcgcgtgtccgcgctctcttccctccgccgccgcctcctccattttgcgagctcgtgtctgtgacgggagcccgagtcaccgcctgcccgtcggggacggattctgtgggtggaaggagacgccgcagccggagcggccgaagcagctgggaccgggacggggcacgcgcgcccggaacctcgacccgcggagcccggcgcggggcggagggctggcttgtcagctgggcaatgggagactttcttaaataggggctctccccccacccatggagaaaggggcggctgtttacttcctttttttagaaaaaaaaaatatatttccctcctgctccttctgcgttcacaagctaagttgtttatctcggctgcggcgggaactgcggacggtggcgggcgagcggctcctctgccagagttgatattcactgatggactccaaagaatcattaactcctggtagagaagaaaaccccagcagtgtgcttgctcaggagaggggagatgtgatggacttctataaaaccctaagaggaggagctactgtgaaggtttctgcgtcttcaccctcactggctgtcgcttctcaatcagactccaagcagcgaagacttttggttgattttccaaaaggctcagtaagcaatgcgcagcagccagatctgtccaaagcagtttcactctcaatgggactgtatatgggagagacagaaacaaaagtgatgggaaatgacctgggattcccacagcagggccaaatcagcctttcctcgggggaaacagacttaaagcttttggaagaaagcattgcaaacctcaataggtcgaccagtgttccagagaaccccaagagttcagcatccactgctgtgtctgctgcccccacagagaaggagtttccaaaaactcactctgatgtatcttcagaacagcaacatttgaagggccagactggcaccaacggtggcaatgtgaaattgtataccacagaccaaagcacctttgacattttgcaggatttggagttttcttctgggtccccaggtaaagagacgaatgagagtccttggagatcagacctgttgatagatgaaaactgtttgctttctcctctggcgggagaagacgattcattccttttggaaggaaactcgaatgaggactgcaagcctctcattttaccggacactaaacccaaaattaaggataatggagatctggttttgtcaagccccagtaatgtaacactgccccaagtgaaaacagaaaaagaagatttcatcgaactctgcacccctggggtaattaagcaagagaaactgggcacagtttactgtcaggcaagctttcctggagcaaatataattggtaataaaatgtctgccatttctgttcatggtgtgagtacctctggaggacagatgtaccactatgacatgaatacagcatccctttctcaacagcaggatcagaagcctatttttaatgtcattccaccaattcccgttggttccgaaaattggaataggtgccaaggatctggagatgacaacttgacttctctggggactctgaacttccctggtcgaacagttttttctaatggctattcaagccccagcatgagaccagatgtaagctctcctccatccagctcctcaacagcaacaacaggaccacctcccaaactctgcctggtgtgctctgatgaagcttcaggatgtcattatggagtcttaacttgtggaagctgtaaagttttcttcaaaagagcagtggaaggacagcacaattacctatgtgctggaaggaatgattgcatcatcgataaaattcgaagaaaaaactgcccagcatgccgctatcgaaaatgtcttcaggctggaatgaacctggaagctcgaaaaacaaagaaaaaaataaaaggaattcagcaggccactacaggagtctcacaagaaacctctgaaaatcctggtaacaaaacaatagttcctgcaacgttaccacaactcacccctaccctggtgtcactgttggaggttattgaacctgaagtgttatatgcaggatatgatagctctgttccagactcaacttggaggatcatgactacgctcaacatgttaggagggcggcaagtgattgcagcagtgaaatgggcaaaggcaataccaggtttcaggaacttacacctggatgaccaaatgaccctactgcagtactcctggatgtttcttatggcatttgctctggggtggagatcatatagacaatcaagtgcaaacctgctgtgttttgctcctgatctgattattaatgagcagagaatgactctaccctgcatgtacgaccaatgtaaacacatgctgtatgtttcctctgagttacacaggcttcaggtatcttatgaagagtatctctgtatgaaaaccttactgcttctctcttcagttcctaaggacggtctgaagagccaagagctatttgatgaaattagaatgacctacatcaaagagctaggaaaagccattgtcaagagggaaggaaactccagccagaactggcagcggttttatcaactgacaaaactcttggattctatgcatgaagtggttgaaaatctccttaactattgcttccaaacatttttggataagaccatgagtattgaattccccgagatgttagctgaaatcatcaccaatcagataccaaaatattcaaatggaaatatcaaaaaacttctgtttcatcaaaagtgactgccttaataagaatggttgccttaaagaaagtcgaattaatagcttttattgtataaactatcagtttgtcctgtagaggttttgttgttttattttttattgttttcatctgttgttttgttttaaatacgcactacatgtggtttatagagggccaagacttggcaacagaagcagttgagtcgtcatcacttttcagtgatgggagagtagatggtgaaatttattagttaatatatcccagaaattagaaaccttaatatgtggacgtaatctccacagtcaaagaaggatggcacctaaaccaccagtgcccaaagtctgtgtgatgaactttctcttcatactttttttcacagttggctggatgaaattttctagactttctgttggtgtatcccccccctgtatagttaggatagcatttttgatttatgcatggaaacctgaaaaaaagtttacaagtgtatatcagaaaagggaagttgtgccttttatagctattactgtctggttttaacaatttcctttatatttagtgaactacgcttgctcattttttcttacataattttttattcaagttattgtacagctgtttaagatgggcagctagttcgtagctttcccaaataaactctaaacattaatcaatcatctgtgtgaaaatgggttggtgcttctaacctgatggcacttagctatcagaagaccacaaaaattgactcaaatctccagtattcttgtcaaaaaaaaaaaaaaaaaagctcatattttgtatatatctgcttcagtggagaattatataggttgtgcaaattaacagtcctaactggtatagagcacctagtccagtgacctgctgggtaaactgtggatgatggttgcaaaagactaatttaaaaaataactaccaagaggccctgtctgtacctaacgccctatttttgcaatggctatatggcaagaaagctggtaaactatttgtctttcaggaccttttgaagtagtttgtataacttcttaaaagttgtgattccagataaccagctgtaacacagctgagagacttttaatcagacaaagtaattcctctcactaaactttacccaaaaactaaatctctaatatggcaaaaatggctagacacccattttcacattcccatctgtcaccaattggttaatctttcctgatggtacaggaaagctcagctactgatttttgtgatttagaactgtatgtcagacatccatgtttgtaaaactacacatccctaatgtgtgccatagagtttaacacaagtcctgtgaatttcttcactgttgaaaattattttaaacaaaatagaagctgtagtagccctttctgtgtgcaccttaccaactttctgtaaactcaaaacttaacatatttactaagccacaagaaatttgatttctattcaaggtggccaaattatttgtgtaatagaaaactgaaaatctaatattaaaaatatggaacttctaatatatttttatatttagttatagtttcagatatatatcatattggtattcactaatctgggaagggaagggctactgcagctttacatgcaatttattaaaatgattgtaaaatagcttgtatagtgtaaaataagaatgatttttagatgagattgttttatcatgacatgttatatattttttgtaggggtcaaagaaatgctgatggataacctatatgatttatagtttgtacatgcattcatacaggcagcgatggtctcagaaaccaaacagtttgctctaggggaagagggagatggagactggtcctgtgtgcagtgaaggttgctgaggctctgacccagtgagattacagaggaagttatcctctgcctcccattctgaccacccttctcattccaacagtgagtctgtcagcgcaggtttagtttactcaatctccccttgcactaaagtatgtaaagtatgtaaacaggagacaggaaggtggtgcttacatccttaaaggcaccatctaatagcgggttactttcacatacagccctcccccagcagttgaatgacaacagaagcttcagaagtttggcaatagtttgcatagaggtaccagcaatatgtaaatagtgcagaatctcataggttgccaataatacactaattcctttctatcctacaacaagagtttatttccaaataaaatgaggacatgtttttgttttctttgaatgctttttgaatgttatttgttattttcagtattttggagaaattatttaataaaaaaacaatcatttgctttttgaatgctctctaaaagggaatgtaatattttaagatggtgtgtaacccggctggataaatttttggtgcctaagaaaactgcttgaatattcttatcaatgacagtgttaagtttcaaaaagagcttctaaaacgtagattatcattcctttatagaatgttatgtggttaaaaccagaaagcacatctcacacattaatctgattttcatcccaacaatcttggcgctcaaaaaatagaactcaatgagaaaaagaagattatgtgcacttcgttgtcaataataagtcaactgatgctcatcgacaactataggaggcttttcattaaatgggaaaagaagctgtgcccttttaggatacgtgggggaaaagaaagtcatcttaattatgtttaattgtggatttaagtgctatatggtggtgctgtttgaaagcagatttatttcctatgtatgtgttatctggccatcccaacccaaactgttgaagtttgtagtaacttcagtgagagttggttactcacaacaaatcctgaaaagtatttttagtgtttgtaggtattctgtgggatactatacaagcagaactgaggcacttaggacataacacttttggggtatatatatccaaatgcctaaaactatgggaggaaaccttggccaccccaaaaggaaaactaacatgatttgtgtctatgaagtgctggataattagcatgggatgagctctgggcatgccatgaaggaaagccacgctcccttcagaattcagaggcagggagcaattccagtttcacctaagtctcataattttagttcccttttaaaaaccctgaaaactacatcaccatggaatgaaaaatattgttatacaatacattgatctgtcaaacttccagaaccatggtagccttcagtgagatttccatcttggctggtcactccctgactgtagctgtaggtgaatgtgtttttgtgtgtgtgtgtctggttttagtgtcagaagggaaataaaagtgtaaggaggacactttaaaccctttgggtggagtttcgtaatttcccagactattttcaagcaacctggtccacccaggattagtgaccaggttttcaggaaaggatttgcttctctctagaaaatgtctgaaaggattttattttctgatgaaaggctgtatgaaaataccctcctcaaataacttgcttaactacatatagattcaagtgtgtcaatattctattttgtatattaaatgctatataatggggacaaatctatattatactgtgtatggcattattaagaagctttttcattattttttatcacagtaattttaaaatgtgtaaaaattaaaaccagtgactcctgtttaaaaataaaagttgtagttttttattcatgctgaataataatctgtagttaaaaaaaaagtgtctttttacctacgcagtgaaatgtcagactgtaaaaccttgtgtggaaatgtttaacttttattttttcatttaaatttgctgttctggtattaccaaaccacacatttgtaccgaattggcagtaaatgttagccatttacagcaatgccaaatatggagaaacatcataataaaaaaatctgctttttcatta

SEQ ID NO: 160940 - DNA, 3245 bp, Homo sapiens
  Payload ID: 11442
  Gene Symbol: NR3C1
  Gene Name: nuclear receptor subfamily 3, group C, member 1 (glucocorticoid receptor)
  Uniprot ID: P04150
  ENST ID: ENST00000394466
  CDS Start-End: 158-2494
actggcggcgcttgccgccaaggggcagagcgagctcccgagtgggtctggagccgcggagctgggcgggggcgggaaggaggtagcgagaaaagaaactggagaaactcggtggccctcttaacgccgccccagagagaccagttgatattcactgatggactccaaagaatcattaactcctggtagagaagaaaaccccagcagtgtgcttgctcaggagaggggagatgtgatggacttctataaaaccctaagaggaggagctactgtgaaggtttctgcgtcttcaccctcactggctgtcgcttctcaatcagactccaagcagcgaagacttttggttgattttccaaaaggctcagtaagcaatgcgcagcagccagatctgtccaaagcagtttcactctcaatgggactgtatatgggagagacagaaacaaaagtgatgggaaatgacctgggattcccacagcagggccaaatcagcctttcctcgggggaaacagacttaaagcttttggaagaaagcattgcaaacctcaataggtcgaccagtgttccagagaaccccaagagttcagcatccactgctgtgtctgctgcccccacagagaaggagtttccaaaaactcactctgatgtatcttcagaacagcaacatttgaagggccagactggcaccaacggtggcaatgtgaaattgtataccacagaccaaagcacctttgacattttgcaggatttggagttttcttctgggtccccaggtaaagagacgaatgagagtccttggagatcagacctgttgatagatgaaaactgtttgctttctcctctggcgggagaagacgattcattccttttggaaggaaactcgaatgaggactgcaagcctctcattttaccggacactaaacccaaaattaaggataatggagatctggttttgtcaagccccagtaatgtaacactgccccaagtgaaaacagaaaaagaagatttcatcgaactctgcacccctggggtaattaagcaagagaaactgggcacagtttactgtcaggcaagctttcctggagcaaatataattggtaataaaatgtctgccatttctgttcatggtgtgagtacctctggaggacagatgtaccactatgacatgaatacagcatccctttctcaacagcaggatcagaagcctatttttaatgtcattccaccaattcccgttggttccgaaaattggaataggtgccaaggatctggagatgacaacttgacttctctggggactctgaacttccctggtcgaacagttttttctaatggctattcaagccccagcatgagaccagatgtaagctctcctccatccagctcctcaacagcaacaacaggaccacctcccaaactctgcctggtgtgctctgatgaagcttcaggatgtcattatggagtcttaacttgtggaagctgtaaagttttcttcaaaagagcagtggaaggtagacagcacaattacctatgtgctggaaggaatgattgcatcatcgataaaattcgaagaaaaaactgcccagcatgccgctatcgaaaatgtcttcaggctggaatgaacctggaagctcgaaaaacaaagaaaaaaataaaaggaattcagcaggccactacaggagtctcacaagaaacctctgaaaatcctggtaacaaaacaatagttcctgcaacgttaccacaactcacccctaccctggtgtcactgttggaggttattgaacctgaagtgttatatgcaggatatgatagctctgttccagactcaacttggaggatcatgactacgctcaacatgttaggagggcggcaagtgattgcagcagtgaaatgggcaaaggcaataccaggtttcaggaacttacacctggatgaccaaatgaccctactgcagtactcctggatgtttcttatggcatttgctctggggtggagatcatatagacaatcaagtgcaaacctgctgtgttttgctcctgatctgattattaatgagcagagaatgactctaccctgcatgtacgaccaatgtaaacacatgctgtatgtttcctctgagttacacaggcttcaggtatcttatgaagagtatctctgtatgaaaaccttactgcttctctcttcagttcctaaggacggtctgaagagccaagagctatttgatgaaattagaatgacctacatcaaagagctaggaaaagccattgtcaagagggaaggaaactccagccagaactggcagcggttttatcaactgacaaaactcttggattctatgcatgaagtggttgaaaatctccttaactattgcttccaaacatttttggataagaccatgagtattgaattccccgagatgttagctgaaatcatcaccaatcagataccaaaatattcaaatggaaatatcaaaaaacttctgtttcatcaaaagtgactgccttaataagaatggttgccttaaagaaagtcgaattaatagcttttattgtataaactatcagtttgtcctgtagaggttttgttgttttattttttattgttttcatctgttgttttgttttaaatacgcactacatgtggtttatagagggccaagacttggcaacagaagcagttgagtcgtcatcacttttcagtgatgggagagtagatggtgaaatttattagttaatatatcccagaaattagaaaccttaatatgtggacgtaatctccacagtcaaagaaggatggcacctaaaccaccagtgcccaaagtctgtgtgatgaactttctcttcatactttttttcacagttggctggatgaaattttctagactttctgttggtgtatcccccccctgtatagttaggatagcatttttgatttatgcatggaaacctgaaaaaaagtttacaagtgtatatcagaaaagggaagttgtgccttttatagctattactgtctggttttaacaatttcctttatatttagtgaactacgcttgctcattttttcttacataattttttattcaagttattgtacagctgtttaagatgggcagctagttcgtagctttcccaaataaactctaaacattaatcaatcatctgtgtgaaaatgggttggtgcttctaacctgatggcacttagctatcagaagaccacaaaaattgactcaaatctccagtattcttgtc

SEQ ID NO: 160941 - DNA, 3789 bp, Homo sapiens
  Payload ID: 11442
  Gene Symbol: NR3C1
  Gene Name: nuclear receptor subfamily 3, group C, member 1 (glucocorticoid receptor)
  Uniprot ID: P04150
  ENST ID: ENST00000415690
  CDS Start-End: 133-2361
tttttagaaaaaaaaaatatatttccctcctgctccttctgcgttcacaagctaagttgtttatctcggctgcggcgggaactgcggacggtggcgggcgagcggctcctctgccagagttgatattcactgatggactccaaagaatcattaactcctggtagagaagaaaaccccagcagtgtgcttgctcaggagaggggagatgtgatggacttctataaaaccctaagaggaggagctactgtgaaggtttctgcgtcttcaccctcactggctgtcgcttctcaatcagactccaagcagcgaagacttttggttgattttccaaaaggctcagtaagcaatgcgcagcagccagatctgtccaaagcagtttcactctcaatgggactgtatatgggagagacagaaacaaaagtgatgggaaatgacctgggattcccacagcagggccaaatcagcctttcctcgggggaaacagacttaaagcttttggaagaaagcattgcaaacctcaataggtcgaccagtgttccagagaaccccaagagttcagcatccactgctgtgtctgctgcccccacagagaaggagtttccaaaaactcactctgatgtatcttcagaacagcaacatttgaagggccagactggcaccaacggtggcaatgtgaaattgtataccacagaccaaagcacctttgacattttgcaggatttggagttttcttctgggtccccaggtaaagagacgaatgagagtccttggagatcagacctgttgatagatgaaaactgtttgctttctcctctggcgggagaagacgattcattccttttggaaggaaactcgaatgaggactgcaagcctctcattttaccggacactaaacccaaaattaaggataatggagatctggttttgtcaagccccagtaatgtaacactgccccaagtgaaaacagaaaaagaagatttcatcgaactctgcacccctggggtaattaagcaagagaaactgggcacagtttactgtcaggcaagctttcctggagcaaatataattggtaataaaatgtctgccatttctgttcatggtgtgagtacctctggaggacagatgtaccactatgacatgaatacagcatccctttctcaacagcaggatcagaagcctatttttaatgtcattccaccaattcccgttggttccgaaaattggaataggtgccaaggatctggagatgacaacttgacttctctggggactctgaacttccctggtcgaacagttttttctaatggctattcaagccccagcatgagaccagatgtaagctctcctccatccagctcctcaacagcaacaacaggaccacctcccaaactctgcctggtgtgctctgatgaagcttcaggatgtcattatggagtcttaacttgtggaagctgtaaagttttcttcaaaagagcagtggaaggacagcacaattacctatgtgctggaaggaatgattgcatcatcgataaaattcgaagaaaaaactgcccagcatgccgctatcgaaaatgtcttcaggctggaatgaacctggaagctcgaaaaacaaagaaaaaaataaaaggaattcagcaggccactacaggagtctcacaagaaacctctgaaaatcctggtaacaaaacaatagttcctgcaacgttaccacaactcacccctaccctggtgtcactgttggaggttattgaacctgaagtgttatatgcaggatatgatagctctgttccagactcaacttggaggatcatgactacgctcaacatgttaggagggcggcaagtgattgcagcagtgaaatgggcaaaggcaataccaggtttcaggaacttacacctggatgaccaaatgaccctactgcagtactcctggatgtttcttatggcatttgctctggggtggagatcatatagacaatcaagtgcaaacctgctgtgttttgctcctgatctgattattaatgagcagagaatgactctaccctgcatgtacgaccaatgtaaacacatgctgtatgtttcctctgagttacacaggcttcaggtatcttatgaagagtatctctgtatgaaaaccttactgcttctctcttcagttcctaaggacggtctgaagagccaagagctatttgatgaaattagaatgacctacatcaaagagctaggaaaagccattgtcaagagggaaggaaactccagccagaactggcagcggttttatcaactgacaaaactcttggattctatgcatgaaaatgttatgtggttaaaaccagaaagcacatctcacacattaatctgattttcatcccaacaatcttggcgctcaaaaaatagaactcaatgagaaaaagaagattatgtgcacttcgttgtcaataataagtcaactgatgctcatcgacaactataggaggcttttcattaaatgggaaaagaagctgtgcccttttaggatacgtgggggaaaagaaagtcatcttaattatgtttaattgtggatttaagtgctatatggtggtgctgtttgaaagcagatttatttcctatgtatgtgttatctggccatcccaacccaaactgttgaagtttgtagtaacttcagtgagagttggttactcacaacaaatcctgaaaagtatttttagtgtttgtaggtattctgtgggatactatacaagcagaactgaggcacttaggacataacacttttggggtatatatatccaaatgcctaaaactatgggaggaaaccttggccaccccaaaaggaaaactaacatgatttgtgtctatgaagtgctggataattagcatgggatgagctctgggcatgccatgaaggaaagccacgctcccttcagaattcagaggcagggagcaattccagtttcacctaagtctcataattttagttcccttttaaaaaccctgaaaactacatcaccatggaatgaaaaatattgttatacaatacattgatctgtcaaacttccagaaccatggtagccttcagtgagatttccatcttggctggtcactccctgactgtagctgtaggtgaatgtgtttttgtgtgtgtgtgtctggttttagtgtcagaagggaaataaaagtgtaaggaggacactttaaaccctttgggtggagtttcgtaatttcccagactattttcaagcaacctggtccacccaggattagtgaccaggttttcaggaaaggatttgcttctctctagaaaatgtctgaaaggattttattttctgatgaaaggctgtatgaaaataccctcctcaaataacttgcttaactacatatagattcaagtgtgtcaatattctattttgtatattaaatgctatataatggggacaaatctatattatactgtgtatggcattattaagaagctttttcattattttttatcacagtaattttaaaatgtgtaaaaattaaaaccagtgactcctgtttaaaaataaaagttgtagttttttattcatgctgaataataatctgtagttaaaaaaaaagtgtctttttacctacgcagtgaaatgtcagactgtaaaaccttgtgtggaaatgtttaacttttattttttcatttaaatttgctgttctggtattaccaaaccacacatttgtaccgaattggcagtaaatgttagccatttacagcaatgccaaatatggagaaacatcataataaaaaaatctgcttttt

SEQ ID NO: 160942 - DNA, 4591 bp, Homo sapiens
  Payload ID: 11442
  Gene Symbol: NR3C1
  Gene Name: nuclear receptor subfamily 3, group C, member 1 (glucocorticoid receptor)
  Uniprot ID: P04150
  ENST ID: ENST00000424646
  CDS Start-End: 14-2269
ttgatattcactgatggactccaaagaatcattaactcctggtagagaagaaaaccccagcagtgtgcttgctcaggagaggggagatgtgatggacttctataaaaccctaagaggaggagctactgtgaaggtttctgcgtcttcaccctcactggctgtcgcttctcaatcagactccaagcagcgaagacttttggttgattttccaaaaggctcagtaagcaatgcgcagcagccagatctgtccaaagcagtttcactctcaatgggactgtatatgggagagacagaaacaaaagtgatgggaaatgacctgggattcccacagcagggccaaatcagcctttcctcgggggaaacagacttaaagcttttggaagaaagcattgcaaacctcaataggtcgaccagtgttccagagaaccccaagagttcagcatccactgctgtgtctgctgcccccacagagaaggagtttccaaaaactcactctgatgtatcttcagaacagcaacatttgaagggccagactggcaccaacggtggcaatgtgaaattgtataccacagaccaaagcacctttgacattttgcaggatttggagttttcttctgggtccccaggtaaagagacgaatgagagtccttggagatcagacctgttgatagatgaaaactgtttgctttctcctctggcgggagaagacgattcattccttttggaaggaaactcgaatgaggactgcaagcctctcattttaccggacactaaacccaaaattaaggataatggagatctggttttgtcaagccccagtaatgtaacactgccccaagtgaaaacagaaaaagaagatttcatcgaactctgcacccctggggtaattaagcaagagaaactgggcacagtttactgtcaggcaagctttcctggagcaaatataattgcatccctttctcaacagcaggatcagaagcctatttttaatgtcattccaccaattcccgttggttccgaaaattggaataggtgccaaggatctggagatgacaacttgacttctctggggactctgaacttccctggtcgaacagttttttctaatggctattcaagccccagcatgagaccagatgtaagctctcctccatccagctcctcaacagcaacaacaggaccacctcccaaactctgcctggtgtgctctgatgaagcttcaggatgtcattatggagtcttaacttgtggaagctgtaaagttttcttcaaaagagcagtggaaggacagcacaattacctatgtgctggaaggaatgattgcatcatcgataaaattcgaagaaaaaactgcccagcatgccgctatcgaaaatgtcttcaggctggaatgaacctggaagctcgaaaaacaaagaaaaaaataaaaggaattcagcaggccactacaggagtctcacaagaaacctctgaaaatcctggtaacaaaacaatagttcctgcaacgttaccacaactcacccctaccctggtgtcactgttggaggttattgaacctgaagtgttatatgcaggatatgatagctctgttccagactcaacttggaggatcatgactacgctcaacatgttaggagggcggcaagtgattgcagcagtgaaatgggcaaaggcaataccaggtttcaggaacttacacctggatgaccaaatgaccctactgcagtactcctggatgtttcttatggcatttgctctggggtggagatcatatagacaatcaagtgcaaacctgctgtgttttgctcctgatctgattattaatgagcagagaatgactctaccctgcatgtacgaccaatgtaaacacatgctgtatgtttcctctgagttacacaggcttcaggtatcttatgaagagtatctctgtatgaaaaccttactgcttctctcttcagttcctaaggacggtctgaagagccaagagctatttgatgaaattagaatgacctacatcaaagagctaggaaaagccattgtcaagagggaaggaaactccagccagaactggcagcggttttatcaactgacaaaactcttggattctatgcatgaagtggttgaaaatctccttaactattgcttccaaacatttttggataagaccatgagtattgaattccccgagatgttagctgaaatcatcaccaatcagataccaaaatattcaaatggaaatatcaaaaaacttctgtttcatcaaaagtgactgccttaataagaatggttgccttaaagaaagtcgaattaatagcttttattgtataaactatcagtttgtcctgtagaggttttgttgttttattttttattgttttcatctgttgttttgttttaaatacgcactacatgtggtttatagagggccaagacttggcaacagaagcagttgagtcgtcatcacttttcagtgatgggagagtagatggtgaaatttattagttaatatatcccagaaattagaaaccttaatatgtggacgtaatctccacagtcaaagaaggatggcacctaaaccaccagtgcccaaagtctgtgtgatgaactttctcttcatactttttttcacagttggctggatgaaattttctagactttctgttggtgtatcccccccctgtatagttaggatagcatttttgatttatgcatggaaacctgaaaaaaagtttacaagtgtatatcagaaaagggaagttgtgccttttatagctattactgtctggttttaacaatttcctttatatttagtgaactacgcttgctcattttttcttacataattttttattcaagttattgtacagctgtttaagatgggcagctagttcgtagctttcccaaataaactctaaacattaatcaatcatctgtgtgaaaatgggttggtgcttctaacctgatggcacttagctatcagaagaccacaaaaattgactcaaatctccagtattcttgtcaaaaaaaaaaaaaaaaaagctcatattttgtatatatctgcttcagtggagaattatataggttgtgcaaattaacagtcctaactggtatagagcacctagtccagtgacctgctgggtaaactgtggatgatggttgcaaaagactaatttaaaaaataactaccaagaggccctgtctgtacctaacgccctatttttgcaatggctatatggcaagaaagctggtaaactatttgtctttcaggaccttttgaagtagtttgtataacttcttaaaagttgtgattccagataaccagctgtaacacagctgagagacttttaatcagacaaagtaattcctctcactaaactttacccaaaaactaaatctctaatatggcaaaaatggctagacacccattttcacattcccatctgtcaccaattggttaatctttcctgatggtacaggaaagctcagctactgatttttgtgatttagaactgtatgtcagacatccatgtttgtaaaactacacatccctaatgtgtgccatagagtttaacacaagtcctgtgaatttcttcactgttgaaaattattttaaacaaaatagaagctgtagtagccctttctgtgtgcaccttaccaactttctgtaaactcaaaacttaacatatttactaagccacaagaaatttgatttctattcaaggtggccaaattatttgtgtaatagaaaactgaaaatctaatattaaaaatatggaacttctaatatatttttatatttagttatagtttcagatatatatcatattggtattcactaatctgggaagggaagggctactgcagctttacatgcaatttattaaaatgattgtaaaatagcttgtatagtgtaaaataagaatgatttttagatgagattgttttatcatgacatgttatatattttttgtaggggtcaaagaaatgctgatggataacctatatgatttatagtttgtacatgcattcatacaggcagcgatggtctcagaaaccaaacagtttgctctaggggaagagggagatggagactggtcctgtgtgcagtgaaggttgctgaggctctgacccagtgagattacagaggaagttatcctctgcctcccattctgaccacccttctcattccaacagtgagtctgtcagcgcaggtttagtttactcaatctccccttgcactaaagtatgtaaagtatgtaaacaggagacaggaaggtggtgcttacatccttaaaggcaccatctaatagcgggttactttcacatacagccctcccccagcagttgaatgacaacagaagcttcagaagtttggcaatagtttgcatagaggtaccagcaatatgtaaatagtgcagaatctcataggttgccaataatacactaattcctttctatcctacaacaagagtttatttccaaataaaatgaggacatgtttttgttttctttgaatgctttttgaatgttatttgttattttcagtattttggagaaattatttaataaaaaaacaatcatttgctttttg

SEQ ID NO: 160943 - DNA, 498 bp, Homo sapiens
  Payload ID: 11442
  Gene Symbol: NR3C1
  Gene Name: nuclear receptor subfamily 3, group C, member 1 (glucocorticoid receptor)
  ENST ID: ENST00000502892
  CDS Start-End: 63-498
aatccagctcgctggaggttttgcatttggcgtgcaacttccttcgagtttgatattcactgatggactccaaagaatcattaactcctggtagagaagaaaaccccagcagtgtgcttgctcaggagaggggagatgtgatggacttctataaaaccctaagaggaggagctactgtgaaggtttctgcgtcttcaccctcactggctgtcgcttctcaatcagactccaagcagcgaagacttttggttgattttccaaaaggctcagtaagcaatgcgcagcagccagatctgtccaaagcagtttcactctcaatgggactgtatatgggagagacagaaacaaaagtgatgggaaatgacctgggattcccacagcagggccaaatcagcctttcctcgggggaaacagacttaaagcttttggaagaaagcattgcaaacctcaataggtcgaccagtgttccagagaaccccaagagttcagcatccactg

SEQ ID NO: 160944 - DNA, 3389 bp, Homo sapiens
  Payload ID: 11442
  Gene Symbol: NR3C1
  Gene Name: nuclear receptor subfamily 3, group C, member 1 (glucocorticoid receptor)
  Uniprot ID: P04150
  ENST ID: ENST00000504572
  CDS Start-End: 284-2620
gataagcacttaatgagtgccttctctgtgcgagaatggggaggaacaaaatgcagctcctaccctcctcgggctttagttgtaccttaataacaggaattttcatctgcctggctcctttcctcaaagaacaaagaagactttgcttcattaaagtgtctgagaaggaaggatccctctggctggtgtgtgaagaattaactgtagatgggcaagtgtggaaggaaggagagcagtcaggaagctgccataaccatctacatgagagagttgatattcactgatggactccaaagaatcattaactcctggtagagaagaaaaccccagcagtgtgcttgctcaggagaggggagatgtgatggacttctataaaaccctaagaggaggagctactgtgaaggtttctgcgtcttcaccctcactggctgtcgcttctcaatcagactccaagcagcgaagacttttggttgattttccaaaaggctcagtaagcaatgcgcagcagccagatctgtccaaagcagtttcactctcaatgggactgtatatgggagagacagaaacaaaagtgatgggaaatgacctgggattcccacagcagggccaaatcagcctttcctcgggggaaacagacttaaagcttttggaagaaagcattgcaaacctcaataggtcgaccagtgttccagagaaccccaagagttcagcatccactgctgtgtctgctgcccccacagagaaggagtttccaaaaactcactctgatgtatcttcagaacagcaacatttgaagggccagactggcaccaacggtggcaatgtgaaattgtataccacagaccaaagcacctttgacattttgcaggatttggagttttcttctgggtccccaggtaaagagacgaatgagagtccttggagatcagacctgttgatagatgaaaactgtttgctttctcctctggcgggagaagacgattcattccttttggaaggaaactcgaatgaggactgcaagcctctcattttaccggacactaaacccaaaattaaggataatggagatctggttttgtcaagccccagtaatgtaacactgccccaagtgaaaacagaaaaagaagatttcatcgaactctgcacccctggggtaattaagcaagagaaactgggcacagtttactgtcaggcaagctttcctggagcaaatataattggtaataaaatgtctgccatttctgttcatggtgtgagtacctctggaggacagatgtaccactatgacatgaatacagcatccctttctcaacagcaggatcagaagcctatttttaatgtcattccaccaattcccgttggttccgaaaattggaataggtgccaaggatctggagatgacaacttgacttctctggggactctgaacttccctggtcgaacagttttttctaatggctattcaagccccagcatgagaccagatgtaagctctcctccatccagctcctcaacagcaacaacaggaccacctcccaaactctgcctggtgtgctctgatgaagcttcaggatgtcattatggagtcttaacttgtggaagctgtaaagttttcttcaaaagagcagtggaaggtagacagcacaattacctatgtgctggaaggaatgattgcatcatcgataaaattcgaagaaaaaactgcccagcatgccgctatcgaaaatgtcttcaggctggaatgaacctggaagctcgaaaaacaaagaaaaaaataaaaggaattcagcaggccactacaggagtctcacaagaaacctctgaaaatcctggtaacaaaacaatagttcctgcaacgttaccacaactcacccctaccctggtgtcactgttggaggttattgaacctgaagtgttatatgcaggatatgatagctctgttccagactcaacttggaggatcatgactacgctcaacatgttaggagggcggcaagtgattgcagcagtgaaatgggcaaaggcaataccaggtttcaggaacttacacctggatgaccaaatgaccctactgcagtactcctggatgtttcttatggcatttgctctggggtggagatcatatagacaatcaagtgcaaacctgctgtgttttgctcctgatctgattattaatgagcagagaatgactctaccctgcatgtacgaccaatgtaaacacatgctgtatgtttcctctgagttacacaggcttcaggtatcttatgaagagtatctctgtatgaaaaccttactgcttctctcttcagttcctaaggacggtctgaagagccaagagctatttgatgaaattagaatgacctacatcaaagagctaggaaaagccattgtcaagagggaaggaaactccagccagaactggcagcggttttatcaactgacaaaactcttggattctatgcatgaagtggttgaaaatctccttaactattgcttccaaacatttttggataagaccatgagtattgaattccccgagatgttagctgaaatcatcaccaatcagataccaaaatattcaaatggaaatatcaaaaaacttctgtttcatcaaaagtgactgccttaataagaatggttgccttaaagaaagtcgaattaatagcttttattgtataaactatcagtttgtcctgtagaggttttgttgttttattttttattgttttcatctgttgttttgttttaaatacgcactacatgtggtttatagagggccaagacttggcaacagaagcagttgagtcgtcatcacttttcagtgatgggagagtagatggtgaaatttattagttaatatatcccagaaattagaaaccttaatatgtggacgtaatctccacagtcaaagaaggatggcacctaaaccaccagtgcccaaagtctgtgtgatgaactttctcttcatactttttttcacagttggctggatgaaattttctagactttctgttggtgtatcccccccctgtatagttaggatagcatttttgatttatgcatggaaacctgaaaaaaagtttacaagtgtatatcagaaaagggaagttgtgccttttatagctattactgtctggttttaacaatttcctttatatttagtgaactacgcttgctcattttttcttacataattttttattcaagttattgtacagctgtttaagatgggcagctagttcgtagctttcccaaataaactctaaacattaatcaatcatctgtgtgaaaatgggttggtgcttctaacctgatggcacttagctatcagaagaccacaaaaattgactcaaatctccagtattcttgtcaaaaaaaaaaaaaaaaaa

SEQ ID NO: 160945 - DNA, 585 bp, Homo sapiens
  Payload ID: 11442
  Gene Symbol: NR3C1
  Gene Name: nuclear receptor subfamily 3, group C, member 1 (glucocorticoid receptor)
  ENST ID: ENST00000510170
  CDS Start-End: 150-585
ggcgcctggcttgaggagggcgtgcggggcgcgtgagggtgcacacgcggggggctgacagcccgcaacttggagactgcggccggggccggcgttatctgttagaagtgggcgtgtcggagagagaactcaacagttgatattcactgatggactccaaagaatcattaactcctggtagagaagaaaaccccagcagtgtgcttgctcaggagaggggagatgtgatggacttctataaaaccctaagaggaggagctactgtgaaggtttctgcgtcttcaccctcactggctgtcgcttctcaatcagactccaagcagcgaagacttttggttgattttccaaaaggctcagtaagcaatgcgcagcagccagatctgtccaaagcagtttcactctcaatgggactgtatatgggagagacagaaacaaaagtgatgggaaatgacctgggattcccacagcagggccaaatcagcctttcctcgggggaaacagacttaaagcttttggaagaaagcattgcaaacctcaataggtcgaccagtgttccagagaaccccaagagttcagcatccactg

SEQ ID NO: 160946 - DNA, 547 bp, Homo sapiens
  Payload ID: 11442
  Gene Symbol: NR3C1
  Gene Name: nuclear receptor subfamily 3, group C, member 1 (glucocorticoid receptor)
  ENST ID: ENST00000508760
  CDS Start-End: 112-547
cgtgcaggcgccgtcggggccggggtggcggggcccgcgcggagggcgtgggggcagggaccgcgggcgcccctgcagttgccaagcgtcaccaacagttgatattcactgatggactccaaagaatcattaactcctggtagagaagaaaaccccagcagtgtgcttgctcaggagaggggagatgtgatggacttctataaaaccctaagaggaggagctactgtgaaggtttctgcgtcttcaccctcactggctgtcgcttctcaatcagactccaagcagcgaagacttttggttgattttccaaaaggctcagtaagcaatgcgcagcagccagatctgtccaaagcagtttcactctcaatgggactgtatatgggagagacagaaacaaaagtgatgggaaatgacctgggattcccacagcagggccaaatcagcctttcctcgggggaaacagacttaaagcttttggaagaaagcattgcaaacctcaataggtcgaccagtgttccagagaaccccaagagttcagcatccactg

SEQ ID NO: 160947 - DNA, 585 bp, Homo sapiens
  Payload ID: 11442
  Gene Symbol: NR3C1
  Gene Name: nuclear receptor subfamily 3, group C, member 1 (glucocorticoid receptor)
  ENST ID: ENST00000502500
  CDS Start-End: 154-585
gtactcaaaggtttggatgtgtgactagctggtaggagggaaatttggaagtaattagggattgagaattctagcatagtatttatcaaatgttatatgtattggttctcagaaaagcaaacagccgtgattgaaaagagttgatattcactgatggactccaaagaatcattaactcctggtagagaagaaaaccccagcagtgtgcttgctcaggagaggggagatgtgatggacttctataaaaccctaagaggaggagctactgtgaaggtttctgcgtcttcaccctcactggctgtcgcttctcaatcagactccaagcagcgaagacttttggttgattttccaaaaggctcagtaagcaatgcgcagcagccagatctgtccaaagcagtttcactctcaatgggactgtatatgggagagacagaaacaaaagtgatgggaaatgacctgggattcccacagcagggccaaatcagcctttcctcgggggaaacagacttaaagcttttggaagaaagcattgcaaacctcaataggtcgaccagtgttccagagaaccccaagagttcagcatcc

SEQ ID NO: 160948 - DNA, 623 bp, Homo sapiens
  Payload ID: 11442
  Gene Symbol: NR3C1
  Gene Name: nuclear receptor subfamily 3, group C, member 1 (glucocorticoid receptor)
  ENST ID: ENST00000514699
  CDS Start-End: 188-623
ggctgtggccgagcgcccgagcaggattaggtggagctgcggcagcccccgcccgtgtcaggagctggcaagcgatgtcacctgtgggggcgcaaaagttacctccccaaaccctaaacccacacagcacaacctttcccagagtcacaaaaatcataatctgtgccgcacaagttgatattcactgatggactccaaagaatcattaactcctggtagagaagaaaaccccagcagtgtgcttgctcaggagaggggagatgtgatggacttctataaaaccctaagaggaggagctactgtgaaggtttctgcgtcttcaccctcactggctgtcgcttctcaatcagactccaagcagcgaagacttttggttgattttccaaaaggctcagtaagcaatgcgcagcagccagatctgtccaaagcagtttcactctcaatgggactgtatatgggagagacagaaacaaaagtgatgggaaatgacctgggattcccacagcagggccaaatcagcctttcctcgggggaaacagacttaaagcttttggaagaaagcattgcaaacctcaataggtcgaccagtgttccagagaaccccaagagttcagcatccactg

SEQ ID NO: 160949 - DNA, 2594 bp, Homo sapiens
  Payload ID: 11442
  Gene Symbol: NR3C1
  Gene Name: nuclear receptor subfamily 3, group C, member 1 (glucocorticoid receptor)
  Uniprot ID: P04150
  ENST ID: ENST00000503201
  CDS Start-End: 183-2516
gcagactcggggaagagggtgggggacggtcggggcgcgggggagggtgggttctgctttgcaacttctctcccagtgcgagagcgcggcggcggcagctgaagacccggccgcccagatgatgcggtggtgggggacctgccggcacgcgactccccccgggcccaaattgatattcactgatggactccaaagaatcattaactcctggtagagaagaaaaccccagcagtgtgcttgctcaggagaggggagatgtgatggacttctataaaaccctaagaggaggagctactgtgaaggtttctgcgtcttcaccctcactggctgtcgcttctcaatcagactccaagcagcgaagacttttggttgattttccaaaaggctcagtaagcaatgcgcagcagccagatctgtccaaagcagtttcactctcaatgggactgtatatgggagagacagaaacaaaagtgatgggaaatgacctgggattcccacagcagggccaaatcagcctttcctcgggggaaacagacttaaagcttttggaagaaagcattgcaaacctcaataggtcgaccagtgttccagagaaccccaagagttcagcatccactgctgtgtctgctgcccccacagagaaggagtttccaaaaactcactctgatgtatcttcagaacagcaacatttgaagggccagactggcaccaacggtggcaatgtgaaattgtataccacagaccaaagcacctttgacattttgcaggatttggagttttcttctgggtccccaggtaaagagacgaatgagagtccttggagatcagacctgttgatagatgaaaactgtttgctttctcctctggcgggagaagacgattcattccttttggaaggaaactcgaatgaggactgcaagcctctcattttaccggacactaaacccaaaattaaggataatggagatctggttttgtcaagccccagtaatgtaacactgccccaagtgaaaacagaaaaagaagatttcatcgaactctgcacccctggggtaattaagcaagagaaactgggcacagtttactgtcaggcaagctttcctggagcaaatataattggtaataaaatgtctgccatttctgttcatggtgtgagtacctctggaggacagatgtaccactatgacatgaatacagcatccctttctcaacagcaggatcagaagcctatttttaatgtcattccaccaattcccgttggttccgaaaattggaataggtgccaaggatctggagatgacaacttgacttctctggggactctgaacttccctggtcgaacagttttttctaatggctattcaagccccagcatgagaccagatgtaagctctcctccatccagctcctcaacagcaacaacaggaccacctcccaaactctgcctggtgtgctctgatgaagcttcaggatgtcattatggagtcttaacttgtggaagctgtaaagttttcttcaaaagagcagtggaaggacagcacaattacctatgtgctggaaggaatgattgcatcatcgataaaattcgaagaaaaaactgcccagcatgccgctatcgaaaatgtcttcaggctggaatgaacctggaagctcgaaaaacaaagaaaaaaataaaaggaattcagcaggccactacaggagtctcacaagaaacctctgaaaatcctggtaacaaaacaatagttcctgcaacgttaccacaactcacccctaccctggtgtcactgttggaggttattgaacctgaagtgttatatgcaggatatgatagctctgttccagactcaacttggaggatcatgactacgctcaacatgttaggagggcggcaagtgattgcagcagtgaaatgggcaaaggcaataccaggtttcaggaacttacacctggatgaccaaatgaccctactgcagtactcctggatgtttcttatggcatttgctctggggtggagatcatatagacaatcaagtgcaaacctgctgtgttttgctcctgatctgattattaatgagcagagaatgactctaccctgcatgtacgaccaatgtaaacacatgctgtatgtttcctctgagttacacaggcttcaggtatcttatgaagagtatctctgtatgaaaaccttactgcttctctcttcagttcctaaggacggtctgaagagccaagagctatttgatgaaattagaatgacctacatcaaagagctaggaaaagccattgtcaagagggaaggaaactccagccagaactggcagcggttttatcaactgacaaaactcttggattctatgcatgaagtggttgaaaatctccttaactattgcttccaaacatttttggataagaccatgagtattgaattccccgagatgttagctgaaatcatcaccaatcagataccaaaatattcaaatggaaatatcaaaaaacttctgtttcatcaaaagtgactgccttaataagaatggttgccttaaagaaagtcgaattaatagcttttattgtataaactatcagtttgtcctgta

SEQ ID NO: 160950 - DNA, 5712 bp, Homo sapiens
  Payload ID: 11443
  Gene Symbol: NR3C2
  Gene Name: nuclear receptor subfamily 3, group C, member 2
  ENST ID: ENST00000344721
  CDS Start-End: 176-3130
attgctctacccaccgtcagcagggcgactgccactgccgggattatcatcctctccatcctcaccgccgatcagccaatattggacttgctggtggcggcggcagcagcggcggcgggagtctagccgttccccttcccccgccccagcctccccaccatgtcctagaaaagcgatggagaccaaaggctaccacagtctccctgaaggtctagatatggaaagacggtggggtcaagtttctcaggctgtggagcgttcttccctgggacctacagagaggaccgatgagaataactacatggagattgtcaacgtaagctgtgtttccggtgctattccaaacaacagtactcaaggaagcagcaaagaaaaacaagaactactcccttgccttcagcaagacaataatcggcctgggattttaacatctgatattaaaactgagctggaatctaaggaactttcagcaactgtagctgagtccatgggtttatatatggattctgtaagagatgctgactattcctatgagcagcagaaccaacaaggaagcatgagtccagctaagatttatcagaatgttgaacagctggtgaaattttacaaaggaaatggccatcgtccttccactctaagttgtgtgaacacgcccttgagatcatttatgtctgactctgggagctccgtgaatggtggcgtcatgcgcgccgttgttaaaagccctatcatgtgtcatgagaaaagcccgtctgtttgcagccctctgaacatgacatcttcggtttgcagccctgctggaatcaactctgtgtcctccaccacagccagctttggcagttttccagtgcacagcccaatcacccagggaactcctctgacatgctcccctaatgttgaaaatcgaggctccaggtcgcacagccctgcacatgctagcaatgtgggctctcctctctcaagtccgttaagtagcatgaaatcctcaatttccagccctccaagtcactgcagtgtaaaatctccagtctccagtcccaataatgtcactctgagatcctctgtgtctagccctgcaaatattaacaactcaaggtgctctgtttccagcccttcgaacactaataacagatccacgctttccagtccggcagccagtactgtgggatctatctgtagccctgtaaacaatgccttcagctacactgcttctggcacctctgctggatccagtacattgcgggatgtggttcccagtccagacacgcaggagaaaggtgctcaagaggtcccttttcctaagactgaggaagtagagagtgccatctcaaatggtgtgactggccagcttaatattgtccagtacataaaaccagaaccagatggagcttttagcagctcatgtctaggaggaaatagcaaaataaattcggattcttcattctcagtaccaataaagcaagaatcaaccaagcattcatgttcaggcacctcttttaaagggaatccaacagtaaacccgtttccatttatggatggctcgtatttttcctttatggatgataaagactattattccctatcaggaattttaggaccacctgtgcccggctttgatggtaactgtgaaggcagcggattcccagtgggtattaaacaagaaccagatgatgggagctattacccagaggccagcatcccttcctctgctattgttggggtgaattcaggtggacagtccttccactacaggattggtgctcaaggtacaatatctttatcacgatcggctagagaccaatctttccaacacctgagttcctttcctcctgtcaatactttagtggagtcatggaaatcacacggcgacctgtcgtctagaagaagtgatgggtatccggtcttagaatacattccagaaaatgtatcaagctctactttacgaagtgtttctactggatcttcaagaccttcaaaaatatgtttggtgtgtggggatgaggcttcaggatgccattatggggtagtcacctgtggcagctgcaaagttttcttcaaaagagcagtggaagggcaacacaactatttatgtgctggaagaaatgattgcatcattgataagattcgacgaaagaattgtcctgcttgcagacttcagaaatgtcttcaagctggaatgaatttaggagcacgaaagtcaaagaagttgggaaagttaaaagggattcacgaggagcagccacagcagcagcagcccccacccccacccccacccccgcaaagcccagaggaagggacaacgtacatcgctcctgcaaaagaaccctcggtcaacacagcactggttcctcagctctccacaatctcacgagcgctcacaccttcccccgttatggtccttgaaaacattgaacctgaaattgtatatgcaggctatgacagctcaaaaccagatacagccgaaaatctgctctccacgctcaaccgcttagcaggcaaacagatgatccaagtcgtgaagtgggcaaaggtacttccaggatttaaaaacttgcctcttgaggaccaaattaccctaatccagtattcttggatgtgtctatcatcatttgccttgagctggagatcgtacaaacatacgaacagccaatttctctattttgcaccagacctagtctttaatgaagagaagatgcatcagtctgccatgtatgaactatgccaggggatgcaccaaatcagccttcagttcgttcgactgcagctcacctttgaagaatacaccatcatgaaagttttgctgctactaagcacaattccaaaggatggcctcaaaagccaggctgcatttgaagaaatgaggacaaattacatcaaagaactgaggaagatggtaactaagtgtcccaacaattctgggcagagctggcagaggttctaccaactgaccaagctgctggactccatgcatgacctggtgagcgacctgctggaattctgcttctacaccttccgagagtcccatgcgctgaaggtagagttccccgcaatgctggtggagatcatcagcgaccagctgcccaaggtggagtcggggaacgccaagccgctctacttccaccggaagtgactgcccgctgcccagaagaactttgccttaagtttccctgtgttgttccacacccagaaggacccaagaaaacctgtttttaacatgtgatggttgattcacacttgttcaacagtttctcaagtttaaagtcatgtcagaggtttggagccgggaaagctgtttttccgtggatttggcgagaccagagcagtctgaaggattccccacctccaatcccccagcgcttagaaacatgttcctgttcctcgggatgaaaagccatatctagtcaataactctgattttgatattttcacagatggaagaagttttaactatgccgtgtagtttctggtatcgttcgcttgttttaaaagggttcaaggactaacgaacgttttaaagcttacccttggtttgcacataaaacgtatagtcaatatggggcattaatattcttttgttattaaaaaaacacaaaaaaataataaaaaaatatatacagattcctgttgtgtaataacagaactcgtggcgtggggcagcagctgcctctgagccctcgctcgtccacggtcttctgcatcactggtatacacactcgttagcgtccatttcttatttaattagaatggataagatgatgttaaatgccttggtttgatttctagtatctattgtgttggctttacaaataattttttgcagtcttttgctgtgctgtacattactgtatgtataaattatgaaggacctgaaataaggtataaggatcttttgtaaatgagacacatacaaaaaaaatctttaatggttaataggatgaatgggaaagtatttttgaaagaattctattttgctggagactatttaagtactatctttgtctaaacaaggtaatttttttttgtaaagtgcaatgtcctgcatgcataatgaaccgtttacagtgtatttaagaaagggaaagctgtgccttttttagcttcatatctaatttaccattattttacagtctctgttgtaaataaccacactgaaacctcttcggttgtcttgaaacctttctactttttctgtactttttgttttgttcttggtctcccgcttggggcatttgtgggactccagcacgttttctggcttctgcttcatcctgctccatcggggaatgacacactgcggtgtctgcagctcctggaaggtgtcatttgacaacacatgtgggagaggaggtccttggagtgctgcagctttgggaaagctgcctcgtttcccttttcctctagaagcagaaccagctctacgagagtgagactgggaacttgatggctcagagagcatcttttcctcccattttagaaaatcagattttctcctgtgggaaaaaaaaattccatgcactctctctctgttaaagatcagctattcccttctgatcttggaaagaggttctgcactcctggaaccggtcacaggaacgcacagatcatggcaggatgcgctgggacggcccatcttggcaaggttcagtctgaatggcatggagaccgggagatagaggggttttagatttttaaaaggtaggttttaaaaataagttttatacataaacagttttggagaaaaattacagatcatataagcaagacagtggcactaaaatgtttaattcattaatctgtttgtttggcactgatgcaatgtatggcttttctcttgccccaaatcacaaacatatgtatctttggggaaactaacaatatgattgcactaaataaactactttgaatagaggccaaattaatcttttaaaaatgatgataatcatcaggtttactcagtgaaatcatattaattattttccaaaatctaaaagctgtagctggagaagcccatggccacgaggaagcagcaattaattagatcaacacttttctccagggttcaccatgcaggcaacattaccttgtctttcaaaagacacctgccttatgcaaggggaaacctgtgaaagctgcactcagagggaggagtttttcttacataatttgcaatttcaggaatttaatttataggcagatctttaaatacagtcaacttacggtgcacagtaatatgaaagccacactttgaaggtaataaatacacagcatgcagactgggagttgctagcaaacaaatggcttacttacaaaagcagcttttagttcagacttagtttttataaaatgggaattctgacttacttaaccaggtttgggatggagatggtctgcatcagctttttgtattaacaaagttactggctctttgtgtgtctccaggtaactttgcttgattaaacagcaaagccatattctaaattcactgttgaatgcctgtcccagtccaaattgtctgtctgctcttatttttgtaccatattgctcttaaaaatcttggtttggtacagttcataattcaccaaaagttcatataatttaaagaaacactaaattagtttaaaatgaagcaatttatatctttatgcaaaaacatatgtctgtctttgcaaaggactgtaagcagattacaataaatcctttactttaatcacc

SEQ ID NO: 160951 - DNA, 3150 bp, Homo sapiens
  Payload ID: 11443
  Gene Symbol: NR3C2
  Gene Name: nuclear receptor subfamily 3, group C, member 2
  ENST ID: ENST00000342437
  CDS Start-End: 215-2335
cgggagccaacttcaggctgctcagaggaagcccgtgcagtcagtcacctgggtgcaagagcgttgctgcctcgggctctcccgctgcagggagagcggcactcgctggcctggatgtggttggatttaggggggctccgcagcaggggtttcgtggcggtggcaagcgctgcaacaggtagacggcgagagacggaccccggccgaggcagcgatggagaccaaaggctaccacagtctccctgaaggtctagatatggaaagacggtggggtcaagtttctcaggctgtggagcgttcttccctgggacctacagagaggaccgatgagaataactacatggagattgtcaacgtaagctgtgtttccggtgctattccaaacaacagtactcaaggaagcagcaaagaaaaacaagaactactcccttgccttcagcaagacaataatcggcctgggattttaacatctgatattaaaactgagctggaatctaaggaactttcagcaactgtagctgagtccatgggtttatatatggattctgtaagagatgctgactattcctatgagcagcagaaccaacaaggaagcatgagtccagctaagatttatcagaatgttgaacagctggtgaaattttacaaaggaaatggccatcgtccttccactctaagttgtgtgaacacgcccttgagatcatttatgtctgactctgggagctccgtgaatggtggcgtcatgcgcgccgttgttaaaagccctatcatgtgtcatgagaaaagcccgtctgtttgcagccctctgaacatgacatcttcggtttgcagccctgctggaatcaactctgtgtcctccaccacagccagctttggcagttttccagtgcacagcccaatcacccagggaactcctctgacatgctcccctaatgttgaaaatcgaggctccaggtcgcacagccctgcacatgctagcaatgtgggctctcctctctcaagtccgttaagtagcatgaaatcctcaatttccagccctccaagtcactgcagtgtaaaatctccagtctccagtcccaataatgtcactctgagatcctctgtgtctagccctgcaaatattaacaactcaaggtgctctgtttccagcccttcgaacactaataacagatccacgctttccagtccggcagccagtactgtgggatctatctgtagccctgtaaacaatgccttcagctacactgcttctggcacctctgctggatccagtacattgcgggatgtggttcccagtccagacacgcaggagaaaggtgctcaagaggtcccttttcctaagactgaggaagtagagagtgccatctcaaatggtgtgactggccagcttaatattgtccagtacataaaaccagaaccagatggagcttttagcagctcatgtctaggaggaaatagcaaaataaattcggattcttcattctcagtaccaataaagcaagaatcaaccaagcattcatgttcaggcacctcttttaaagggaatccaacagtaaacccgtttccatttatggatggctcgtatttttcctttatggatgataaagactattattccctatcaggaattttaggaccacctgtgcccggctttgatggtaactgtgaaggcagcggattcccagtgggtattaaacaagaaccagatgatgggagctattacccagaggccagcatcccttcctctgctattgttggggtgaattcaggtggacagtccttccactacaggattggtgctcaaggtacaatatctttatcacgatcggctagagaccaatctttccaacacctgagttcctttcctcctgtcaatactttagtggagtcatggaaatcacacggcgacctgtcgtctagaagaagtgatgggtatccggtcttagaatacattccagaaaatgtatcaagctctactttacgaagtgtttctactggatcttcaagaccttcaaaaatatgtttggtgtgtggggatgaggcttcaggatgccattatggggtagtcacctgtggcagctgcaaagttttcttcaaaagagcagtggaagggcaacacaactatttatgtgctggaagaaatgattgcatcattgataagattcgacgaaagaattgtcctgcttgcagacttcagaaatgtcttcaagctggaatgaatttaggagagagaagatgcatcagtctgccatgtatgaactatgccaggggatgcaccaaatcagccttcagttcgttcgactgcagctcacctttgaagaatacaccatcatgaaagttttgctgctactaagcacaattccaaaggatggcctcaaaagccaggctgcatttgaagaaatgaggacaaattacatcaaagaactgaggaagatggtaactaagtgtcccaacaattctgggcagagctggcagaggttctaccaactgaccaagctgctggactccatgcatgacctggtgagcgacctgctggaattctgcttctacaccttccgagagtcccatgcgctgaaggtagagttccccgcaatgctggtggagatcatcagcgaccagctgcccaaggtggagtcggggaacgccaagccgctctacttccaccggaagtgactgcccgctgcccagaagaactttgccttaagtttccctgtgttgttccacacccagaaggacccaagaaaacctgtttttaacatgtgatggttgattcacacttgttcaacagtttctcaagtttaaagtcatgtcagaggtttggagccgggaaagctgtttttccgtggatttggcgagaccagagcagtctgaaggattccccacctccaatcccccagcgcttagaaacatgttcctgttcctcgggatgaaaagccatatctagtcaataactctgattttgatattttcacagatggaagaagttttaactatgccgtgtagtttctggtatcgttcgcttgttttaaaagggttcaaggactaacgaacgttttaaagcttacccttggtttgcacataaaacgtatagtcaatatggggcattaatattcttttgttattaaaaaaacacaaaaaaataataaaaaa

SEQ ID NO: 160952 - DNA, 5893 bp, Homo sapiens
  Payload ID: 11443
  Gene Symbol: NR3C2
  Gene Name: nuclear receptor subfamily 3, group C, member 2
  ENST ID: ENST00000358102
  CDS Start-End: 364-3318
aaaagggccagccctccagctggcccactccccctccgggctttcgcccgccctctctccctcccttttttgcccgccctggccctgcccctgcccctgccccctcctctcagcccctccgcgcccggggtgtcattgggcccgggagacgggagccaacttcaggctgctcagaggaagcccgtgcagtcagtcacctgggtgcaagagcgttgctgcctcgggctctcccgctgcagggagagcggcactcgctggcctggatgtggttggatttaggggggctccgcagcaggggtttcgtggcggtggcaagcgctgcaacaggtagacggcgagagacggaccccggccgaggcagcgatggagaccaaaggctaccacagtctccctgaaggtctagatatggaaagacggtggggtcaagtttctcaggctgtggagcgttcttccctgggacctacagagaggaccgatgagaataactacatggagattgtcaacgtaagctgtgtttccggtgctattccaaacaacagtactcaaggaagcagcaaagaaaaacaagaactactcccttgccttcagcaagacaataatcggcctgggattttaacatctgatattaaaactgagctggaatctaaggaactttcagcaactgtagctgagtccatgggtttatatatggattctgtaagagatgctgactattcctatgagcagcagaaccaacaaggaagcatgagtccagctaagatttatcagaatgttgaacagctggtgaaattttacaaaggaaatggccatcgtccttccactctaagttgtgtgaacacgcccttgagatcatttatgtctgactctgggagctccgtgaatggtggcgtcatgcgcgccgttgttaaaagccctatcatgtgtcatgagaaaagcccgtctgtttgcagccctctgaacatgacatcttcggtttgcagccctgctggaatcaactctgtgtcctccaccacagccagctttggcagttttccagtgcacagcccaatcacccagggaactcctctgacatgctcccctaatgttgaaaatcgaggctccaggtcgcacagccctgcacatgctagcaatgtgggctctcctctctcaagtccgttaagtagcatgaaatcctcaatttccagccctccaagtcactgcagtgtaaaatctccagtctccagtcccaataatgtcactctgagatcctctgtgtctagccctgcaaatattaacaactcaaggtgctctgtttccagcccttcgaacactaataacagatccacgctttccagtccggcagccagtactgtgggatctatctgtagccctgtaaacaatgccttcagctacactgcttctggcacctctgctggatccagtacattgcgggatgtggttcccagtccagacacgcaggagaaaggtgctcaagaggtcccttttcctaagactgaggaagtagagagtgccatctcaaatggtgtgactggccagcttaatattgtccagtacataaaaccagaaccagatggagcttttagcagctcatgtctaggaggaaatagcaaaataaattcggattcttcattctcagtaccaataaagcaagaatcaaccaagcattcatgttcaggcacctcttttaaagggaatccaacagtaaacccgtttccatttatggatggctcgtatttttcctttatggatgataaagactattattccctatcaggaattttaggaccacctgtgcccggctttgatggtaactgtgaaggcagcggattcccagtgggtattaaacaagaaccagatgatgggagctattacccagaggccagcatcccttcctctgctattgttggggtgaattcaggtggacagtccttccactacaggattggtgctcaaggtacaatatctttatcacgatcggctagagaccaatctttccaacacctgagttcctttcctcctgtcaatactttagtggagtcatggaaatcacacggcgacctgtcgtctagaagaagtgatgggtatccggtcttagaatacattccagaaaatgtatcaagctctactttacgaagtgtttctactggatcttcaagaccttcaaaaatatgtttggtgtgtggggatgaggcttcaggatgccattatggggtagtcacctgtggcagctgcaaagttttcttcaaaagagcagtggaagggcaacacaactatttatgtgctggaagaaatgattgcatcattgataagattcgacgaaagaattgtcctgcttgcagacttcagaaatgtcttcaagctggaatgaatttaggagcacgaaagtcaaagaagttgggaaagttaaaagggattcacgaggagcagccacagcagcagcagcccccacccccacccccacccccgcaaagcccagaggaagggacaacgtacatcgctcctgcaaaagaaccctcggtcaacacagcactggttcctcagctctccacaatctcacgagcgctcacaccttcccccgttatggtccttgaaaacattgaacctgaaattgtatatgcaggctatgacagctcaaaaccagatacagccgaaaatctgctctccacgctcaaccgcttagcaggcaaacagatgatccaagtcgtgaagtgggcaaaggtacttccaggatttaaaaacttgcctcttgaggaccaaattaccctaatccagtattcttggatgtgtctatcatcatttgccttgagctggagatcgtacaaacatacgaacagccaatttctctattttgcaccagacctagtctttaatgaagagaagatgcatcagtctgccatgtatgaactatgccaggggatgcaccaaatcagccttcagttcgttcgactgcagctcacctttgaagaatacaccatcatgaaagttttgctgctactaagcacaattccaaaggatggcctcaaaagccaggctgcatttgaagaaatgaggacaaattacatcaaagaactgaggaagatggtaactaagtgtcccaacaattctgggcagagctggcagaggttctaccaactgaccaagctgctggactccatgcatgacctggtgagcgacctgctggaattctgcttctacaccttccgagagtcccatgcgctgaaggtagagttccccgcaatgctggtggagatcatcagcgaccagctgcccaaggtggagtcggggaacgccaagccgctctacttccaccggaagtgactgcccgctgcccagaagaactttgccttaagtttccctgtgttgttccacacccagaaggacccaagaaaacctgtttttaacatgtgatggttgattcacacttgttcaacagtttctcaagtttaaagtcatgtcagaggtttggagccgggaaagctgtttttccgtggatttggcgagaccagagcagtctgaaggattccccacctccaatcccccagcgcttagaaacatgttcctgttcctcgggatgaaaagccatatctagtcaataactctgattttgatattttcacagatggaagaagttttaactatgccgtgtagtttctggtatcgttcgcttgttttaaaagggttcaaggactaacgaacgttttaaagcttacccttggtttgcacataaaacgtatagtcaatatggggcattaatattcttttgttattaaaaaaacacaaaaaaataataaaaaaatatatacagattcctgttgtgtaataacagaactcgtggcgtggggcagcagctgcctctgagccctcgctcgtccacggtcttctgcatcactggtatacacactcgttagcgtccatttcttatttaattagaatggataagatgatgttaaatgccttggtttgatttctagtatctattgtgttggctttacaaataattttttgcagtcttttgctgtgctgtacattactgtatgtataaattatgaaggacctgaaataaggtataaggatcttttgtaaatgagacacatacaaaaaaaatctttaatggttaataggatgaatgggaaagtatttttgaaagaattctattttgctggagactatttaagtactatctttgtctaaacaaggtaatttttttttgtaaagtgcaatgtcctgcatgcataatgaaccgtttacagtgtatttaagaaagggaaagctgtgccttttttagcttcatatctaatttaccattattttacagtctctgttgtaaataaccacactgaaacctcttcggttgtcttgaaacctttctactttttctgtactttttgttttgttcttggtctcccgcttggggcatttgtgggactccagcacgttttctggcttctgcttcatcctgctccatcggggaatgacacactgcggtgtctgcagctcctggaaggtgtcatttgacaacacatgtgggagaggaggtccttggagtgctgcagctttgggaaagctgcctcgtttcccttttcctctagaagcagaaccagctctacgagagtgagactgggaacttgatggctcagagagcatcttttcctcccattttagaaaatcagattttctcctgtgggaaaaaaaaattccatgcactctctctctgttaaagatcagctattcccttctgatcttggaaagaggttctgcactcctggaaccggtcacaggaacgcacagatcatggcaggatgcgctgggacggcccatcttggcaaggttcagtctgaatggcatggagaccgggagatagaggggttttagatttttaaaaggtaggttttaaaaataagttttatacataaacagttttggagaaaaattacagatcatataagcaagacagtggcactaaaatgtttaattcattaatctgtttgtttggcactgatgcaatgtatggcttttctcttgccccaaatcacaaacatatgtatctttggggaaactaacaatatgattgcactaaataaactactttgaatagaggccaaattaatcttttaaaaatgatgataatcatcaggtttactcagtgaaatcatattaattattttccaaaatctaaaagctgtagctggagaagcccatggccacgaggaagcagcaattaattagatcaacacttttctccagggttcaccatgcaggcaacattaccttgtctttcaaaagacacctgccttatgcaaggggaaacctgtgaaagctgcactcagagggaggagtttttcttacataatttgcaatttcaggaatttaatttataggcagatctttaaatacagtcaacttacggtgcacagtaatatgaaagccacactttgaaggtaataaatacacagcatgcagactgggagttgctagcaaacaaatggcttacttacaaaagcagcttttagttcagacttagtttttataaaatgggaattctgacttacttaaccaggtttgggatggagatggtctgcatcagctttttgtattaacaaagttactggctctttgtgtgtctccaggtaactttgcttgattaaacagcaaagccatattctaaattcactgttgaatgcctgtcccagtccaaattgtctgtctgctcttatttttgtaccatattgctcttaaaaatcttggtttggtacagttcataattcaccaaaagttcatataatttaaagaaacactaaattagtttaaaatgaagcaatttatatctttatgcaaaaacatatgtctgtctttgcaaaggactgtaagcagattacaataaatcctttacttt

SEQ ID NO: 160953 - DNA, 2967 bp, Homo sapiens
  Payload ID: 11443
  Gene Symbol: NR3C2
  Gene Name: nuclear receptor subfamily 3, group C, member 2
  Uniprot ID: P08235
  ENST ID: ENST00000511528
  CDS Start-End: 1-2967
atggagaccaaaggctaccacagtctccctgaaggtctagatatggaaagacggtggggtcaagtttctcaggctgtggagcgttcttccctgggacctacagagaggaccgatgagaataactacatggagattgtcaacgtaagctgtgtttccggtgctattccaaacaacagtactcaaggaagcagcaaagaaaaacaagaactactcccttgccttcagcaagacaataatcggcctgggattttaacatctgatattaaaactgagctggaatctaaggaactttcagcaactgtagctgagtccatgggtttatatatggattctgtaagagatgctgactattcctatgagcagcagaaccaacaaggaagcatgagtccagctaagatttatcagaatgttgaacagctggtgaaattttacaaaggaaatggccatcgtccttccactctaagttgtgtgaacacgcccttgagatcatttatgtctgactctgggagctccgtgaatggtggcgtcatgcgcgccgttgttaaaagccctatcatgtgtcatgagaaaagcccgtctgtttgcagccctctgaacatgacatcttcggtttgcagccctgctggaatcaactctgtgtcctccaccacagccagctttggcagttttccagtgcacagcccaatcacccagggaactcctctgacatgctcccctaatgttgaaaatcgaggctccaggtcgcacagccctgcacatgctagcaatgtgggctctcctctctcaagtccgttaagtagcatgaaatcctcaatttccagccctccaagtcactgcagtgtaaaatctccagtctccagtcccaataatgtcactctgagatcctctgtgtctagccctgcaaatattaacaactcaaggtgctctgtttccagcccttcgaacactaataacagatccacgctttccagtccggcagccagtactgtgggatctatctgtagccctgtaaacaatgccttcagctacactgcttctggcacctctgctggatccagtacattgcgggatgtggttcccagtccagacacgcaggagaaaggtgctcaagaggtcccttttcctaagactgaggaagtagagagtgccatctcaaatggtgtgactggccagcttaatattgtccagtacataaaaccagaaccagatggagcttttagcagctcatgtctaggaggaaatagcaaaataaattcggattcttcattctcagtaccaataaagcaagaatcaaccaagcattcatgttcaggcacctcttttaaagggaatccaacagtaaacccgtttccatttatggatggctcgtatttttcctttatggatgataaagactattattccctatcaggaattttaggaccacctgtgcccggctttgatggtaactgtgaaggcagcggattcccagtgggtattaaacaagaaccagatgatgggagctattacccagaggccagcatcccttcctctgctattgttggggtgaattcaggtggacagtccttccactacaggattggtgctcaaggtacaatatctttatcacgatcggctagagaccaatctttccaacacctgagttcctttcctcctgtcaatactttagtggagtcatggaaatcacacggcgacctgtcgtctagaagaagtgatgggtatccggtcttagaatacattccagaaaatgtatcaagctctactttacgaagtgtttctactggatcttcaagaccttcaaaaatatgtttggtgtgtggggatgaggcttcaggatgccattatggggtagtcacctgtggcagctgcaaagttttcttcaaaagagcagtggaaggtaaatgttcatggcaacacaactatttatgtgctggaagaaatgattgcatcattgataagattcgacgaaagaattgtcctgcttgcagacttcagaaatgtcttcaagctggaatgaatttaggagcacgaaagtcaaagaagttgggaaagttaaaagggattcacgaggagcagccacagcagcagcagcccccacccccacccccacccccgcaaagcccagaggaagggacaacgtacatcgctcctgcaaaagaaccctcggtcaacacagcactggttcctcagctctccacaatctcacgagcgctcacaccttcccccgttatggtccttgaaaacattgaacctgaaattgtatatgcaggctatgacagctcaaaaccagatacagccgaaaatctgctctccacgctcaaccgcttagcaggcaaacagatgatccaagtcgtgaagtgggcaaaggtacttccaggatttaaaaacttgcctcttgaggaccaaattaccctaatccagtattcttggatgtgtctatcatcatttgccttgagctggagatcgtacaaacatacgaacagccaatttctctattttgcaccagacctagtctttaatgaagagaagatgcatcagtctgccatgtatgaactatgccaggggatgcaccaaatcagccttcagttcgttcgactgcagctcacctttgaagaatacaccatcatgaaagttttgctgctactaagcacaattccaaaggatggcctcaaaagccaggctgcatttgaagaaatgaggacaaattacatcaaagaactgaggaagatggtaactaagtgtcccaacaattctgggcagagctggcagaggttctaccaactgaccaagctgctggactccatgcatgacctggtgagcgacctgctggaattctgcttctacaccttccgagagtcccatgcgctgaaggtagagttccccgcaatgctggtggagatcatcagcgaccagctgcccaaggtggagtcggggaacgccaagccgctctacttccaccggaagtga

SEQ ID NO: 160954 - DNA, 3822 bp, Homo sapiens
  Payload ID: 11443
  Gene Symbol: NR3C2
  Gene Name: nuclear receptor subfamily 3, group C, member 2
  Uniprot ID: P08235
  ENST ID: ENST00000512865
  CDS Start-End: 68-2671
ggtttcgtggcggtggcaagcgctgcaacaggtagacggcgagagacggaccccggccgaggcagcgatggagaccaaaggctaccacagtctccctgaaggtctagatatggaaagacggtggggtcaagtttctcaggctgtggagcgttcttccctgggacctacagagaggaccgatgagaataactacatggagattgtcaacgtaagctgtgtttccggtgctattccaaacaacagtactcaaggaagcagcaaagaaaaacaagaactactcccttgccttcagcaagacaataatcggcctgggattttaacatctgatattaaaactgagctggaatctaaggaactttcagcaactgtagctgagtccatgggtttatatatggattctgtaagagatgctgactattcctatgagcagcagaaccaacaaggaagcatgagtccagctaagatttatcagaatgttgaacagctggtgaaattttacaaaggaaatggccatcgtccttccactctaagttgtgtgaacacgcccttgagatcatttatgtctgactctgggagctccgtgaatggtggcgtcatgcgcgccgttgttaaaagccctatcatgtgtcatgagaaaagcccgtctgtttgcagccctctgaacatgacatcttcggtttgcagccctgctggaatcaactctgtgtcctccaccacagccagctttggcagttttccagtgcacagcccaatcacccagggaactcctctgacatgctcccctaatgttgaaaatcgaggctccaggtcgcacagccctgcacatgctagcaatgtgggctctcctctctcaagtccgttaagtagcatgaaatcctcaatttccagccctccaagtcactgcagtgtaaaatctccagtctccagtcccaataatgtcactctgagatcctctgtgtctagccctgcaaatattaacaactcaaggtgctctgtttccagcccttcgaacactaataacagatccacgctttccagtccggcagccagtactgtgggatctatctgtagccctgtaaacaatgccttcagctacactgcttctggcacctctgctggatccagtacattgcgggatgtggttcccagtccagacacgcaggagaaaggtgctcaagaggtcccttttcctaagactgaggaagtagagagtgccatctcaaatggtgtgactggccagcttaatattgtccagtacataaaaccagaaccagatggagcttttagcagctcatgtctaggaggaaatagcaaaataaattcggattcttcattctcagtaccaataaagcaagaatcaaccaagcattcatgttcaggcacctcttttaaagggaatccaacagtaaacccgtttccatttatggatggctcgtatttttcctttatggatgataaagactattattccctatcaggaattttaggaccacctgtgcccggctttgatggtaactgtgaaggcagcggattcccagtgggtattaaacaagaaccagatgatgggagctattacccagaggccagcatcccttcctctgctattgttggggtgaattcaggtggacagtccttccactacaggattggtgctcaaggtacaatatctttatcacgatcggctagagaccaatctttccaacacctgagttcctttcctcctgtcaatactttagtggagtcatggaaatcacacggcgacctgtcgtctagaagaagtgatgggtatccggtcttagaatacattccagaaaatgtatcaagctctactttacgaagtgtttctactggatcttcaagaccttcaaaaatatgtttggtgtgtggggatgaggcttcaggatgccattatggggtagtcacctgtggcagctgcaaagttttcttcaaaagagcagtggaagggcaacacaactatttatgtgctggaagaaatgattgcatcattgataagattcgacgaaagaattgtcctgcttgcagacttcagaaatgtcttcaagctggaatgaatttaggaggatttaaaaacttgcctcttgaggaccaaattaccctaatccagtattcttggatgtgtctatcatcatttgccttgagctggagatcgtacaaacatacgaacagccaatttctctattttgcaccagacctagtctttaatgaagagaagatgcatcagtctgccatgtatgaactatgccaggggatgcaccaaatcagccttcagttcgttcgactgcagctcacctttgaagaatacaccatcatgaaagttttgctgctactaagcacaattccaaaggatggcctcaaaagccaggctgcatttgaagaaatgaggacaaattacatcaaagaactgaggaagatggtaactaagtgtcccaacaattctgggcagagctggcagaggttctaccaactgaccaagctgctggactccatgcatgacctggtgagcgacctgctggaattctgcttctacaccttccgagagtcccatgcgctgaaggtagagttccccgcaatgctggtggagatcatcagcgaccagctgcccaaggtggagtcggggaacgccaagccgctctacttccaccggaagtgactgcccgctgcccagaagaactttgccttaagtttccctgtgttgttccacacccagaaggacccaagaaaacctgtttttaacatgtgatggttgattcacacttgttcaacagtttctcaagtttaaagtcatgtcagaggtttggagccgggaaagctgtttttccgtggatttggcgagaccagagcagtctgaaggattccccacctccaatcccccagcgcttagaaacatgttcctgttcctcgggatgaaaagccatatctagtcaataactctgattttgatattttcacagatggaagaagttttaactatgccgtgtagtttctggtatcgttcgcttgttttaaaagggttcaaggactaacgaacgttttaaagcttacccttggtttgcacataaaacgtatagtcaatatggggcattaatattcttttgttattaaaaaaacacaaaaaaataataaaaaaatatatacagattcctgttgtgtaataacagaactcgtggcgtggggcagcagctgcctctgagccctcgctcgtccacggtcttctgcatcactggtatacacactcgttagcgtccatttcttatttaattagaatggataagatgatgttaaatgccttggtttgatttctagtatctattgtgttggctttacaaataattttttgcagtcttttgctgtgctgtacattactgtatgtataaattatgaaggacctgaaataaggtataaggatcttttgtaaatgagacacatacaaaaaaaatctttaatggttaataggatgaatgggaaagtatttttgaaagaattctattttgctggagactatttaagtactatctttgtctaaacaaggtaatttttttttgtaaagtgcaatgtcctgcatgcataatgaaccgtttacagtgtatttaagaaagggaaagctgtgccttttttagcttcatatctaatttaccattattttacagtctctgttgtaaataaccacactgaaacctcttcggttgtcttgaaacctttctactttttctgtactttttgttttgttcttggtctcccgcttggggcatttgtgggactccagcacgttttctggcttctgcttcatcctgctccatcggg

SEQ ID NO: 160955 - DNA, 5909 bp, Homo sapiens
  Payload ID: 11443
  Gene Symbol: NR3C2
  Gene Name: nuclear receptor subfamily 3, group C, member 2
  ENST ID: ENST00000625323
  CDS Start-End: 364-3330
aaaagggccagccctccagctggcccactccccctccgggctttcgcccgccctctctccctcccttttttgcccgccctggccctgcccctgcccctgccccctcctctcagcccctccgcgcccggggtgtcattgggcccgggagacgggagccaacttcaggctgctcagaggaagcccgtgcagtcagtcacctgggtgcaagagcgttgctgcctcgggctctcccgctgcagggagagcggcactcgctggcctggatgtggttggatttaggggggctccgcagcaggggtttcgtggcggtggcaagcgctgcaacaggtagacggcgagagacggaccccggccgaggcagcgatggagaccaaaggctaccacagtctccctgaaggtctagatatggaaagacggtggggtcaagtttctcaggctgtggagcgttcttccctgggacctacagagaggaccgatgagaataactacatggagattgtcaacgtaagctgtgtttccggtgctattccaaacaacagtactcaaggaagcagcaaagaaaaacaagaactactcccttgccttcagcaagacaataatcggcctgggattttaacatctgatattaaaactgagctggaatctaaggaactttcagcaactgtagctgagtccatgggtttatatatggattctgtaagagatgctgactattcctatgagcagcagaaccaacaaggaagcatgagtccagctaagatttatcagaatgttgaacagctggtgaaattttacaaaggaaatggccatcgtccttccactctaagttgtgtgaacacgcccttgagatcatttatgtctgactctgggagctccgtgaatggtggcgtcatgcgcgccgttgttaaaagccctatcatgtgtcatgagaaaagcccgtctgtttgcagccctctgaacatgacatcttcggtttgcagccctgctggaatcaactctgtgtcctccaccacagccagctttggcagttttccagtgcacagcccaatcacccagggaactcctctgacatgctcccctaatgttgaaaatcgaggctccaggtcgcacagccctgcacatgctagcaatgtgggctctcctctctcaagtccgttaagtagcatgaaatcctcaatttccagccctccaagtcactgcagtgtaaaatctccagtctccagtcccaataatgtcactctgagatcctctgtgtctagccctgcaaatattaacaactcaaggtgctctgtttccagcccttcgaacactaataacagatccacgctttccagtccggcagccagtactgtgggatctatctgtagccctgtaaacaatgccttcagctacactgcttctggcacctctgctggatccagtacattgcgggatgtggttcccagtccagacacgcaggagaaaggtgctcaagaggtcccttttcctaagactgaggaagtagagagtgccatctcaaatggtgtgactggccagcttaatattgtccagtacataaaaccagaaccagatggagcttttagcagctcatgtctaggaggaaatagcaaaataaattcggattcttcattctcagtaccaataaagcaagaatcaaccaagcattcatgttcaggcacctcttttaaagggaatccaacagtaaacccgtttccatttatggatggctcgtatttttcctttatggatgataaagactattattccctatcaggaattttaggaccacctgtgcccggctttgatggtaactgtgaaggcagcggattcccagtgggtattaaacaagaaccagatgatgggagctattacccagaggccagcatcccttcctctgctattgttggggtgaattcaggtggacagtccttccactacaggattggtgctcaaggtacaatatctttatcacgatcggctagagaccaatctttccaacacctgagttcctttcctcctgtcaatactttagtggagtcatggaaatcacacggcgacctgtcgtctagaagaagtgatgggtatccggtcttagaatacattccagaaaatgtatcaagctctactttacgaagtgtttctactggatcttcaagaccttcaaaaatatgtttggtgtgtggggatgaggcttcaggatgccattatggggtagtcacctgtggcagctgcaaagttttcttcaaaagagcagtggaaggtaaatgttcatggcaacacaactatttatgtgctggaagaaatgattgcatcattgataagattcgacgaaagaattgtcctgcttgcagacttcagaaatgtcttcaagctggaatgaatttaggagcacgaaagtcaaagaagttgggaaagttaaaagggattcacgaggagcagccacagcagcagcagcccccacccccacccccacccccgcaaagcccagaggaagggacaacgtacatcgctcctgcaaaagaaccctcggtcaacacagcactggttcctcagctctccacaatctcacgagcgctcacaccttcccccgttatggtccttgaaaacattgaacctgaaattgtatatgcaggctatgacagctcaaaaccagatacagccgaaaatctgctctccacgctcaaccgcttagcaggcaaacagatgatccaagtcgtgaagtgggcaaaggtacttccaggatttaaaaacttgcctcttgaggaccaaattaccctaatccagtattcttggatgtgtctatcatcatttgccttgagctggagatcgtacaaacatacgaacagccaatttctctattttgcaccagacctagtctttaatgaagagaagatgcatcagtctgccatgtatgaactatgccaggggatgcaccaaatcagccttcagttcgttcgactgcagctcacctttgaagaatacaccatcatgaaagttttgctgctactaagcacaattccaaaggatggcctcaaaagccaggctgcatttgaagaaatgaggacaaattacatcaaagaactgaggaagatggtaactaagtgtcccaacaattctgggcagagctggcagaggttctaccaactgaccaagctgctggactccatgcatgacctggtgagcgacctgctggaattctgcttctacaccttccgagagtcccatgcgctgaaggtagagttccccgcaatgctggtggagatcatcagcgaccagctgcccaaggtggagtcggggaacgccaagccgctctacttccaccggaagtgactgcccgctgcccagaagaactttgccttaagtttccctgtgttgttccacacccagaaggacccaagaaaacctgtttttaacatgtgatggttgattcacacttgttcaacagtttctcaagtttaaagtcatgtcagaggtttggagccgggaaagctgtttttccgtggatttggcgagaccagagcagtctgaaggattccccacctccaatcccccagcgcttagaaacatgttcctgttcctcgggatgaaaagccatatctagtcaataactctgattttgatattttcacagatggaagaagttttaactatgccgtgtagtttctggtatcgttcgcttgttttaaaagggttcaaggactaacgaacgttttaaagcttacccttggtttgcacataaaacgtatagtcaatatggggcattaatattcttttgttattaaaaaaacacaaaaaaataataaaaaaatatatacagattcctgttgtgtaataacagaactcgtggcgtggggcagcagctgcctctgagccctcgctcgtccacggtcttctgcatcactggtatacacactcgttagcgtccatttcttatttaattagaatggataagatgatgttaaatgccttggtttgatttctagtatctattgtgttggctttacaaataattttttgcagtcttttgctgtgctgtacattactgtatgtataaattatgaaggacctgaaataaggtataaggatcttttgtaaatgagacacatacaaaaaaaatctttaatggttaataggatgaatgggaaagtatttttgaaagaattctattttgctggagactatttaagtactatctttgtctaaacaaggtaatttttttttgtaaagtgcaatgtcctgcatgcataatgaaccgtttacagtgtatttaagaaagggaaagctgtgccttttttagcttcatatctaatttaccattattttacagtctctgttgtaaataaccacactgaaacctcttcggttgtcttgaaacctttctactttttctgtactttttgttttgttcttggtctcccgcttggggcatttgtgggactccagcacgttttctggcttctgcttcatcctgctccatcggggaatgacacactgcggtgtctgcagctcctggaaggtgtcatttgacaacacatgtgggagaggaggtccttggagtgctgcagctttgggaaagctgcctcgtttcccttttcctctagaagcagaaccagctctacgagagtgagactgggaacttgatggctcagagagcatcttttcctcccattttagaaaatcagattttctcctgtgggaaaaaaaaattccatgcactctctctctgttaaagatcagctattcccttctgatcttggaaagaggttctgcactcctggaaccggtcacaggaacgcacagatcatggcaggatgcgctgggacggcccatcttggcaaggttcagtctgaatggcatggagaccgggagatagaggggttttagatttttaaaaggtaggttttaaaaataagttttatacataaacagttttggagaaaaattacagatcatataagcaagacagtggcactaaaatgtttaattcattaatctgtttgtttggcactgatgcaatgtatggcttttctcttgccccaaatcacaaacatatgtatctttggggaaactaacaatatgattgcactaaataaactactttgaatagaggccaaattaatcttttaaaaatgatgataatcatcaggtttactcagtgaaatcatattaattattttccaaaatctaaaagctgtagctggagaagcccatggccacgaggaagcagcaattaattagatcaacacttttctccagggttcaccatgcaggcaacattaccttgtctttcaaaagacacctgccttatgcaaggggaaacctgtgaaagctgcactcagagggaggagtttttcttacataatttgcaatttcaggaatttaatttataggcagatctttaaatacagtcaacttacggtgcacagtaatatgaaagccacactttgaaggtaataaatacacagcatgcagactgggagttgctagcaaacaaatggcttacttacaaaagcagcttttagttcagacttagtttttataaaatgggaattctgacttacttaaccaggtttgggatggagatggtctgcatcagctttttgtattaacaaagttactggctctttgtgtgtctccaggtaactttgcttgattaaacagcaaagccatattctaaattcactgttgaatgcctgtcccagtccaaattgtctgtctgctcttatttttgtaccatattgctcttaaaaatcttggtttggtacagttcataattcaccaaaagttcatataatttaaagaaacactaaattagtttaaaatgaagcaatttatatctttatgcaaaaacatatgtctgtctttgcaaaggactgtaagcagattacaataaatcctttactttaatc

SEQ ID NO: 160956 - DNA, 2678 bp, Homo sapiens
  Payload ID: 11444
  Gene Symbol: NR4A1
  Gene Name: nuclear receptor subfamily 4, group A, member 1
  Uniprot ID: P22736
  ENST ID: ENST00000243050
  CDS Start-End: 320-2116
gtcacggagcgcttaagaggagggtcgggctcggccggggagtcccagtggcggaggctacgaaacttgggggagtgcacagaagaacttcgggagcgcacgcgggaccagggaccaggctgagactcggggcgccagtccgggcaggggcagcgggagccggccgggtagggtgcagcctgaggcttgttcagcagaacaggtgcaagccacattgttgccaagacctgcctgaagccggattctccccactgcctccttcaaccccgcctcttcctcctcctgtgggactgctcccccctcctgtgaggctagatagatgccctgtatccaagcccaatatgggacaccagcaccgagtccgggaccccgtgaccacctggcaagcgaccccctgacccctgagttcatcaagcccaccatggacctggccagccccgaggcagcccccgctgcccccactgccctgcccagcttcagcaccttcatggacggctacacaggagagtttgacaccttcctctaccagctgccaggaacagtccagccatgctcctcagcctcctcctcggcctcctccacatcctcgtcctcagccacctcccctgcctctgcctccttcaagttcgaggacttccaggtgtacggctgctaccccggccccctgagcggcccagtggatgaggccctgtcctccagtggctctgactactatggcagcccctgctcggccccgtcgccctccacgcccagcttccagccgccccagctctctccctgggatggctccttcggccacttctcgcccagccagacttacgaaggcctgcgggcatggacagagcagctgcccaaagcctctgggcccccacagcctccagccttcttttccttcagtcctcccaccggccccagccccagcctggcccagagccccctgaagttgttcccctcacaggccacccaccagctgggggagggagagagctattccatgcctacggccttcccaggtttggcacccacttctccacaccttgagggctcggggatactggatacacccgtgacctcaaccaaggcccggagcggggccccaggtggaagtgaaggccgctgtgctgtgtgtggggacaacgcttcatgccagcattatggtgtccgcacatgtgagggctgcaagggcttcttcaagcgcacagtgcagaaaaacgccaagtacatctgcctggctaacaaggactgccctgtggacaagaggcggcgaaaccgctgccagttctgccgcttccagaagtgcctggcggtgggcatggtgaaggaagttgtccgaacagacagcctgaaggggcggcggggccggctaccttcaaaacccaagcagcccccagatgcctcccctgccaatctcctcacttccctggtccgtgcacacctggactcagggcccagcactgccaaactggactactccaagttccaggagctggtgctgccccactttgggaaggaagatgctggggatgtacagcagttctacgacctgctctccggttctctggaggtcatccgcaagtgggcggagaagatccctggctttgctgagctgtcaccggctgaccaggacctgttgctggagtcggccttcctggagctcttcatcctccgcctggcgtacaggtctaagccaggcgagggcaagctcatcttctgctcaggcctggtgctacaccggctgcagtgtgcccgtggcttcggggactggattgacagtatcctggccttctcaaggtccctgcacagcttgcttgtcgatgtccctgccttcgcctgcctctctgcccttgtcctcatcaccgaccggcatgggctgcaggagccgcggcgggtggaggagctgcagaaccgcatcgccagctgcctgaaggagcacgtggcagctgtggcgggcgagccccagccagccagctgcctgtcacgtctgttgggcaaactgcccgagctgcggaccctgtgcacccagggcctgcagcgcatcttctacctcaagctggaggacttggtgccccctccacccatcattgacaagatcttcatggacacgctgcccttctgacccctgcctgggaacacgtgtgcacatgcgcactctcatatgccaccccatgtgcctttagtccacggacccccagagcacccccaagcctgggcttgagctgcagaatgactccaccttctcacctgctccaggaggtttgcagggagctcaagcccttggggagggggatgccttcatgggggtgaccccacgatttgtcttatcccccccagcctggccccggcctttatgttttttgtaagataaaccgtttttaacacatagcgccgtgctgtaaataagcccagtgctgctgtaaatacaggaagaaagagcttgaggtgggagcggggctgggaggaagggatgggccccgccttcctgggcagcctttccagcctcctgctggctctctcttcctaccctccttccacatgtacataaactgtcactctaggaagaagacaaatgacagattctgacatttatatttgtgtattttcctggatttatagtatgtgacttttctgattaatatatttaatatattgaataaaaaatagacatgtagttggaactg

SEQ ID NO: 160957 - DNA, 2589 bp, Homo sapiens
  Payload ID: 11444
  Gene Symbol: NR4A1
  Gene Name: nuclear receptor subfamily 4, group A, member 1
  Uniprot ID: P22736
  ENST ID: ENST00000360284
  CDS Start-End: 192-2027
ttcctggtgtaagctttggtatggatggtggccgtctccctacagactgggagctgttagagggcagggatcctagctgacacatctatgtcctcgccttggttggaggcctccaccatggacagaggccaggccctgcccctcccaggcagcctggctccttctgctgggccctgaaggcagacgggataatgtggttggccaaggcctgttggtccatccagagtgagatgccctgtatccaagcccaatatgggacaccagcaccgagtccgggaccccgtgaccacctggcaagcgaccccctgacccctgagttcatcaagcccaccatggacctggccagccccgaggcagcccccgctgcccccactgccctgcccagcttcagcaccttcatggacggctacacaggagagtttgacaccttcctctaccagctgccaggaacagtccagccatgctcctcagcctcctcctcggcctcctccacatcctcgtcctcagccacctcccctgcctctgcctccttcaagttcgaggacttccaggtgtacggctgctaccccggccccctgagcggcccagtggatgaggccctgtcctccagtggctctgactactatggcagcccctgctcggccccgtcgccctccacgcccagcttccagccgccccagctctctccctgggatggctccttcggccacttctcgcccagccagacttacgaaggcctgcgggcatggacagagcagctgcccaaagcctctgggcccccacagcctccagccttcttttccttcagtcctcccaccggccccagccccagcctggcccagagccccctgaagttgttcccctcacaggccacccaccagctgggggagggagagagctattccatgcctacggccttcccaggtttggcacccacttctccacaccttgagggctcggggatactggatacacccgtgacctcaaccaaggcccggagcggggccccaggtggaagtgaaggccgctgtgctgtgtgtggggacaacgcttcatgccagcattatggtgtccgcacatgtgagggctgcaagggcttcttcaagcgcacagtgcagaaaaacgccaagtacatctgcctggctaacaaggactgccctgtggacaagaggcggcgaaaccgctgccagttctgccgcttccagaagtgcctggcggtgggcatggtgaaggaagttgtccgaacagacagcctgaaggggcggcggggccggctaccttcaaaacccaagcagcccccagatgcctcccctgccaatctcctcacttccctggtccgtgcacacctggactcagggcccagcactgccaaactggactactccaagttccaggagctggtgctgccccactttgggaaggaagatgctggggatgtacagcagttctacgacctgctctccggttctctggaggtcatccgcaagtgggcggagaagatccctggctttgctgagctgtcaccggctgaccaggacctgttgctggagtcggccttcctggagctcttcatcctccgcctggcgtacaggtctaagccaggcgagggcaagctcatcttctgctcaggcctggtgctacaccggctgcagtgtgcccgtggcttcggggactggattgacagtatcctggccttctcaaggtccctgcacagcttgcttgtcgatgtccctgccttcgcctgcctctctgcccttgtcctcatcaccgaccggcatgggctgcaggagccgcggcgggtggaggagctgcagaaccgcatcgccagctgcctgaaggagcacgtggcagctgtggcgggcgagccccagccagccagctgcctgtcacgtctgttgggcaaactgcccgagctgcggaccctgtgcacccagggcctgcagcgcatcttctacctcaagctggaggacttggtgccccctccacccatcattgacaagatcttcatggacacgctgcccttctgacccctgcctgggaacacgtgtgcacatgcgcactctcatatgccaccccatgtgcctttagtccacggacccccagagcacccccaagcctgggcttgagctgcagaatgactccaccttctcacctgctccaggaggtttgcagggagctcaagcccttggggagggggatgccttcatgggggtgaccccacgatttgtcttatcccccccagcctggccccggcctttatgttttttgtaagataaaccgtttttaacacatagcgccgtgctgtaaataagcccagtgctgctgtaaatacaggaagaaagagcttgaggtgggagcggggctgggaggaagggatgggccccgccttcctgggcagcctttccagcctcctgctggctctctcttcctaccctccttccacatgtacataaactgtcactctaggaagaagacaaatgacagattctgacatttatatttgtgtattttcctggatttatagtatgtgacttttctgattaatatatttaatatattgaataaaaaatagacatgtagttggaactg

SEQ ID NO: 160958 - DNA, 2639 bp, Homo sapiens
  Payload ID: 11444
  Gene Symbol: NR4A1
  Gene Name: nuclear receptor subfamily 4, group A, member 1
  Uniprot ID: P22736
  ENST ID: ENST00000394824
  CDS Start-End: 280-2076
agtcccagtggcggaggctacgaaacttgggggagtgcacagaagaacttcgggagcgcacgcgggaccagggaccaggctgagactcggggcgccagtccgggcaggggcagcgggagccggccgggtagggtgcagcctgaggcttgttcagcagaacaggtgcaagccacattgttgccaagacctgcctgaagccggattctccccactgcctccttcaaccccgcctcttcctcctcctgtgggactgctcccccctcctgtgaggctagatagatgccctgtatccaagcccaatatgggacaccagcaccgagtccgggaccccgtgaccacctggcaagcgaccccctgacccctgagttcatcaagcccaccatggacctggccagccccgaggcagcccccgctgcccccactgccctgcccagcttcagcaccttcatggacggctacacaggagagtttgacaccttcctctaccagctgccaggaacagtccagccatgctcctcagcctcctcctcggcctcctccacatcctcgtcctcagccacctcccctgcctctgcctccttcaagttcgaggacttccaggtgtacggctgctaccccggccccctgagcggcccagtggatgaggccctgtcctccagtggctctgactactatggcagcccctgctcggccccgtcgccctccacgcccagcttccagccgccccagctctctccctgggatggctccttcggccacttctcgcccagccagacttacgaaggcctgcgggcatggacagagcagctgcccaaagcctctgggcccccacagcctccagccttcttttccttcagtcctcccaccggccccagccccagcctggcccagagccccctgaagttgttcccctcacaggccacccaccagctgggggagggagagagctattccatgcctacggccttcccaggtttggcacccacttctccacaccttgagggctcggggatactggatacacccgtgacctcaaccaaggcccggagcggggccccaggtggaagtgaaggccgctgtgctgtgtgtggggacaacgcttcatgccagcattatggtgtccgcacatgtgagggctgcaagggcttcttcaagcgcacagtgcagaaaaacgccaagtacatctgcctggctaacaaggactgccctgtggacaagaggcggcgaaaccgctgccagttctgccgcttccagaagtgcctggcggtgggcatggtgaaggaagttgtccgaacagacagcctgaaggggcggcggggccggctaccttcaaaacccaagcagcccccagatgcctcccctgccaatctcctcacttccctggtccgtgcacacctggactcagggcccagcactgccaaactggactactccaagttccaggagctggtgctgccccactttgggaaggaagatgctggggatgtacagcagttctacgacctgctctccggttctctggaggtcatccgcaagtgggcggagaagatccctggctttgctgagctgtcaccggctgaccaggacctgttgctggagtcggccttcctggagctcttcatcctccgcctggcgtacaggtctaagccaggcgagggcaagctcatcttctgctcaggcctggtgctacaccggctgcagtgtgcccgtggcttcggggactggattgacagtatcctggccttctcaaggtccctgcacagcttgcttgtcgatgtccctgccttcgcctgcctctctgcccttgtcctcatcaccgaccggcatgggctgcaggagccgcggcgggtggaggagctgcagaaccgcatcgccagctgcctgaaggagcacgtggcagctgtggcgggcgagccccagccagccagctgcctgtcacgtctgttgggcaaactgcccgagctgcggaccctgtgcacccagggcctgcagcgcatcttctacctcaagctggaggacttggtgccccctccacccatcattgacaagatcttcatggacacgctgcccttctgacccctgcctgggaacacgtgtgcacatgcgcactctcatatgccaccccatgtgcctttagtccacggacccccagagcacccccaagcctgggcttgagctgcagaatgactccaccttctcacctgctccaggaggtttgcagggagctcaagcccttggggagggggatgccttcatgggggtgaccccacgatttgtcttatcccccccagcctggccccggcctttatgttttttgtaagataaaccgtttttaacacatagcgccgtgctgtaaataagcccagtgctgctgtaaatacaggaagaaagagcttgaggtgggagcggggctgggaggaagggatgggccccgccttcctgggcagcctttccagcctcctgctggctctctcttcctaccctccttccacatgtacataaactgtcactctaggaagaagacaaatgacagattctgacatttatatttgtgtattttcctggatttatagtatgtgacttttctgattaatatatttaatatattgaataaaaaatagacatgtagttggaactga

SEQ ID NO: 160959 - DNA, 2528 bp, Homo sapiens
  Payload ID: 11444
  Gene Symbol: NR4A1
  Gene Name: nuclear receptor subfamily 4, group A, member 1
  Uniprot ID: P22736
  ENST ID: ENST00000394825
  CDS Start-End: 170-1966
gtcacggagcgcttaagaggagggtcgggctcggccggggagtcccagtggcggaggctacgaaacttgggggagtgcacagaagaacttcgggagcgcacgcgggaccagggaccaggctgagactcggggcgccagtccgggcaggggcagcgggagccggccggagatgccctgtatccaagcccaatatgggacaccagcaccgagtccgggaccccgtgaccacctggcaagcgaccccctgacccctgagttcatcaagcccaccatggacctggccagccccgaggcagcccccgctgcccccactgccctgcccagcttcagcaccttcatggacggctacacaggagagtttgacaccttcctctaccagctgccaggaacagtccagccatgctcctcagcctcctcctcggcctcctccacatcctcgtcctcagccacctcccctgcctctgcctccttcaagttcgaggacttccaggtgtacggctgctaccccggccccctgagcggcccagtggatgaggccctgtcctccagtggctctgactactatggcagcccctgctcggccccgtcgccctccacgcccagcttccagccgccccagctctctccctgggatggctccttcggccacttctcgcccagccagacttacgaaggcctgcgggcatggacagagcagctgcccaaagcctctgggcccccacagcctccagccttcttttccttcagtcctcccaccggccccagccccagcctggcccagagccccctgaagttgttcccctcacaggccacccaccagctgggggagggagagagctattccatgcctacggccttcccaggtttggcacccacttctccacaccttgagggctcggggatactggatacacccgtgacctcaaccaaggcccggagcggggccccaggtggaagtgaaggccgctgtgctgtgtgtggggacaacgcttcatgccagcattatggtgtccgcacatgtgagggctgcaagggcttcttcaagcgcacagtgcagaaaaacgccaagtacatctgcctggctaacaaggactgccctgtggacaagaggcggcgaaaccgctgccagttctgccgcttccagaagtgcctggcggtgggcatggtgaaggaagttgtccgaacagacagcctgaaggggcggcggggccggctaccttcaaaacccaagcagcccccagatgcctcccctgccaatctcctcacttccctggtccgtgcacacctggactcagggcccagcactgccaaactggactactccaagttccaggagctggtgctgccccactttgggaaggaagatgctggggatgtacagcagttctacgacctgctctccggttctctggaggtcatccgcaagtgggcggagaagatccctggctttgctgagctgtcaccggctgaccaggacctgttgctggagtcggccttcctggagctcttcatcctccgcctggcgtacaggtctaagccaggcgagggcaagctcatcttctgctcaggcctggtgctacaccggctgcagtgtgcccgtggcttcggggactggattgacagtatcctggccttctcaaggtccctgcacagcttgcttgtcgatgtccctgccttcgcctgcctctctgcccttgtcctcatcaccgaccggcatgggctgcaggagccgcggcgggtggaggagctgcagaaccgcatcgccagctgcctgaaggagcacgtggcagctgtggcgggcgagccccagccagccagctgcctgtcacgtctgttgggcaaactgcccgagctgcggaccctgtgcacccagggcctgcagcgcatcttctacctcaagctggaggacttggtgccccctccacccatcattgacaagatcttcatggacacgctgcccttctgacccctgcctgggaacacgtgtgcacatgcgcactctcatatgccaccccatgtgcctttagtccacggacccccagagcacccccaagcctgggcttgagctgcagaatgactccaccttctcacctgctccaggaggtttgcagggagctcaagcccttggggagggggatgccttcatgggggtgaccccacgatttgtcttatcccccccagcctggccccggcctttatgttttttgtaagataaaccgtttttaacacatagcgccgtgctgtaaataagcccagtgctgctgtaaatacaggaagaaagagcttgaggtgggagcggggctgggaggaagggatgggccccgccttcctgggcagcctttccagcctcctgctggctctctcttcctaccctccttccacatgtacataaactgtcactctaggaagaagacaaatgacagattctgacatttatatttgtgtattttcctggatttatagtatgtgacttttctgattaatatatttaatatattgaataaaaaatagacatgtagttggaactg

SEQ ID NO: 160960 - DNA, 3511 bp, Homo sapiens
  Payload ID: 11444
  Gene Symbol: NR4A1
  Gene Name: nuclear receptor subfamily 4, group A, member 1
  ENST ID: ENST00000545748
  CDS Start-End: 996-2954
tttctccgccggctgcgggaaccggttccaggagcgcgggagctcgtctgccaggagacccagccgggagggaccgatgctgcgtgatgcaaccccttcgagggactgagtcaagaaaccaaggctgggggtctcgtggagtcaggcggagctggggattaggactcggggcttgtgtctcccaggcgtgtttttttgttgttgttttgtttttttgccgcaacatcttccttatactgggtggggtgggggcgggggtggtctgtatttccagacctcctccatggtggtctggctgtgtggagggcagggcacagttccttgacttggctcattcccccccaacgccccccctttcttttttttttgagatggagtctcgctctgttgcccaggctggagtgcagtagcgtgatctcggctcactgcaatctccgtctcccgggttcaagcgaatctcctgcctcagcctccagagtagctgggactacaggcacccaccaccacgcccggctaatttttgtatttttagtagagacagggtttcaccatattggccaggctggtctggaactcctgaccttgtgatccgcctgcctcggcctcctaaagtgctgggattacaggcgtgagccaccgcgcctggcaggctcattccctttttatgccttcgtttttgatagatgacctggggatgggagaaatgctgcagaggtggtttatttacagtgaattgttaatttggttgtggggctagtattaggggcacattgggaaaacacaggctgggcagaggttggtaggttcacaacagttatgcccactgggtgctgatggatttgggggctgtcgtcggcctggcttggggccctagtggtggggctacaaggcttgctcctagatctactccaagtgaacatttaagatcagtgacttggatggagacttaaaaaggaagtcagctgactccgtgtagtcatccagagctgtgaggaatgacaagtgcacagtataaaatcaagattctaattgaaggcctccaccatggacagaggccaggccctgcccctcccaggcagcctggctccttctgctgggccctgaaggcagacgggataatgtggttggccaaggcctgttggtccatccagagtgagatgccctgtatccaagcccaatatgggacaccagcaccgagtccgggaccccgtgaccacctggcaagcgaccccctgacccctgagttcatcaagcccaccatggacctggccagccccgaggcagcccccgctgcccccactgccctgcccagcttcagcaccttcatggacggctacacaggagagtttgacaccttcctctaccagctgccaggaacagtccagccatgctcctcagcctcctcctcggcctcctccacatcctcgtcctcagccacctcccctgcctctgcctccttcaagttcgaggacttccaggtgtacggctgctaccccggccccctgagcggcccagtggatgaggccctgtcctccagtggctctgactactatggcagcccctgctcggccccgtcgccctccacgcccagcttccagccgccccagctctctccctgggatggctccttcggccacttctcgcccagccagacttacgaaggcctgcgggcatggacagagcagctgcccaaagcctctgggcccccacagcctccagccttcttttccttcagtcctcccaccggccccagccccagcctggcccagagccccctgaagttgttcccctcacaggccacccaccagctgggggagggagagagctattccatgcctacggccttcccaggtttggcacccacttctccacaccttgagggctcggggatactggatacacccgtgacctcaaccaaggcccggagcggggccccaggtggaagtgaaggccgctgtgctgtgtgtggggacaacgcttcatgccagcattatggtgtccgcacatgtgagggctgcaagggcttcttcaagcgcacagtgcagaaaaacgccaagtacatctgcctggctaacaaggactgccctgtggacaagaggcggcgaaaccgctgccagttctgccgcttccagaagtgcctggcggtgggcatggtgaaggaagttgtccgaacagacagcctgaaggggcggcggggccggctaccttcaaaacccaagcagcccccagatgcctcccctgccaatctcctcacttccctggtccgtgcacacctggactcagggcccagcactgccaaactggactactccaagttccaggagctggtgctgccccactttgggaaggaagatgctggggatgtacagcagttctacgacctgctctccggttctctggaggtcatccgcaagtgggcggagaagatccctggctttgctgagctgtcaccggctgaccaggacctgttgctggagtcggccttcctggagctcttcatcctccgcctggcgtacaggtctaagccaggcgagggcaagctcatcttctgctcaggcctggtgctacaccggctgcagtgtgcccgtggcttcggggactggattgacagtatcctggccttctcaaggtccctgcacagcttgcttgtcgatgtccctgccttcgcctgcctctctgcccttgtcctcatcaccgaccggcatgggctgcaggagccgcggcgggtggaggagctgcagaaccgcatcgccagctgcctgaaggagcacgtggcagctgtggcgggcgagccccagccagccagctgcctgtcacgtctgttgggcaaactgcccgagctgcggaccctgtgcacccagggcctgcagcgcatcttctacctcaagctggaggacttggtgccccctccacccatcattgacaagatcttcatggacacgctgcccttctgacccctgcctgggaacacgtgtgcacatgcgcactctcatatgccaccccatgtgcctttagtccacggacccccagagcacccccaagcctgggcttgagctgcagaatgactccaccttctcacctgctccaggaggtttgcagggagctcaagcccttggggagggggatgccttcatgggggtgaccccacgatttgtcttatcccccccagcctggccccggcctttatgttttttgtaagataaaccgtttttaacacatagcgccgtgctgtaaataagcccagtgctgctgtaaatacaggaagaaagagcttgaggtgggagcggggctgggaggaagggatgggccccgccttcctgggcagcctttccagcctcctgctggctctctcttcctaccctccttccacatgtacataaactgtcactctaggaagaagacaaatgacagattctgacatttatatttgtgtattttcctggatttatagtatgtgacttttctgattaatatatttaatatattgaataaaaaatagacatgtagttgg

SEQ ID NO: 160961 - DNA, 2029 bp, Homo sapiens
  Payload ID: 11444
  Gene Symbol: NR4A1
  Gene Name: nuclear receptor subfamily 4, group A, member 1
  Uniprot ID: P22736
  ENST ID: ENST00000550082
  CDS Start-End: 89-1924
tgtaggcctccaccatggacagaggccaggccctgcccctcccaggcagcctggctccttctgctgggccctgaaggcagacgggataatgtggttggccaaggcctgttggtccatccagagtgagatgccctgtatccaagcccaatatgggacaccagcaccgagtccgggaccccgtgaccacctggcaagcgaccccctgacccctgagttcatcaagcccaccatggacctggccagccccgaggcagcccccgctgcccccactgccctgcccagcttcagcaccttcatggacggctacacaggagagtttgacaccttcctctaccagctgccaggaacagtccagccatgctcctcagcctcctcctcggcctcctccacatcctcgtcctcagccacctcccctgcctctgcctccttcaagttcgaggacttccaggtgtacggctgctaccccggccccctgagcggcccagtggatgaggccctgtcctccagtggctctgactactatggcagcccctgctcggccccgtcgccctccacgcccagcttccagccgccccagctctctccctgggatggctccttcggccacttctcgcccagccagacttacgaaggcctgcgggcatggacagagcagctgcccaaagcctctgggcccccacagcctccagccttcttttccttcagtcctcccaccggccccagccccagcctggcccagagccccctgaagttgttcccctcacaggccacccaccagctgggggagggagagagctattccatgcctacggccttcccaggtttggcacccacttctccacaccttgagggctcggggatactggatacacccgtgacctcaaccaaggcccggagcggggccccaggtggaagtgaaggccgctgtgctgtgtgtggggacaacgcttcatgccagcattatggtgtccgcacatgtgagggctgcaagggcttcttcaagcgcacagtgcagaaaaacgccaagtacatctgcctggctaacaaggactgccctgtggacaagaggcggcgaaaccgctgccagttctgccgcttccagaagtgcctggcggtgggcatggtgaaggaagttgtccgaacagacagcctgaaggggcggcggggccggctaccttcaaaacccaagcagcccccagatgcctcccctgccaatctcctcacttccctggtccgtgcacacctggactcagggcccagcactgccaaactggactactccaagttccaggagctggtgctgccccactttgggaaggaagatgctggggatgtacagcagttctacgacctgctctccggttctctggaggtcatccgcaagtgggcggagaagatccctggctttgctgagctgtcaccggctgaccaggacctgttgctggagtcggccttcctggagctcttcatcctccgcctggcgtacaggtctaagccaggcgagggcaagctcatcttctgctcaggcctggtgctacaccggctgcagtgtgcccgtggcttcggggactggattgacagtatcctggccttctcaaggtccctgcacagcttgcttgtcgatgtccctgccttcgcctgcctctctgcccttgtcctcatcaccgaccggcatgggctgcaggagccgcggcgggtggaggagctgcagaaccgcatcgccagctgcctgaaggagcacgtggcagctgtggcgggcgagccccagccagccagctgcctgtcacgtctgttgggcaaactgcccgagctgcggaccctgtgcacccagggcctgcagcgcatcttctacctcaagctggaggacttggtgccccctccacccatcattgacaagatcttcatggacacgctgcccttctgacccctgcctgggaacacgtgtgcacatgcgcactctcatatgccaccccatgtgcctttagtccacggacccccagagcacccccaagcctgggcttgagctgca

SEQ ID NO: 160962 - DNA, 1101 bp, Homo sapiens
  Payload ID: 11444
  Gene Symbol: NR4A1
  Gene Name: nuclear receptor subfamily 4, group A, member 1
  Uniprot ID: P22736
  ENST ID: ENST00000548232
  CDS Start-End: 124-1101
agtggcggaggctacgaaacttgggggagtgcacagaagaacttcgggagcgcacgcgggaccagggaccaggctgagactcggggcgccagtccgggcaggggcagcgggagccggccggagatgccctgtatccaagcccaatatgggacaccagcaccgagtccgggaccccgtgaccacctggcaagcgaccccctgacccctgagttcatcaagcccaccatggacctggccagccccgaggcagcccccgctgcccccactgccctgcccagcttcagcaccttcatggacggctacacaggagagtttgacaccttcctctaccagctgccaggaacagtccagccatgctcctcagcctcctcctcggcctcctccacatcctcgtcctcagccacctcccctgcctctgcctccttcaagttcgaggacttccaggtgtacggctgctaccccggccccctgagcggcccagtggatgaggccctgtcctccagtggctctgactactatggcagcccctgctcggccccgtcgccctccacgcccagcttccagccgccccagctctctccctgggatggctccttcggccacttctcgcccagccagacttacgaaggcctgcgggcatggacagagcagctgcccaaagcctctgggcccccacagcctccagccttcttttccttcagtcctcccaccggccccagccccagcctggcccagagccccctgaagttgttcccctcacaggccacccaccagctgggggagggagagagctattccatgcctacggccttcccaggtttggcacccacttctccacaccttgagggctcggggatactggatacacccgtgacctcaaccaaggcccggagcggggccccaggtggaagtgaaggccgctgtgctgtgtgtggggacaacgcttcatgccagcattatggtgtccgcacatgtgagggctgcaagggcttcttcaaggtaccgcgcagccccaggtggggccttttgttggaaatggagagaggctggcctcatcccattgggacctgtggtctccccctgggttctcctcctagctaa

SEQ ID NO: 160963 - DNA, 574 bp, Homo sapiens
  Payload ID: 11444
  Gene Symbol: NR4A1
  Gene Name: nuclear receptor subfamily 4, group A, member 1
  ENST ID: ENST00000550763
  CDS Start-End: 130-574
agtcccagtggcggaggctacgaaacttgggggagtgcacagaagaacttcgggagcgcacgcgggaccagggaccaggctgagactcggggcgccagtccgggcaggggcagcgggagccggccggagatgccctgtatccaagcccaatatgggacaccagcaccgagtccgggaccccgtgaccacctggcaagcgaccccctgacccctgagttcatcaagcccaccatggacctggccagccccgaggcagcccccgctgcccccactgccctgcccagcttcagcaccttcatggacggctacacaggagagtttgacaccttcctctaccagctgccaggaacagtccagccatgctcctcagcctcctcctcggcctcctccacatcctcgtcctcagccacctcccctgcctctgcctccttcaagttcgaggacttccaggtcgcacagtgcagaaaaacgccaagtacatctgcctggctaacaaggactgccctgtggacaagaggcggcgaaaccgctgccagttctgccgcttccagaagtgcctggcggtgggcatggt

SEQ ID NO: 160964 - DNA, 838 bp, Homo sapiens
  Payload ID: 11444
  Gene Symbol: NR4A1
  Gene Name: nuclear receptor subfamily 4, group A, member 1
  ENST ID: ENST00000562373
  CDS Start-End: 387-838
ctacgaaacttgggggagtgcacagaagaacttcgggagcgcacgcgggaccagggaccaggctgagactcggggcgccagtccgggcaggggcagcgggagccggccggtagtctctgttggatcttacaggtagggtgcagcctgaggcttgttcagcagaacaggtgcaagccacattgttgccaagacctgcctgaagccggattctccccactgcctccttcaaccccgcctcttcctcctcctgtgggactgctcccccctcctgtgaggctagatagatgccctgtatccaagcccaatatgggacaccagcaccgagtccgggaccccgtgaccacctggcaagcgaccccctgacccctgagttcatcaagcccaccatggacctggccagccccgaggcagcccccgctgcccccactgccctgcccagcttcagcaccttcatggacggctacacaggagagtttgacaccttcctctaccagctgccaggaacagtccagccatgctcctcagcctcctcctcggcctcctccacatcctcgtcctcagccacctcccctgcctctgcctccttcaagttcgaggacttccaggtgtacggctgctaccccggccccctgagcggcccagtggatgaggccctgtcctccagtggctctgactactatggcagcccctgctcggccccgtcgccctccacgcccagcttccagccgccccagctctctccctgggatggctccttcggccacttctcgcccagccagacttacgaaggcctgcgggcatggacagagcagctgcccaaagcctctgggcccccaca

SEQ ID NO: 160965 - DNA, 607 bp, Homo sapiens
  Payload ID: 11444
  Gene Symbol: NR4A1
  Gene Name: nuclear receptor subfamily 4, group A, member 1
  ENST ID: ENST00000550582
  CDS Start-End: 247-607
ctggactcagggcccagcactgccaaactggactactccaagctgcagccctgggttaatatgtgagacttggcaagtgagagcctgggcaggatctcagatccactcccactcccgggatctggcatccaagtgtctgacacagccatacgtggcagtgggtgtaggagcctgcctggggtgctgaccccactggaccgtcttcctagttccaggagctggtgctgccccactttgggaaggaagatgctggggatgtacagcagttctacgacctgctctccggttctctggaggtcatccgcaagtgggcggagaagatccctggctttgctgagctgtcaccggctgaccaggacctgttgctggagtcggccttcctggagctcttcatcctccgcctggcgtacaggtctaagccaggcgagggcaagctcatcttctgctcaggcctggtgctacaccggctgcagtgtgcccgtggcttcggggactggattgacagtatcctggccttctcaaggtccctgcacagcttgcttgtcgatgtccctgccttcgcctgcctctctgcccttgtcctcatcaccgaccggcatgggctgca

SEQ ID NO: 160966 - DNA, 548 bp, Homo sapiens
  Payload ID: 11444
  Gene Symbol: NR4A1
  Gene Name: nuclear receptor subfamily 4, group A, member 1
  ENST ID: ENST00000548977
  CDS Start-End: 192-548
ttcctggtgtaagctttggtatggatggtggccgtctccctacagactgggagctgttagagggcagggatcctagctgacacatctatgtcctcgccttggttggaggcctccaccatggacagaggccaggccctgcccctcccaggcagcctggctccttctgctgggccctgaaggcagacgggataatgtggttggccaaggcctgttggtccatccagagtgagatgccctgtatccaagcccaatatgggacaccagcaccgagtccgggaccccgtgaccacctggcaagcgaccccctgacccctgagttcatcaagcccaccatggacctggccagccccgaggcagcccccgctgcccccactgccctgcccagcttcagcaccttcatggacggctacacaggagagtttgacaccttcctctaccagctgccaggaacagtccagccatgctcctcagcctcctcctcggcctcctccacatcctcgtcctcagccacctcccctgcctctgcctccttcaagttcgaggacttc

SEQ ID NO: 160967 - DNA, 521 bp, Homo sapiens
  Payload ID: 11444
  Gene Symbol: NR4A1
  Gene Name: nuclear receptor subfamily 4, group A, member 1
  ENST ID: ENST00000553200
  CDS Start-End: 286-521
ggcgctgagcggctgcggcgcggctgcaggagcgcgaggaggaggtggcggcggcggcggaactggcgggggtcccctcgcggcgcccgggacccccggcctccaggcatgggcgcccctgcggtgcagagcagctcagggccggctggtgcgcgaccccggaaagcgggggtggagaggcgagcggagcccgcggggccaggcctccaccatggacagaggccaggccctgcccctcccaggcagcctggctccttctgctgggccctgaaggcagacgggataatgtggttggccaaggcctgttggtccatccagagtgggctccctgagaccaccaggaagagcccccaaccaatcttgggattctcccttcgtgcggttgtctgggacctttttccagggtcaaagcagatcgtgaggaggaagctggtttcccatgacagtgggggagcccaggccccaggcagtgctacatttggatgtggagcctctcctttccattgtgaactgaattctac

SEQ ID NO: 160968 - DNA, 1258 bp, Homo sapiens
  Payload ID: 11444
  Gene Symbol: NR4A1
  Gene Name: nuclear receptor subfamily 4, group A, member 1
  ENST ID: ENST00000546842
  CDS Start-End: 351-1258
cgggcgcgggggcggggggcgccgcgcggccggaactgcgggcggggggcttcccgggggcggggggcgctgagcggctgcggcgcggctgcaggagcgcgaggaggaggtggcggcggcggcggaactggcgggggtcccctcgcggcgcccgggacccccggcctccaggcatgggcgcccctgcggtgcagagcagctcagggccggctggtgcgcgaccccggaaagcgggggtggagaggcgagcggagcccgcggggccaggcctccaccatggacagaggccaggccctgcccctcccaggcagcctggctccttctgctgggccctgaaggcagacgggataatgtggttggccaaggcctgttggtccatccagagtgagatgccctgtatccaagcccaatatgggacaccagcaccgagtccgggaccccgtgaccacctggcaagcgaccccctgacccctgagttcatcaagcccaccatggacctggccagccccgaggcagcccccgctgcccccactgccctgcccagcttcagcaccttcatggacggctacacaggagagtttgacaccttcctctaccagctgccaggaacagtccagccatgctcctcagcctcctcctcggcctcctccacatcctcgtcctcagccacctcccctgcctctgcctccttcaagttcgaggacttccaggtgtacggctgctaccccggccccctgagcggcccagtggatgaggccctgtcctccagtggctctgactactatggcagcccctgctcggccccgtcgccctccacgcccagcttccagccgccccagctctctccctgggatggctccttcggccacttctcgcccagccagacttacgaaggcctgcgggcatggacagagcagctgcccaaagcctctgggcccccacagcctccagccttcttttccttcagtcctcccaccggccccagccccagcctggcccagagccccctgaagttgttcccctcacaggccacccaccagctgggggagggagagagctattccatgcctacggccttcccaggtttggcacccacttctccacaccttgagggctcggggatactggatacacccgtgacctcaaccaaggcccggagcggggccccaggtggaagtgaaggccgctgtgctgtgtgtggggacaacgcttcatgccagcattatggtgtccgcacatgtgagggctgcaagggctt

SEQ ID NO: 160969 - DNA, 3472 bp, Homo sapiens
  Payload ID: 11445
  Gene Symbol: NR4A2
  Gene Name: nuclear receptor subfamily 4, group A, member 2
  Uniprot ID: P43354
  ENST ID: ENST00000339562
  CDS Start-End: 364-2160
acataaacaaaggcacattggcggccagggccagtccgcccggcggctcgcgcacggctccgcggtcccttttgcctgtccagccggccgcctgtccctgctccctccctccgtgaggtgtccgggttcccttcgcccagctctcccacccctacccgaccccggcgcccgggctcccagagggaactgcacttcggcagagttgaatgaatgaagacagacgcggagaactcctaaggaggagattggacaggctggactccccattgcttttctaaaaatcttggaaactttgtccttcattgaattacgacactgtccacctttaatttcctcgaaaacgcctgtaactcggctgaagccatgccttgtgttcaggcgcagtatgggtcctcgcctcaaggagccagccccgcttctcagagctacagttaccactcttcgggagaatacagctccgatttcttaactccagagtttgtcaagtttagcatggacctcaccaacactgaaatcactgccaccacttctctccccagcttcagtacctttatggacaactacagcacaggctacgacgtcaagccaccttgcttgtaccaaatgcccctgtccggacagcagtcctccattaaggtagaagacattcagatgcacaactaccagcaacacagccacctgcccccccagtctgaggagatgatgccgcactccgggtcggtttactacaagccctcctcgcccccgacgcccaccaccccgggcttccaggtgcagcacagccccatgtgggacgacccgggatctctccacaacttccaccagaactacgtggccactacgcacatgatcgagcagaggaaaacgccagtctcccgcctctccctcttctcctttaagcaatcgccccctggcaccccggtgtctagttgccagatgcgcttcgacgggcccctgcacgtccccatgaacccggagcccgccggcagccaccacgtggtggacgggcagaccttcgctgtgcccaaccccattcgcaagcccgcgtccatgggcttcccgggcctgcagatcggccacgcgtctcagctgctcgacacgcaggtgccctcaccgccgtcgcggggctccccctccaacgaggggctgtgcgctgtgtgtggggacaacgcggcctgccaacactacggcgtgcgcacctgtgagggctgcaaaggcttctttaagcgcacagtgcaaaaaaatgcaaaatacgtgtgtttagcaaataaaaactgcccagtggacaagcgtcgccggaatcgctgtcagtactgccgatttcagaagtgcctggctgttgggatggtcaaagaagtggttcgcacagacagtttaaaaggccggagaggtcgtttgccctcgaaaccgaagagcccacaggagccctctcccccttcgcccccggtgagtctgatcagtgccctcgtcagggcccatgtcgactccaacccggctatgaccagcctggactattccaggttccaggcgaaccctgactatcaaatgagtggagatgacacccagcatatccagcaattctatgatctcctgactggctccatggagatcatccggggctgggcagagaagatccctggcttcgcagacctgcccaaagccgaccaagacctgctttttgaatcagctttcttagaactgtttgtccttcgattagcatacaggtccaacccagtggagggtaaactcatcttttgcaatggggtggtcttgcacaggttgcaatgcgttcgtggctttggggaatggattgattccattgttgaattctcctccaacttgcagaatatgaacatcgacatttctgccttctcctgcattgctgccctggctatggtcacagagagacacgggctcaaggaacccaagagagtggaagaactgcaaaacaagattgtaaattgtctcaaagaccacgtgactttcaacaatggggggttgaaccgccccaattatttgtccaaactgttggggaagctcccagaacttcgtaccctttgcacacaggggctacagcgcattttctacctgaaattggaagacttggtgccaccgccagcaataattgacaaacttttcctggacactttacctttctaagacctcctcccaagcacttcaaaggaactggaatgataatggaaactgtcaagagggggcaagtcacatgggcagagatagccgtgtgagcagtctcagctcaagctgccccccatttctgtaaccctcctagcccccttgatccctaaagaaaacaaacaaacaaacaaaaactgttgctatttcctaacctgcaggcagaacctgaaagggcattttggctccggggcatcctggatttagaacatggactacacacaatacagtggtataaactttttattctcagtttaaaaatcagtttgttgttcagaagaaagattgctataatgtataatgggaaatgtttggccatgcttggttgttgcagttcagacaaatgtaacacacacacacatacacacacacacacacacacagagacacatcttaaggggacccacaagtattgccctttaacaagacttcaaagttttctgctgtaaagaaagctgtaatatatagtaaaactaaatgttgcgtgggtggcatgagttgaagaaggcaaaggcttgtaaatttacccaatgcagtttggctttttaaattattttgtgcctatttatgaataaatattacaaattctaaaagataagtgtgtttgcaaaaaaaaagaaaataaatacataaaaaagggacaagcatgttgattctaggttgaaaatgttataggcacttgctacttcagtaatgtctatattatataaatagtatttcagacactatgtagtctgttagattttataaagattggtagttatctgagcttaaacattttctcaattgtaaaataggtgggcacaagtattacacatcagaaaatcctgacaaaagggacacatagtgtttgtaacaccgtccaacattccttgtttgtaagtgttgtatgtaccgttgatgttgataaaaagaaagtttatatcttgattattttgttgtctaaagctaaacaaaacttgcatgcagcagcttttgactgtttccagagtgcttataatatacataactccctggaaataactgagcactttgaattttttttatgtctaaaattgtcagttaatttattattttgtttgagtaagaattttaatattgccatattctgtagtatttttctttgtatatttctagtatggcacatgatatgagtcactgcctttttttctatggtgtatgacagttagagatgctgattttttttctgataaattctttctttgagaaagacaattttaatgtttacaacaataaaccatgtaaatgaacagaa

SEQ ID NO: 160970 - DNA, 449 bp, Homo sapiens
  Payload ID: 11445
  Gene Symbol: NR4A2
  Gene Name: nuclear receptor subfamily 4, group A, member 2
  ENST ID: ENST00000406048
  CDS Start-End: 1-449
cagttaccactcttcgggagaatacagctccgatttcttaactccagagtttgtcaagtttagcatggacctcaccaacactgaaatcactgccaccacttctctccccagcttcagtacctttatggacaactacagcacaggctacgacgtcaagccaccttgcttgtaccaaatgcccctgtccggacagcagtcctccattaagcgcacagtgcaaaaaaatgcaaaatacgtgtgtttagcaaataaaaactgcccagtggacaagcgtcgccggaatcgctgtcagtactgccgatttcagaagtgcctggctgttgggatggtcaaagaagtggttcgcacagacagtttaaaaggccggagaggtcgtttgccctcgaaaccgaagagcccacaggagccctctcccccttcgcccccggtgagtctgatcagtgccctcg

SEQ ID NO: 160971 - DNA, 2878 bp, Homo sapiens
  Payload ID: 11445
  Gene Symbol: NR4A2
  Gene Name: nuclear receptor subfamily 4, group A, member 2
  Uniprot ID: P43354
  ENST ID: ENST00000409572
  CDS Start-End: 436-2232
ctccccggctcccttcttggtcggccgcgaccccccgaaaggtaacaggcctctttcgcccccggccaggacctgggccctgtgggctttttttttttccattttatcagtaagttccccttgtcccagcctccgctttcacttcccgcgttccctccaccccaaaaaccgccccaacatgtccagagaggggcatctacccagccgcccagccaggggcgaccactttgtgagccccggggagcgggacccgtaccaggcgcgcccagcgggggatgcggtgaccgaggggccgggagcgccgggcagggaggagattggacaggctggactccccattgcttttctaaaaatcttggaaactttgtccttcattgaattacgacactgtccacctttaatttcctcgaaaacgcctgtaactcggctgaagccatgccttgtgttcaggcgcagtatgggtcctcgcctcaaggagccagccccgcttctcagagctacagttaccactcttcgggagaatacagctccgatttcttaactccagagtttgtcaagtttagcatggacctcaccaacactgaaatcactgccaccacttctctccccagcttcagtacctttatggacaactacagcacaggctacgacgtcaagccaccttgcttgtaccaaatgcccctgtccggacagcagtcctccattaaggtagaagacattcagatgcacaactaccagcaacacagccacctgcccccccagtctgaggagatgatgccgcactccgggtcggtttactacaagccctcctcgcccccgacgcccaccaccccgggcttccaggtgcagcacagccccatgtgggacgacccgggatctctccacaacttccaccagaactacgtggccactacgcacatgatcgagcagaggaaaacgccagtctcccgcctctccctcttctcctttaagcaatcgccccctggcaccccggtgtctagttgccagatgcgcttcgacgggcccctgcacgtccccatgaacccggagcccgccggcagccaccacgtggtggacgggcagaccttcgctgtgcccaaccccattcgcaagcccgcgtccatgggcttcccgggcctgcagatcggccacgcgtctcagctgctcgacacgcaggtgccctcaccgccgtcgcggggctccccctccaacgaggggctgtgcgctgtgtgtggggacaacgcggcctgccaacactacggcgtgcgcacctgtgagggctgcaaaggcttctttaagcgcacagtgcaaaaaaatgcaaaatacgtgtgtttagcaaataaaaactgcccagtggacaagcgtcgccggaatcgctgtcagtactgccgatttcagaagtgcctggctgttgggatggtcaaagaagtggttcgcacagacagtttaaaaggccggagaggtcgtttgccctcgaaaccgaagagcccacaggagccctctcccccttcgcccccggtgagtctgatcagtgccctcgtcagggcccatgtcgactccaacccggctatgaccagcctggactattccaggttccaggcgaaccctgactatcaaatgagtggagatgacacccagcatatccagcaattctatgatctcctgactggctccatggagatcatccggggctgggcagagaagatccctggcttcgcagacctgcccaaagccgaccaagacctgctttttgaatcagctttcttagaactgtttgtccttcgattagcatacaggtccaacccagtggagggtaaactcatcttttgcaatggggtggtcttgcacaggttgcaatgcgttcgtggctttggggaatggattgattccattgttgaattctcctccaacttgcagaatatgaacatcgacatttctgccttctcctgcattgctgccctggctatggtcacagagagacacgggctcaaggaacccaagagagtggaagaactgcaaaacaagattgtaaattgtctcaaagaccacgtgactttcaacaatggggggttgaaccgccccaattatttgtccaaactgttggggaagctcccagaacttcgtaccctttgcacacaggggctacagcgcattttctacctgaaattggaagacttggtgccaccgccagcaataattgacaaacttttcctggacactttacctttctaagacctcctcccaagcacttcaaaggaactggaatgataatggaaactgtcaagagggggcaagtcacatgggcagagatagccgtgtgagcagtctcagctcaagctgccccccatttctgtaaccctcctagcccccttgatccctaaagaaaacaaacaaacaaacaaaaactgttgctatttcctaacctgcaggcagaacctgaaagggcattttggctccggggcatcctggatttagaacatggactacacacaatacagtggtataaactttttattctcagtttaaaaatcagtttgttgttcagaagaaagattgctataatgtataatgggaaatgtttggccatgcttggttgttgcagttcagacaaatgtaacacacacacacatacacacacacacacacacacagagacacatcttaaggggacccacaagtattgccctttaacaagacttcaaagttttctgctgtaaagaaagctgtaatatatagtaaaactaaatgttgcgtgggtggcatgagttgaagaaggcaaaggcttgtaaatttacccaatgcagtttggctttttaaattattttgtgcctatttatgaataaatattacaaattctaaaagataagtgtgtttgcaa

SEQ ID NO: 160972 - DNA, 1735 bp, Homo sapiens
  Payload ID: 11445
  Gene Symbol: NR4A2
  Gene Name: nuclear receptor subfamily 4, group A, member 2
  ENST ID: ENST00000409108
  CDS Start-End: 43-1704
acctttaatttcctcgaaaacgcctgtaactcggctgaagccatgccttgtgttcaggcgcagtatgggtcctcgcctcaaggagccagccccgcttctcagagctacagttaccactcttcgggagaatacagctccgatttcttaactccagagtttgtcaagtttagcatggacctcaccaacactgaaatcactgccaccacttctctccccagcttcagtacctttatggacaactacagcacaggctacgacgtcaagccaccttgcttgtaccaaatgcccctgtccggacagcagtcctccattaaggtagaagacattcagatgcacaactaccagcaacacagccacctgcccccccagtctgaggagatgatgccgcactccgggtcggtttactacaagccctcctcgcccccgacgcccaccaccccgggcttccaggtgcagcacagccccatgtgggacgacccgggatctctccacaacttccaccagaactacgtggccactacgcacatgatcgagcagaggaaaacgccagtctcccgcctctccctcttctcctttaagcaatcgccccctggcaccccggtgtctagttgccagatgcgcttcgacgggcccctgcacgtccccatgaacccggagcccgccggcagccaccacgtggtggacgggcagaccttcgctgtgcccaaccccattcgcaagcccgcgtccatgggcttcccgggcctgcagatcggccacgcgtctcagctgctcgacacgcaggtgccctcaccgccgtcgcggggctccccctccaacgaggggctgtgcgctgtgtgtggggacaacgcggcctgccaacactacggcgtgcgcacctgtgagggctgcaaaggcttctttaagcgcacagtgcaaaaaaatgcaaaatacgtgtgtttagcaaataaaaactgcccagtggacaagcgtcgccggaatcgctgtcagtactgccgatttcagaagtgcctggctgttgggatggtcaaagaagtggttcgcacagacagtttaaaaggccggagaggtcgtttgccctcgaaaccgaagagcccacaggagccctctcccccttcgcccccggtgagtctgatcagtgccctcgtcagggcccatgtcgactccaacccggctatgaccagcctggactattccaggttccaggcgaaccctgactatcaaatgagtggagatgacacccagcatatccagcaattctatgatctcctgactggctccatggagatcatccggggctgggcagagaagatccctggcttcgcagacctgcccaaagccgaccaagacctgctttttgaatcagctttcttagaactgtttgtccttcgattagcatacaggtccaacccagtggaggaatatgaacatcgacatttctgccttctcctgcattgctgccctggctatggtcacagagagacacgggctcaaggaacccaagagagtggaagaactgcaaaacaagattgtaaattgtctcaaagaccacgtgactttcaacaatggggggttgaaccgccccaattatttgtccaaactgttggggaagctcccagaacttcgtaccctttgcacacaggggctacagcgcattttctacctgaaattggaagacttggtgccaccgccagcaataattgacaaacttttcctggacactttacctttctaa

SEQ ID NO: 160973 - DNA, 574 bp, Homo sapiens
  Payload ID: 11445
  Gene Symbol: NR4A2
  Gene Name: nuclear receptor subfamily 4, group A, member 2
  ENST ID: ENST00000421709
  CDS Start-End: 255-574
agccacataaacaaaggcacattggcggccagggccagtccgcccggcggctcgcgcacggctccgcggtcccttttgcctgtccagccggccgcctgtccctgctccctccctccgtgaggtgtccgggttcccttcgcccagctctcccacccctacccgaccccggcgcccgggctcccagagggaactgcacttcggcagagttgaatgaatgaagacagacgcggagaactcctaacttcagtacctttatggacaactacagcacaggctacgacgtcaagccaccttgcttgtaccaaatgcccctgtccggacagcagtcctccattaaggtagaagacattcagatgcacaactaccagcaacacagccacctgcccccccagtctgaggagatgatgccgcactccgggtcggtttactacaagccctcctcgcccccgacgcccaccaccccgggcttccaggtgcagcacagccccatgtgggacgacccgggatctctccacaacttccaccagaactacgtggccactacgcacatgatcgagcagaggaaaacgccagt

SEQ ID NO: 160974 - DNA, 2642 bp, Homo sapiens
  Payload ID: 11445
  Gene Symbol: NR4A2
  Gene Name: nuclear receptor subfamily 4, group A, member 2
  Uniprot ID: P43354
  ENST ID: ENST00000426264
  CDS Start-End: 373-1980
ataaacaaaggcacattggcggccagggccagtccgcccggcggctcgcgcacggctccgcggtcccttttgcctgtccagccggccgcctgtccctgctccctccctccgtgaggtgtccgggttcccttcgcccagctctcccacccctacccgaccccggcgcccgggctcccagagggaactgcacttcggcagagttgaatgaatgaagacagacgcggagaactcctaaggaggagattggacaggctggactccccattgcttttctaaaaatcttggaaactttgtccttcattgaattacgacactgtccacctttaatttcctcgaaaacgcctgtaactcggctgaagcttcagtacctttatggacaactacagcacaggctacgacgtcaagccaccttgcttgtaccaaatgcccctgtccggacagcagtcctccattaaggtagaagacattcagatgcacaactaccagcaacacagccacctgcccccccagtctgaggagatgatgccgcactccgggtcggtttactacaagccctcctcgcccccgacgcccaccaccccgggcttccaggtgcagcacagccccatgtgggacgacccgggatctctccacaacttccaccagaactacgtggccactacgcacatgatcgagcagaggaaaacgccagtctcccgcctctccctcttctcctttaagcaatcgccccctggcaccccggtgtctagttgccagatgcgcttcgacgggcccctgcacgtccccatgaacccggagcccgccggcagccaccacgtggtggacgggcagaccttcgctgtgcccaaccccattcgcaagcccgcgtccatgggcttcccgggcctgcagatcggccacgcgtctcagctgctcgacacgcaggtgccctcaccgccgtcgcggggctccccctccaacgaggggctgtgcgctgtgtgtggggacaacgcggcctgccaacactacggcgtgcgcacctgtgagggctgcaaaggcttctttaagcgcacagtgcaaaaaaatgcaaaatacgtgtgtttagcaaataaaaactgcccagtggacaagcgtcgccggaatcgctgtcagtactgccgatttcagaagtgcctggctgttgggatggtcaaagaagtggttcgcacagacagtttaaaaggccggagaggtcgtttgccctcgaaaccgaagagcccacaggagccctctcccccttcgcccccggtgagtctgatcagtgccctcgtcagggcccatgtcgactccaacccggctatgaccagcctggactattccaggttccaggcgaaccctgactatcaaatgagtggagatgacacccagcatatccagcaattctatgatctcctgactggctccatggagatcatccggggctgggcagagaagatccctggcttcgcagacctgcccaaagccgaccaagacctgctttttgaatcagctttcttagaactgtttgtccttcgattagcatacaggtccaacccagtggagggtaaactcatcttttgcaatggggtggtcttgcacaggttgcaatgcgttcgtggctttggggaatggattgattccattgttgaattctcctccaacttgcagaatatgaacatcgacatttctgccttctcctgcattgctgccctggctatggtcacagagagacacgggctcaaggaacccaagagagtggaagaactgcaaaacaagattgtaaattgtctcaaagaccacgtgactttcaacaatggggggttgaaccgccccaattatttgtccaaactgttggggaagctcccagaacttcgtaccctttgcacacaggggctacagcgcattttctacctgaaattggaagacttggtgccaccgccagcaataattgacaaacttttcctggacactttacctttctaagacctcctcccaagcacttcaaaggaactggaatgataatggaaactgtcaagagggggcaagtcacatgggcagagatagccgtgtgagcagtctcagctcaagctgccccccatttctgtaaccctcctagcccccttgatccctaaagaaaacaaacaaacaaacaaaaactgttgctatttcctaacctgcaggcagaacctgaaagggcattttggctccggggcatcctggatttagaacatggactacacacaatacagtggtataaactttttattctcagtttaaaaatcagtttgttgttcagaagaaagattgctataatgtataatgggaaatgtttggccatgcttggttgttgcagttcagacaaatgtaacacacacacacatacacacacacacacacacacagagacacatcttaaggggacccacaagtattgccctttaacaagacttcaaagttttctgctgtaaagaaagctgtaatatatagtaaaactaaatgttgcgtgggtggcatgagttgaagaaggcaaaggcttgtaaatttacccaatgcagtttggctttttaaattattttgtgcctatttatgaataaatattacaaattctaaaagataagtgtgtttgcaaaaaaaaagaaaataaa

SEQ ID NO: 160975 - DNA, 2450 bp, Homo sapiens
  Payload ID: 11445
  Gene Symbol: NR4A2
  Gene Name: nuclear receptor subfamily 4, group A, member 2
  ENST ID: ENST00000417972
  CDS Start-End: 320-1498
aagttgcctgaaatttctggttttgacatatgctgtccttgggtttgcgaatgtatcagagcgagaatatgaatatgtaaagagtacagttatgaaactgtggagctaccagggggttaatatccaacacaggaatatctctaagggctgtggggttcgagtctcctttctgctttttctggggaggagattggacaggctggactccccattgcttttctaaaaatcttggaaactttgtccttcattgaattacgacactgtccacctttaatttcctcgaaaacgcctgtaactcggctgaagcttcagtacctttatggacaactacagcacaggctacgacgtcaagccaccttgcttgtaccaaatgcccctgtccggacagcagtcctccattaaggtagaagacattcagatgcacaactaccagcaacacagccacctgcccccccagtctgaggagatgatgccgcactccgggtcggtttactacaagccctcctcgcccccgacgcccaccaccccgggcttccaggtgcagcacagccccatgtgggacgacccgggatctctccacaacttccaccagaactacgtggccactacgcacatgatcgagcagaggaaaacgccagtctcccgcctctccctcttctcctttaagcaatcgccccctggcaccccggtgtctagttgccagatgcgcttcgacgggcccctgcacgtccccatgaacccggagcccgccggcagccaccacgtggtggacgggcagaccttcgctgtgcccaaccccattcgcaagcccgcgtccatgggcttcccgggcctgcagatcggccacgcgtctcagctgctcgacacgcaggtgccctcaccgccgtcgcggggctccccctccaacgaggggctgtgcgctgtgtgtggggacaacgcggcctgccaacactacggcgtgcgcacctgtgagggctgcaaaggcttctttaagcgcacagtgcaaaaaaatgcaaaatacgtgtgtttagcaaataaaaactgcccagtggacaagcgtcgccggaatcgctgtcagtactgccgatttcagaagtgcctggctgttgggatggtcaaagaagtggttcgcacagacagtttaaaaggccggagaggtcgtttgccctcgaaaccgaagagcccacaggagccctctcccccttcgcccccggtgagtctgatcagtgccctcgtcagggcccatgtcgactccaacccggctatgaccagcctggactattccaggttccaggcgaaccctgactatcaaatgagtggagatgacacccagcatatccagcaattctatgatctcctgactggctccatggagatcatccggggctgggcagagaagatccctggcttcgcagacctgcccaaagccgaccaagacctgctttttgaatcagctttcttagaactgtttgtccttcgattagcatacagaatatgaacatcgacatttctgccttctcctgcattgctgccctggctatggtcacagagagacacgggctcaaggaacccaagagagtggaagaactgcaaaacaagattgtaaattgtctcaaagaccacgtgactttcaacaatggggggttgaaccgccccaattatttgtccaaactgttggggaagctcccagaacttcgtaccctttgcacacaggggctacagcgcattttctacctgaaattggaagacttggtgccaccgccagcaataattgacaaacttttcctggacactttacctttctaagacctcctcccaagcacttcaaaggaactggaatgataatggaaactgtcaagagggggcaagtcacatgggcagagatagccgtgtgagcagtctcagctcaagctgccccccatttctgtaaccctcctagcccccttgatccctaaagaaaacaaacaaacaaacaaaaactgttgctatttcctaacctgcaggcagaacctgaaagggcattttggctccggggcatcctggatttagaacatggactacacacaatacagtggtataaactttttattctcagtttaaaaatcagtttgttgttcagaagaaagattgctataatgtataatgggaaatgtttggccatgcttggttgttgcagttcagacaaatgtaacacacacacacatacacacacacacacacacacagagacacatcttaaggggacccacaagtattgccctttaacaagacttcaaagttttctgctgtaaagaaagctgtaatatatagtaaaactaaatgttgcgtgggtggcatgagttgaagaaggcaaaggcttgtaaatttacccaatgcagtttggctttttaaattattttgtgcctatttatgaataaatattacaaattctaaaagataagtgtgtttgc

SEQ ID NO: 160976 - DNA, 1010 bp, Homo sapiens
  Payload ID: 11445
  Gene Symbol: NR4A2
  Gene Name: nuclear receptor subfamily 4, group A, member 2
  ENST ID: ENST00000424077
  CDS Start-End: 237-1010
taaacaaaggcacattggcggccagggccagtccgcccggcggctcgcgcacggctccgcggtcccttttgcctgtccagccggccgcctgtccctgctccctccctccgtgaggtgtccgggttcccttcgcccagctctcccacccctacccgaccccggcgcccgggctcccagagggaactgcacttcggcagagttgaatgaatgaagacagacgcggagaactcctaaccatgccttgtgttcaggcgcagtatgggtcctcgcctcaaggagccagccccgcttctcagagctacagttaccactcttcgggagaatacagctccgatttcttaactccagagtttgtcaagtttagcatggacctcaccaacactgaaatcactgccaccacttctctccccagcttcagtacctttatggacaactacagcacaggctacgacgtcaagccaccttgcttgtaccaaatgcccctgtccggacagcagtcctccattaaggtagaagacattcagatgcacaactaccagcaacacagccacctgcccccccagtctgaggagatgatgccgcactccgggtcggtttactacaagccctcctcgcccccgacgcccaccaccccgggcttccaggtgcagcacagccccatgtgggacgacccgggatctctccacaacttccaccagaactacgtggccactacgcacatgatcgagcagaggaaaacgccagtctcccgcctctccctcttctcctttaagcaatcgccccctggcaccccggtgtctagttgccagatgcgcttcgacgggcccctgcacgtccccatgaacccggagcccgccggcagccaccacgtggtggacgggcagaccttcgctgtgcccaaccccattcgcaagcccgcgtccatgggcttcccgggcctgcagatcggccacgcgtctcagctgctcgacacgcaggtgccctcaccgccgtcgcggggctccccctcc

SEQ ID NO: 160977 - DNA, 1571 bp, Homo sapiens
  Payload ID: 11445
  Gene Symbol: NR4A2
  Gene Name: nuclear receptor subfamily 4, group A, member 2
  ENST ID: ENST00000429376
  CDS Start-End: 68-1540
ttacgacactgtccacctttaatttcctcgaaaacgcctgtaactcggctgaagcttcagtacctttatggacaactacagcacaggctacgacgtcaagccaccttgcttgtaccaaatgcccctgtccggacagcagtcctccattaaggtagaagacattcagatgcacaactaccagcaacacagccacctgcccccccagtctgaggagatgatgccgcactccgggtcggtttactacaagccctcctcgcccccgacgcccaccaccccgggcttccaggtgcagcacagccccatgtgggacgacccgggatctctccacaacttccaccagaactacgtggccactacgcacatgatcgagcagaggaaaacgccagtctcccgcctctccctcttctcctttaagcaatcgccccctggcaccccggtgtctagttgccagatgcgcttcgacgggcccctgcacgtccccatgaacccggagcccgccggcagccaccacgtggtggacgggcagaccttcgctgtgcccaaccccattcgcaagcccgcgtccatgggcttcccgggcctgcagatcggccacgcgtctcagctgctcgacacgcaggtgccctcaccgccgtcgcggggctccccctccaacgaggggctgtgcgctgtgtgtggggacaacgcggcctgccaacactacggcgtgcgcacctgtgagggctgcaaaggcttctttaagcgcacagtgcaaaaaaatgcaaaatacgtgtgtttagcaaataaaaactgcccagtggacaagcgtcgccggaatcgctgtcagtactgccgatttcagaagtgcctggctgttgggatggtcaaagaagtggttcgcacagacagtttaaaaggccggagaggtcgtttgccctcgaaaccgaagagcccacaggagccctctcccccttcgcccccggtgagtctgatcagtgccctcgtcagggcccatgtcgactccaacccggctatgaccagcctggactattccaggttccaggcgaaccctgactatcaaatgagtggagatgacacccagcatatccagcaattctatgatctcctgactggctccatggagatcatccggggctgggcagagaagatccctggcttcgcagacctgcccaaagccgaccaagacctgctttttgaatcagctttcttagaactgtttgtccttcgattagcatacaggtccaacccagtggaggaatatgaacatcgacatttctgccttctcctgcattgctgccctggctatggtcacagagagacacgggctcaaggaacccaagagagtggaagaactgcaaaacaagattgtaaattgtctcaaagaccacgtgactttcaacaatggggggttgaaccgccccaattatttgtccaaactgttggggaagctcccagaacttcgtaccctttgcacacaggggctacagcgcattttctacctgaaattggaagacttggtgccaccgccagcaataattgacaaacttttcctggacactttacctttctaa

SEQ ID NO: 160978 - DNA, 2265 bp, Homo sapiens
  Payload ID: 11445
  Gene Symbol: NR4A2
  Gene Name: nuclear receptor subfamily 4, group A, member 2
  ENST ID: ENST00000417764
  CDS Start-End: 135-1313
ggagattggacaggctggactccccattgcttttctaaaaatcttggaaactttgtccttcattgaattacgacactgtccacctttaatttcctcgaaaacgcctgtaactcggctgaagcttcagtacctttatggacaactacagcacaggctacgacgtcaagccaccttgcttgtaccaaatgcccctgtccggacagcagtcctccattaaggtagaagacattcagatgcacaactaccagcaacacagccacctgcccccccagtctgaggagatgatgccgcactccgggtcggtttactacaagccctcctcgcccccgacgcccaccaccccgggcttccaggtgcagcacagccccatgtgggacgacccgggatctctccacaacttccaccagaactacgtggccactacgcacatgatcgagcagaggaaaacgccagtctcccgcctctccctcttctcctttaagcaatcgccccctggcaccccggtgtctagttgccagatgcgcttcgacgggcccctgcacgtccccatgaacccggagcccgccggcagccaccacgtggtggacgggcagaccttcgctgtgcccaaccccattcgcaagcccgcgtccatgggcttcccgggcctgcagatcggccacgcgtctcagctgctcgacacgcaggtgccctcaccgccgtcgcggggctccccctccaacgaggggctgtgcgctgtgtgtggggacaacgcggcctgccaacactacggcgtgcgcacctgtgagggctgcaaaggcttctttaagcgcacagtgcaaaaaaatgcaaaatacgtgtgtttagcaaataaaaactgcccagtggacaagcgtcgccggaatcgctgtcagtactgccgatttcagaagtgcctggctgttgggatggtcaaagaagtggttcgcacagacagtttaaaaggccggagaggtcgtttgccctcgaaaccgaagagcccacaggagccctctcccccttcgcccccggtgagtctgatcagtgccctcgtcagggcccatgtcgactccaacccggctatgaccagcctggactattccaggttccaggcgaaccctgactatcaaatgagtggagatgacacccagcatatccagcaattctatgatctcctgactggctccatggagatcatccggggctgggcagagaagatccctggcttcgcagacctgcccaaagccgaccaagacctgctttttgaatcagctttcttagaactgtttgtccttcgattagcatacagaatatgaacatcgacatttctgccttctcctgcattgctgccctggctatggtcacagagagacacgggctcaaggaacccaagagagtggaagaactgcaaaacaagattgtaaattgtctcaaagaccacgtgactttcaacaatggggggttgaaccgccccaattatttgtccaaactgttggggaagctcccagaacttcgtaccctttgcacacaggggctacagcgcattttctacctgaaattggaagacttggtgccaccgccagcaataattgacaaacttttcctggacactttacctttctaagacctcctcccaagcacttcaaaggaactggaatgataatggaaactgtcaagagggggcaagtcacatgggcagagatagccgtgtgagcagtctcagctcaagctgccccccatttctgtaaccctcctagcccccttgatccctaaagaaaacaaacaaacaaacaaaaactgttgctatttcctaacctgcaggcagaacctgaaagggcattttggctccggggcatcctggatttagaacatggactacacacaatacagtggtataaactttttattctcagtttaaaaatcagtttgttgttcagaagaaagattgctataatgtataatgggaaatgtttggccatgcttggttgttgcagttcagacaaatgtaacacacacacacatacacacacacacacacacacagagacacatcttaaggggacccacaagtattgccctttaacaagacttcaaagttttctgctgtaaagaaagctgtaatatatagtaaaactaaatgttgcgtgggtggcatgagttgaagaaggcaaaggcttgtaaatttacccaatgcagtttggctttttaaattattttgtgcctatttatgaataaatattacaaattctaaaagataagtgtgtttgc

SEQ ID NO: 160979 - DNA, 4982 bp, Homo sapiens
  Payload ID: 11446
  Gene Symbol: NR4A3
  Gene Name: nuclear receptor subfamily 4, group A, member 3
  Uniprot ID: Q92570
  ENST ID: ENST00000330847
  CDS Start-End: 45-1958
caggccctcatcaccttttttcaagtcaagatttcatcccatacatgcatgactcaatcagatttggaaatgtggatatgccctgcgtccaagcccaatatagcccttcccctccaggttccagttatgcggcgcagacatacagctcggaatacaccacggagatcatgaaccccgactacaccaagctgaccatggaccttggcagcactgagatcacggctacagccaccacgtccctgcccagcatcagtaccttcgtggagggctactcgagcaactacgaactcaagccttcctgcgtgtaccaaatgcagcggcccttgatcaaagtggaggaggggcgggcgcccagctaccatcaccatcaccaccaccaccaccaccaccaccaccatcaccagcagcagcatcagcagccatccattcctccagcctccagcccggaggacgaggtgctgcccagcacctccatgtacttcaagcagtccccaccgtccacccccaccacgccggccttccccccgcaggcgggggcgttatgggacgaggcactgccctcggcgcccggctgcatcgcacccggcccgctgctggacccgccgatgaaggcggtccccacggtggccggcgcgcgcttcccgctcttccacttcaagccctcgccgccgcatccccccgcgcccagcccggccggcggccaccacctcggctacgacccgacggccgctgccgcgctcagcctgccgctgggagccgcagccgccgcgggcagccaggccgccgcgcttgagagccacccgtacgggctgccgctggccaagagggcggccccgctggccttcccgcctctcggcctcacgccctcccctaccgcgtccagcctgctgggcgagagtcccagcctgccgtcgccgcccagcaggagctcgtcgtctggcgagggcacgtgtgccgtgtgcggggacaacgccgcctgccagcactacggcgtgcgaacctgcgagggctgcaagggctttttcaagagaacagtgcagaaaaatgcaaaatatgtttgcctggcaaataaaaactgcccagtagacaagagacgtcgaaaccgatgtcagtactgtcgatttcagaagtgtctcagtgttggaatggtaaaagaagttgtccgtacagatagtctgaaagggaggagaggtcgtctgccttccaaaccaaagagcccattacaacaggaaccttctcagccctctccaccttctcctccaatctgcatgatgaatgcccttgtccgagctttaacagactcaacacccagagatcttgattattccagatactgtcccactgaccaggctgctgcaggcacagatgctgagcatgtgcaacaattctacaacctcctgacagcctccattgatgtatccagaagctgggcagaaaagattccgggatttactgatctccccaaagaagatcagacattacttattgaatcagcctttttggagctgtttgtcctcagactttccatcaggtcaaacactgctgaagataagtttgtgttctgcaatggacttgtcctgcatcgacttcagtgccttcgtggatttggggagtggctcgactctattaaagacttttccttaaatttgcagagcctgaaccttgatatccaagccttagcctgcctgtcagcactgagcatgatcacagaaagacatgggttaaaagaaccaaagagagtcgaagagctatgcaacaagatcacaagcagtttaaaagaccaccagagtaagggacaggctctggagcccaccgagtccaaggtcctgggtgccctggtagaactgaggaagatctgcaccctgggcctccagcgcatcttctacctgaagctggaagacttggtgtctccaccttccatcattgacaagctcttcctggacaccctacctttctaatcaggagcagtggagcagtgagctgcctcctctcctagcacctgcttgctacgcagcaaagggataggtttggaaacctatcatttcctgtccttccttaagaggaaaagcagctcctgtagaaagcaaagactttcttttttttctggctcttttccttacaacctaaagccagaaaacttgcagagtattgtgttggggttgtgttttatatttaggcattgggggatggggtgggagggggttatagttcatgagggttttctaagaaattgctaacaaagcacttttggacaatgctatcccagcaggaaaaaaaaggataatataactgttttaaaactctttctggggaatccaattatagttgctttgtatttaaaaacaagaacagccaagggttgttcgccagggtaggatgtgtcttaaagattggtcccttgaaaatatgcttcctgtatcaaaggtacgtatgtggtgcaaacaaggcagaaacttccttttaatttccttcttcctttattttaacaaatggtgaaagatggaggattacctacaaatcagacatggcaaaacaataatggctgtttgcttccataaacaagtgcaattttttaaagtgctgtcttactaagtcttgtttattaactctcctttattctatatggaaataaaaaggaggcagtcatgttagcaaatgacacgttaatatccctagcagaggctgtgttcaccttccctgtcgatcccttctgaggtatggcccatccaagacttttaggccattcttgatggaaccagatccctgccctgactgtccagctatcctgaaagtggatcagattataaactggattacatgtaactgttttggttgtgttctatcaaccccaccagagttccctaaacttgcttcagttatagtaactgactggtatattcattcagaagcgccataagtcagttgagtatttgatccctagataagaacatgcaaatcagcaggaactggtcatacagggtaagcaccagggacaataaggatttttatagatataatttaatttttgttattggttaaggagacaattttggagagcaagcaaatctttttaaaaaatagtatgaatgtgaatactagaaaagatttaaaaaatagtatgagtgtgagtactaggaaggattagtgggctgcgtttcaacattccgtgttcgtactcccttttgtatgtttctactgttaatgccatattactatgagataatttgttgcatagtgtccttatttgtataaacatttgtatgcacgttatattgtaatagctttgcctgtatttattgcaagaccaccagctcctggaagctgagttacagagtaattaaatggggtgttcacagtgacttggatacaccaattagaaattaaataagcaaatatatatatatatataaatatagcaggttacatatatatatttataatgtgtctttttattaaccatttgtacaataaatgtcacttcccatgccgttattttatggttcatttgcagtgacttttaaggcagtactgtttagcactttgatattaaaattttgcttatgttttgctaaattcgaataatgtttgaagatttttaggtctaaaagtctttatattatatactctgtatcaagtcaaaatatctttggccattttgctaagaaacaaactttgaatgtcaaactgatgtcacagtagtttttgttagctttaaatcatttttgctttagtctttttaaaggaaaataacaaaactatgctgtttatattgtcattaaattatacaatcaaacaaatgccaaatgaattgcctaattgctgcaaagtataacccagataggaaatcatatgtttttttccaagagtcattctaatatttgattatgttatgtgtgcttttatgaaagattgttatttttatatatcaagatgatagaacctggaatgttaggattttgaaatgttagacttggaaggggcctggtctgtcaactagtccaaccccttaaaattcatagaggagcaaactggggcccattgaagggtgaagagttactcaaggtcaaacagctggtaacagaatcaagactaagacctaatttacctttccatactctttttttttctcaacttcatctatataaaatcaggcttttaaacataaccactaatatttacctgaagataaccatgagtaaagtatacttttgcattaattttttgagcttatatgcaaacataataaatattattaaatatcaggaaagctaacatttcatacaagatagcttcagaccaaattcaaattgaatttgaataaattagaaatactgtgcatacataaccttcttgtgcaccatgagtatttggaaagttaatccttgtttttgtcgtgtctataaaggaagaacaaaacaaaataaaaacagagccctagagaaatgctgttactttttatttttacacccatcagatttaaggaaaagactttttagccattataatctagtggttggaaggaatgaagaagcttttttagtaataggtccagatatgagtgctaaaaataaagatgatagcatgttcttctgtcttccatagttattacaactatgagagcctcccaagtcatcttatcaactcaactcccttttttttgtcttaatgttgcacataagtttatacagagtggatgaccacactagcacagaagagaacaacatgtattaaagcaggtgattcctccccttggcgggagagctctctcagtgtgaacatgccttctgtgggcggaaatcaggaagccaccagctgttaatggagagtgccttgcttttatttcagacagcagagttttccaaagtttctctgctcctctaacagcattgctctttagtgtgtgttaacctgtggtttgaaagaaatgctcttgtacattaacaatgtaaatttaaatgattaaattacattttatcaatggc

SEQ ID NO: 160980 - DNA, 2588 bp, Homo sapiens
  Payload ID: 11446
  Gene Symbol: NR4A3
  Gene Name: nuclear receptor subfamily 4, group A, member 3
  Uniprot ID: Q92570
  ENST ID: ENST00000338488
  CDS Start-End: 730-2061
ataaatgacgtgccgagagagcgagcgaacgcgcagccgggagagcggagtctcctgcctcccgccccccacccctccagctcctgctcctcctccgctccccatacacagacgcgctcacacccgctccctcactcgcacacacagacacaagcgcgcacacaggctccgcacacacacttcgctctcccgcgcgctcacacccctcttgccctgagcccttgccggtgcagcgcggcgccgcagctggacgcccctcccgggctcactttgcaacgctgacggtgccggcagtggccgtggaggtgggaacagcggcggcatcctcccccctggtcacagcccaagccaggacgcccgcggaacctctcggctgtgctctcccatgagtcgggatcgcagcatcccccaccagccgctcaccgcctccgggagccgctgggcttgtacaccgcagcccttccgggacagcagctgtgactcccccccagtgcagatttcgggacagctctctagaaactcgctctaaagacggaaccgccacagcactcaaagcccactgcggaagagggcagcccggcaagcccgggccctgagcctggacccttagcggtgccgggcagcactgccggcgcttcgcctcgccggacgtccgctcctcctacactctcagcctccgctggagagacccccagccccaccattcagcgcgcaagataccctccagatatgccctgcgtccaagcccaatatagcccttcccctccaggttccagttatgcggcgcagacatacagctcggaatacaccacggagatcatgaaccccgactacaccaagctgaccatggaccttggcagcactgagatcacggctacagccaccacgtccctgcccagcatcagtaccttcgtggagggctactcgagcaactacgaactcaagccttcctgcgtgtaccaaatgcagcggcccttgatcaaagtggaggaggggcgggcgcccagctaccatcaccatcaccaccaccaccaccaccaccaccaccatcaccagcagcagcatcagcagccatccattcctccagcctccagcccggaggacgaggtgctgcccagcacctccatgtacttcaagcagtccccaccgtccacccccaccacgccggccttccccccgcaggcgggggcgttatgggacgaggcactgccctcggcgcccggctgcatcgcacccggcccgctgctggacccgccgatgaaggcggtccccacggtggccggcgcgcgcttcccgctcttccacttcaagccctcgccgccgcatccccccgcgcccagcccggccggcggccaccacctcggctacgacccgacggccgctgccgcgctcagcctgccgctgggagccgcagccgccgcgggcagccaggccgccgcgcttgagagccacccgtacgggctgccgctggccaagagggcggccccgctggccttcccgcctctcggcctcacgccctcccctaccgcgtccagcctgctgggcgagagtcccagcctgccgtcgccgcccagcaggagctcgtcgtctggcgagggcacgtgtgccgtgtgcggggacaacgccgcctgccagcactacggcgtgcgaacctgcgagggctgcaagggctttttcaagagaacagtgcagaaaaatgcaaaatatgtttgcctggcaaataaaaactgcccagtagacaagagacgtcgaaaccgatgtcagtactgtcgatttcagaagtgtctcagtgttggaatggtaaaagaagttgtccgtacagatagtctgaaagggaggagaggtcgtctgccttccaaaccaaagagcccattacaacaggaaccttctcagccctctccaccttctcctccaatctgcatgatgaatgcccttgtccgagctttaacagactcaacacccagagatcttgattattccagagtaagttttatgatttcctgctttcaaatgaatgatcagggtctctatttatggctactagtaataagagttgattgaatgattttgtgtctggcaccatgttagacagttttcatactttttctatatttctcgcttcatttagcaattcagtgcatccattgcagcaaataatttttgccttattgaatctctaaatgccttaacaagtgaccctgacagtgctgcacctgtcatacacattgttgcaggattcctggtggttgtgccaatgaaaatctgcacagacaaactacaatttgtagatttatctcgtgatctagacaaagtgactactgttttttttcatattgtgttcaaaccatctgggtgagcctcaagttattactaagcagtttatccaattgcatcagcattgattgacctgctgcttattcagagggattagaccattggtggagagaagcgagctctggctgtgacatcagttgtcaggagaactgggatggaacgccacctctgctacttcctgcctgtgtcacctggttcctgcttttggctctctcctgcctacagtggaaatggctacaatatttaacctcaga

SEQ ID NO: 160981 - DNA, 3794 bp, Homo sapiens
  Payload ID: 11446
  Gene Symbol: NR4A3
  Gene Name: nuclear receptor subfamily 4, group A, member 3
  Uniprot ID: Q92570
  ENST ID: ENST00000395097
  CDS Start-End: 730-2610
ataaatgacgtgccgagagagcgagcgaacgcgcagccgggagagcggagtctcctgcctcccgccccccacccctccagctcctgctcctcctccgctccccatacacagacgcgctcacacccgctccctcactcgcacacacagacacaagcgcgcacacaggctccgcacacacacttcgctctcccgcgcgctcacacccctcttgccctgagcccttgccggtgcagcgcggcgccgcagctggacgcccctcccgggctcactttgcaacgctgacggtgccggcagtggccgtggaggtgggaacagcggcggcatcctcccccctggtcacagcccaagccaggacgcccgcggaacctctcggctgtgctctcccatgagtcgggatcgcagcatcccccaccagccgctcaccgcctccgggagccgctgggcttgtacaccgcagcccttccgggacagcagctgtgactcccccccagtgcagatttcgggacagctctctagaaactcgctctaaagacggaaccgccacagcactcaaagcccactgcggaagagggcagcccggcaagcccgggccctgagcctggacccttagcggtgccgggcagcactgccggcgcttcgcctcgccggacgtccgctcctcctacactctcagcctccgctggagagacccccagccccaccattcagcgcgcaagataccctccagatatgccctgcgtccaagcccaatatagcccttcccctccaggttccagttatgcggcgcagacatacagctcggaatacaccacggagatcatgaaccccgactacaccaagctgaccatggaccttggcagcactgagatcacggctacagccaccacgtccctgcccagcatcagtaccttcgtggagggctactcgagcaactacgaactcaagccttcctgcgtgtaccaaatgcagcggcccttgatcaaagtggaggaggggcgggcgcccagctaccatcaccatcaccaccaccaccaccaccaccaccaccatcaccagcagcagcatcagcagccatccattcctccagcctccagcccggaggacgaggtgctgcccagcacctccatgtacttcaagcagtccccaccgtccacccccaccacgccggccttccccccgcaggcgggggcgttatgggacgaggcactgccctcggcgcccggctgcatcgcacccggcccgctgctggacccgccgatgaaggcggtccccacggtggccggcgcgcgcttcccgctcttccacttcaagccctcgccgccgcatccccccgcgcccagcccggccggcggccaccacctcggctacgacccgacggccgctgccgcgctcagcctgccgctgggagccgcagccgccgcgggcagccaggccgccgcgcttgagagccacccgtacgggctgccgctggccaagagggcggccccgctggccttcccgcctctcggcctcacgccctcccctaccgcgtccagcctgctgggcgagagtcccagcctgccgtcgccgcccagcaggagctcgtcgtctggcgagggcacgtgtgccgtgtgcggggacaacgccgcctgccagcactacggcgtgcgaacctgcgagggctgcaagggctttttcaagagaacagtgcagaaaaatgcaaaatatgtttgcctggcaaataaaaactgcccagtagacaagagacgtcgaaaccgatgtcagtactgtcgatttcagaagtgtctcagtgttggaatggtaaaagaagttgtccgtacagatagtctgaaagggaggagaggtcgtctgccttccaaaccaaagagcccattacaacaggaaccttctcagccctctccaccttctcctccaatctgcatgatgaatgcccttgtccgagctttaacagactcaacacccagagatcttgattattccagatactgtcccactgaccaggctgctgcaggcacagatgctgagcatgtgcaacaattctacaacctcctgacagcctccattgatgtatccagaagctgggcagaaaagattccgggatttactgatctccccaaagaagatcagacattacttattgaatcagcctttttggagctgtttgtcctcagactttccatcaggtcaaacactgctgaagataagtttgtgttctgcaatggacttgtcctgcatcgacttcagtgccttcgtggatttggggagtggctcgactctattaaagacttttccttaaatttgcagagcctgaaccttgatatccaagccttagcctgcctgtcagcactgagcatgatcacagaaagacatgggttaaaagaaccaaagagagtcgaagagctatgcaacaagatcacaagcagtttaaaagaccaccagagtaagggacaggctctggagcccaccgagtccaaggtcctgggtgccctggtagaactgaggaagatctgcaccctgggcctccagcgcatcttctacctgaagctggaagacttggtgtctccaccttccatcattgacaagctcttcctggacaccctacctttctaatcaggagcagtggagcagtgagctgcctcctctcctagcacctgcttgctacgcagcaaagggataggtttggaaacctatcatttcctgtccttccttaagaggaaaagcagctcctgtagaaagcaaagactttcttttttttctggctcttttccttacaacctaaagccagaaaacttgcagagtattgtgttggggttgtgttttatatttaggcattgggggatggggtgggagggggttatagttcatgagggttttctaagaaattgctaacaaagcacttttggacaatgctatcccagcaggaaaaaaaaggataatataactgttttaaaactctttctggggaatccaattatagttgctttgtatttaaaaacaagaacagccaagggttgttcgccagggtaggatgtgtcttaaagattggtcccttgaaaatatgcttcctgtatcaaaggtacgtatgtggtgcaaacaaggcagaaacttccttttaatttccttcttcctttattttaacaaatggtgaaagatggaggattacctacaaatcagacatggcaaaacaataatggctgtttgcttccataaacaagtgcaattttttaaagtgctgtcttactaagtcttgtttattaactctcctttattctatatggaaataaaaaggaggcagtcatgttagcaaatgacacgttaatatccctagcagaggctgtgttcaccttccctgtcgatcccttctgaggtatggcccatccaagacttttaggccattcttgatggaaccagatccctgccctgactgtccagctatcctgaaagtggatcagattataaactggattacatgtaactgttttggttgtgttctatcaaccccaccagagttccctaaacttgcttcagttatagtaactgactggtatattcattcagaagcgccataagtcagttgagtatttgatccctagataagaacatgcaaatcagcaggaactggtcatacagggtaagcaccagggacaataaggatttttatagatataatttaatttttgttattggttaaggagacaattttggagagcaagcaaatctttttaaaaaatagtatgaatgtgaatactagaaaagatttaaaaaatagtatgagtgtgagtactaggaaggat

SEQ ID NO: 160982 - DNA, 5706 bp, Homo sapiens
  Payload ID: 11446
  Gene Symbol: NR4A3
  Gene Name: nuclear receptor subfamily 4, group A, member 3
  Uniprot ID: Q92570
  ENST ID: ENST00000618101
  CDS Start-End: 769-2682
ataaatgacgtgccgagagagcgagcgaacgcgcagccgggagagcggagtctcctgcctcccgccccccacccctccagctcctgctcctcctccgctccccatacacagacgcgctcacacccgctccctcactcgcacacacagacacaagcgcgcacacaggctccgcacacacacttcgctctcccgcgcgctcacacccctcttgccctgagcccttgccggtgcagcgcggcgccgcagctggacgcccctcccgggctcactttgcaacgctgacggtgccggcagtggccgtggaggtgggaacagcggcggcatcctcccccctggtcacagcccaagccaggacgcccgcggaacctctcggctgtgctctcccatgagtcgggatcgcagcatcccccaccagccgctcaccgcctccgggagccgctgggcttgtacaccgcagcccttccgggacagcagctgtgactcccccccagtgcagatttcgggacagctctctagaaactcgctctaaagacggaaccgccacagcactcaaagcccactgcggaagagggcagcccggcaagcccgggccctgagcctggacccttagcggtgccgggcagcactgccggcgcttcgcctcgccggacgtccgctcctcctacactctcagcctccgctggagagacccccagccccaccattcagcgcgcaagataccctccaggccctcatcaccttttttcaagtcaagatttcatcccatacatgcatgactcaatcagatttggaaatgtggatatgccctgcgtccaagcccaatatagcccttcccctccaggttccagttatgcggcgcagacatacagctcggaatacaccacggagatcatgaaccccgactacaccaagctgaccatggaccttggcagcactgagatcacggctacagccaccacgtccctgcccagcatcagtaccttcgtggagggctactcgagcaactacgaactcaagccttcctgcgtgtaccaaatgcagcggcccttgatcaaagtggaggaggggcgggcgcccagctaccatcaccatcaccaccaccaccaccaccaccaccaccatcaccagcagcagcatcagcagccatccattcctccagcctccagcccggaggacgaggtgctgcccagcacctccatgtacttcaagcagtccccaccgtccacccccaccacgccggccttccccccgcaggcgggggcgttatgggacgaggcactgccctcggcgcccggctgcatcgcacccggcccgctgctggacccgccgatgaaggcggtccccacggtggccggcgcgcgcttcccgctcttccacttcaagccctcgccgccgcatccccccgcgcccagcccggccggcggccaccacctcggctacgacccgacggccgctgccgcgctcagcctgccgctgggagccgcagccgccgcgggcagccaggccgccgcgcttgagagccacccgtacgggctgccgctggccaagagggcggccccgctggccttcccgcctctcggcctcacgccctcccctaccgcgtccagcctgctgggcgagagtcccagcctgccgtcgccgcccagcaggagctcgtcgtctggcgagggcacgtgtgccgtgtgcggggacaacgccgcctgccagcactacggcgtgcgaacctgcgagggctgcaagggctttttcaagagaacagtgcagaaaaatgcaaaatatgtttgcctggcaaataaaaactgcccagtagacaagagacgtcgaaaccgatgtcagtactgtcgatttcagaagtgtctcagtgttggaatggtaaaagaagttgtccgtacagatagtctgaaagggaggagaggtcgtctgccttccaaaccaaagagcccattacaacaggaaccttctcagccctctccaccttctcctccaatctgcatgatgaatgcccttgtccgagctttaacagactcaacacccagagatcttgattattccagatactgtcccactgaccaggctgctgcaggcacagatgctgagcatgtgcaacaattctacaacctcctgacagcctccattgatgtatccagaagctgggcagaaaagattccgggatttactgatctccccaaagaagatcagacattacttattgaatcagcctttttggagctgtttgtcctcagactttccatcaggtcaaacactgctgaagataagtttgtgttctgcaatggacttgtcctgcatcgacttcagtgccttcgtggatttggggagtggctcgactctattaaagacttttccttaaatttgcagagcctgaaccttgatatccaagccttagcctgcctgtcagcactgagcatgatcacagaaagacatgggttaaaagaaccaaagagagtcgaagagctatgcaacaagatcacaagcagtttaaaagaccaccagagtaagggacaggctctggagcccaccgagtccaaggtcctgggtgccctggtagaactgaggaagatctgcaccctgggcctccagcgcatcttctacctgaagctggaagacttggtgtctccaccttccatcattgacaagctcttcctggacaccctacctttctaatcaggagcagtggagcagtgagctgcctcctctcctagcacctgcttgctacgcagcaaagggataggtttggaaacctatcatttcctgtccttccttaagaggaaaagcagctcctgtagaaagcaaagactttcttttttttctggctcttttccttacaacctaaagccagaaaacttgcagagtattgtgttggggttgtgttttatatttaggcattgggggatggggtgggagggggttatagttcatgagggttttctaagaaattgctaacaaagcacttttggacaatgctatcccagcaggaaaaaaaaggataatataactgttttaaaactctttctggggaatccaattatagttgctttgtatttaaaaacaagaacagccaagggttgttcgccagggtaggatgtgtcttaaagattggtcccttgaaaatatgcttcctgtatcaaaggtacgtatgtggtgcaaacaaggcagaaacttccttttaatttccttcttcctttattttaacaaatggtgaaagatggaggattacctacaaatcagacatggcaaaacaataatggctgtttgcttccataaacaagtgcaattttttaaagtgctgtcttactaagtcttgtttattaactctcctttattctatatggaaataaaaaggaggcagtcatgttagcaaatgacacgttaatatccctagcagaggctgtgttcaccttccctgtcgatcccttctgaggtatggcccatccaagacttttaggccattcttgatggaaccagatccctgccctgactgtccagctatcctgaaagtggatcagattataaactggattacatgtaactgttttggttgtgttctatcaaccccaccagagttccctaaacttgcttcagttatagtaactgactggtatattcattcagaagcgccataagtcagttgagtatttgatccctagataagaacatgcaaatcagcaggaactggtcatacagggtaagcaccagggacaataaggatttttatagatataatttaatttttgttattggttaaggagacaattttggagagcaagcaaatctttttaaaaaatagtatgaatgtgaatactagaaaagatttaaaaaatagtatgagtgtgagtactaggaaggattagtgggctgcgtttcaacattccgtgttcgtactcccttttgtatgtttctactgttaatgccatattactatgagataatttgttgcatagtgtccttatttgtataaacatttgtatgcacgttatattgtaatagctttgcctgtatttattgcaagaccaccagctcctggaagctgagttacagagtaattaaatggggtgttcacagtgacttggatacaccaattagaaattaaataagcaaatatatatatatatataaatatagcaggttacatatatatatttataatgtgtctttttattaaccatttgtacaataaatgtcacttcccatgccgttattttatggttcatttgcagtgacttttaaggcagtactgtttagcactttgatattaaaattttgcttatgttttgctaaattcgaataatgtttgaagatttttaggtctaaaagtctttatattatatactctgtatcaagtcaaaatatctttggccattttgctaagaaacaaactttgaatgtcaaactgatgtcacagtagtttttgttagctttaaatcatttttgctttagtctttttaaaggaaaataacaaaactatgctgtttatattgtcattaaattatacaatcaaacaaatgccaaatgaattgcctaattgctgcaaagtataacccagataggaaatcatatgtttttttccaagagtcattctaatatttgattatgttatgtgtgcttttatgaaagattgttatttttatatatcaagatgatagaacctggaatgttaggattttgaaatgttagacttggaaggggcctggtctgtcaactagtccaaccccttaaaattcatagaggagcaaactggggcccattgaagggtgaagagttactcaaggtcaaacagctggtaacagaatcaagactaagacctaatttacctttccatactctttttttttctcaacttcatctatataaaatcaggcttttaaacataaccactaatatttacctgaagataaccatgagtaaagtatacttttgcattaattttttgagcttatatgcaaacataataaatattattaaatatcaggaaagctaacatttcatacaagatagcttcagaccaaattcaaattgaatttgaataaattagaaatactgtgcatacataaccttcttgtgcaccatgagtatttggaaagttaatccttgtttttgtcgtgtctataaaggaagaacaaaacaaaataaaaacagagccctagagaaatgctgttactttttatttttacacccatcagatttaaggaaaagactttttagccattataatctagtggttggaaggaatgaagaagcttttttagtaataggtccagatatgagtgctaaaaataaagatgatagcatgttcttctgtcttccatagttattacaactatgagagcctcccaagtcatcttatcaactcaactcccttttttttgtcttaatgttgcacataagtttatacagagtggatgaccacactagcacagaagagaacaacatgtattaaagcaggtgattcctccccttggcgggagagctctctcagtgtgaacatgccttctgtgggcggaaatcaggaagccaccagctgttaatggagagtgccttgcttttatttcagacagcagagttttccaaagtttctctgctcctctaacagcattgctctttagtgtgtgttaacctgtggtttgaaagaaatgctcttgtacattaacaatgtaaatttaaatgattaaattacattttatcaatggc

SEQ ID NO: 160983 - DNA, 768 bp, Homo sapiens
  Payload ID: 11447
  Gene Symbol: NR5A1
  Gene Name: nuclear receptor subfamily 5, group A, member 1
  ENST ID: ENST00000373587
  CDS Start-End: 1-738
gtggaggaggaaggagatgtgtcaaacagaggagtggagctgctgcagctggagccggatgaggaccaggtgcgggcccgcatcttgggctgcctgcaggagcccaccaaaagccgccccgaccagccggcggccttcggcctcctgtgcagaatggccgaccagaccttcatctccatcgtggactgggcacgcaggtgcatggtcttcaaggagctggaggtggccgaccagatgacgctgctgcagaactgctggagcgagctgctggtgttcgaccacatctaccgccaggtccagcacggcaaggagggcagcatcctgctggtcaccgggcaggaggtggagctgaccacagtggccacccaggcgggctcgctgctgcacagcctggtgttgcgggcgcaggagctggtgctgcagctgcttgcgctgcagctggaccggcaggagtttgtctgcctcaagttcatcatcctcttcagcctggatttgaagttcctgaataaccacatcctggtgaaagacgctcaggagaaggccaacgccgccctgcttgactacaccctgtgccactacccgcactgcggggacaaattccagcagctgctgctgtgcctggtggaggtgcgggccctgagcatgcaggccaaggagtacctgtaccacaagcacctgggcaacgagatgccccgcaacaacctgctcatcgaaatgctgcaagccaagcagacttgagcctgggccgggggcggggccgggactggg

SEQ ID NO: 160984 - DNA, 3104 bp, Homo sapiens
  Payload ID: 11447
  Gene Symbol: NR5A1
  Gene Name: nuclear receptor subfamily 5, group A, member 1
  Uniprot ID: Q13285
  ENST ID: ENST00000373588
  CDS Start-End: 198-1583
gggaggaggaggaggacggacggacagggccagcctgctgtccggctgccgcccgccgtggtgtgagggggtttctgcgcacccacagtcgccaccgtcccacctgggctgccggagcctccccctggacccctggtgcccactgccaccctcatccggtgtgagagcgctgcttccgcttcgcggacgccgcgggcatggactattcgtacgacgaggacctggacgagctgtgccccgtgtgcggggacaaggtgtccggctaccactacggactgctcacgtgtgagagctgcaagggcttcttcaagcgcacggtgcagaacaacaagcactacacgtgcaccgagagccagagctgcaagatcgacaagacgcagcgcaagcgctgtcccttctgccgcttccagaaatgcctgacggtggggatgcgcctggaagccgtgcgcgctgaccgtatgaggggtggccggaacaagtttgggccgatgtacaagcgggaccgggccctgaaacagcagaagaaggcacagattcgggccaatggcttcaagctggagacagggcccccgatgggggtgcccccgccgccccctcccgcaccggactacgtgctgcctcccagcctgcatgggcctgagcccaagggcctggccgccggtccacctgctgggccactgggcgactttggggccccagcactgcccatggccgtgcccggtgcccacgggccactggctggctacctctaccctgcctttcctggccgtgccatcaagtctgagtacccggagccttatgccagccccccacagcctgggctgccgtacggctacccagagcccttctctggagggcccaacgtgcctgagctcatcctgcagctgctgcagctggagccggatgaggaccaggtgcgggcccgcatcttgggctgcctgcaggagcccaccaaaagccgccccgaccagccggcggccttcggcctcctgtgcagaatggccgaccagaccttcatctccatcgtggactgggcacgcaggtgcatggtcttcaaggagctggaggtggccgaccagatgacgctgctgcagaactgctggagcgagctgctggtgttcgaccacatctaccgccaggtccagcacggcaaggagggcagcatcctgctggtcaccgggcaggaggtggagctgaccacagtggccacccaggcgggctcgctgctgcacagcctggtgttgcgggcgcaggagctggtgctgcagctgcttgcgctgcagctggaccggcaggagtttgtctgcctcaagttcatcatcctcttcagcctggatttgaagttcctgaataaccacatcctggtgaaagacgctcaggagaaggccaacgccgccctgcttgactacaccctgtgccactacccgcactgcggggacaaattccagcagctgctgctgtgcctggtggaggtgcgggccctgagcatgcaggccaaggagtacctgtaccacaagcacctgggcaacgagatgccccgcaacaacctgctcatcgaaatgctgcaagccaagcagacttgagcctgggccgggggcggggccgggactgggggcgggactgggggcggggcctgggcggggccgcagccacaccgctggctccgcatggttcattttctgatgcccaccgaggagccccagccccgtcccagaggccgctgcccctgagttctgacactgtgtgtttgggaaggtgggtgaggctgggcagggcctggcggaggtggagtggccactggcacttgcctgctgcttggagtgccccaaggaggtggctgttaaccacccgccccgccccctccctgctcccagctctctctcctggagtctgaagcctgcaggtccggggaggaggttcgggattccctggtgggcctcgacgtcccttggatcagaggtcatcccttcctcctctcctggaaacagacagggagaagttgagcaggtatcaactaggggaggagagagggtctccagtgttccccccatagagaccaggagggagagcctctgttttgtaaactaaggataaccgagtttgctaaattgagaggggctattgggccctagaggacactaggagactggttaggacaaaaagaccttctccctagcccttctaccccacctgacctctgcaagagggggcattgatacatcatcgggaaaaaactttgctccaggcatcactgattccctctcccacccaaggagaacgtttggtacaatcgacatcctagccccacccagaggtggccctcccaggctggtatttatctgcaaggttgtagtcaagaggtttttctccccgctttttgtttttaagcttctagacactccttgaaatgtgtgtgtgatggagggaaggggacagatttgaggactgaagctggggcttggggattgccactaagtacagctgacggtttctccccggacactcgcctactaagtacccttggggtggtgctgggtcattacttctgagccccagccccaatccagagaagcgctgttgcccgccctccacccactaggtgaacagcaggatgccctgttgggggcttcaggtctctgtgggtgggaatgcaagtgaacttgggagggggcacgggcctgtagatcagggatagcgctgttgatcccctctctgtggctccaacccgttgggtcccttgctgcaaacccatgaagctggccctcagctccctgaccccctgtcctaggtcatgaaggacactctgcagggtgaagcaccagggagaggcctcggctgtctcctgtccccggcggggtgcctgctgtccgtcccgctttcatgttactgttgcagcttgtgctgagcctgcccagttggaggagactgggcacccctgcctcctgcctcccgcctcccgccaccctgtctcagtacctcccctccccgccccctgaaacatgtgcccctgccaaggccggagacccacagccctgaaacgagaagtgcccttaaggatcaccccagcccccacagccctggaataaatttcgcaattagtttcc

SEQ ID NO: 160985 - DNA, 826 bp, Homo sapiens
  Payload ID: 11447
  Gene Symbol: NR5A1
  Gene Name: nuclear receptor subfamily 5, group A, member 1
  ENST ID: ENST00000455734
  CDS Start-End: 294-826
ttggcccaggcctctaatggccagcctccttctgcagtgcctccctgcagcctgggccggccactgcctgctccacttagtgaccggtgccccctgctctgggcagggaaggtgccaggggtctcccagactcaccctcccaccatgctaccccctcttcttccctgggctgccgatgggaggagccaggcctgtgaccacaagccccatggaggtccgctggtgtcccgctgtctctggccaggcatccaccaggctgtgtgggtctgagcctagaggcggacgccgcgggcatggactattcgtacgacgaggacctggacgagctgtgccccgtgtgcggggacaaggtgtccggctaccactacggactgctcacgtgtgagagctgcaagggcttcttcaagcgcacggtgcagaacaacaagcactacacgtgcaccgagagccagagctgcaagatcgacaagacgcagcgcaagcgctgtcccttctgccgcttccagaaatgcctgacggtggggatgcgcctggaagccgtgcgcgctgaccgtatgaggggtggccggaacaagtttgggccgatgtacaagcgggaccgggccctgaaacagcagaagaaggcacagattcgggccaatggcttcaagctggagacagggcccccgatgggggtgcccccgccgccccctcccgcaccggactacgtgctgcctcccagcctgcatgggcctgagcccaagggcctggccgccggtccacctgctgggccactgggcgactttggggccccagcactgcccatggccgtgcccggtgcccacgg

SEQ ID NO: 160986 - DNA, 2975 bp, Homo sapiens
  Payload ID: 11447
  Gene Symbol: NR5A1
  Gene Name: nuclear receptor subfamily 5, group A, member 1
  ENST ID: ENST00000620110
  CDS Start-End: 188-1453
ggaggacggacggacagggccagcctgctgtccggctgccgcccgccgtggtgtgagggggtttctgcgcacccacagtcgccaccgtcccacctgggctgccggagcctccccctggacccctggtgcccactgccaccctcatccggtgtgagagcgctgcttccgcttcgcggacgccgcgggcatggactattcgtacgacgaggacctggacgagctgtgccccgtgtgcggggacaaggtgtccggctaccactacggactgctcacgtgtgagagctgcaagggcttcttcaagcgcacggtgcagaacaacaagcactacacgtgcaccgagagccagagctgcaagatcgacaagacgcagcgcaagcgctgtcccttctgccgcttccagaaatgcctgacggtggggatgcgcctggaagccgtgcgcgctgaccgtatgaggggtggccggaacaagtttgggccgatgtacaagcgggaccgggccctgaaacagcagaagaaggcacagattcgggccaatggcttcaagctggagacagggcccccgatgggggtgcccccgccgccccctcccgcaccggactacgtgctgcctcccagcctgcatgggcctgagcccaagggcctggccgccggtccacctgctgggccactgggcgactttggggccccagcactgcccatggccgtgcccggtgcccacgggccactggctggctacctctaccctgcctttcctggccgtgccatcaagtctgagtacccggagccttatgccagccccccacagcctgggctgccgtacggctacccagagcccttctctggagggcccaacgtgcctgagctcatcctgcagctgctgcagctggagccggatgaggaccaggtgcgggcccgcatcttgggctgcctgcaggagcccaccaaaagccgccccgaccagccggcggccttcggcctcctgtgcagaatggccgaccagaccttcatctccatcgtggactgggcacgcaggtgcatggtcttcaaggagctggaggtggagctgaccacagtggccacccaggcgggctcgctgctgcacagcctggtgttgcgggcgcaggagctggtgctgcagctgcttgcgctgcagctggaccggcaggagtttgtctgcctcaagttcatcatcctcttcagcctggatttgaagttcctgaataaccacatcctggtgaaagacgctcaggagaaggccaacgccgccctgcttgactacaccctgtgccactacccgcactgcggggacaaattccagcagctgctgctgtgcctggtggaggtgcgggccctgagcatgcaggccaaggagtacctgtaccacaagcacctgggcaacgagatgccccgcaacaacctgctcatcgaaatgctgcaagccaagcagacttgagcctgggccgggggcggggccgggactgggggcgggactgggggcggggcctgggcggggccgcagccacaccgctggctccgcatggttcattttctgatgcccaccgaggagccccagccccgtcccagaggccgctgcccctgagttctgacactgtgtgtttgggaaggtgggtgaggctgggcagggcctggcggaggtggagtggccactggcacttgcctgctgcttggagtgccccaaggaggtggctgttaaccacccgccccgccccctccctgctcccagctctctctcctggagtctgaagcctgcaggtccggggaggaggttcgggattccctggtgggcctcgacgtcccttggatcagaggtcatcccttcctcctctcctggaaacagacagggagaagttgagcaggtatcaactaggggaggagagagggtctccagtgttccccccatagagaccaggagggagagcctctgttttgtaaactaaggataaccgagtttgctaaattgagaggggctattgggccctagaggacactaggagactggttaggacaaaaagaccttctccctagcccttctaccccacctgacctctgcaagagggggcattgatacatcatcgggaaaaaactttgctccaggcatcactgattccctctcccacccaaggagaacgtttggtacaatcgacatcctagccccacccagaggtggccctcccaggctggtatttatctgcaaggttgtagtcaagaggtttttctccccgctttttgtttttaagcttctagacactccttgaaatgtgtgtgtgatggagggaaggggacagatttgaggactgaagctggggcttggggattgccactaagtacagctgacggtttctccccggacactcgcctactaagtacccttggggtggtgctgggtcattacttctgagccccagccccaatccagagaagcgctgttgcccgccctccacccactaggtgaacagcaggatgccctgttgggggcttcaggtctctgtgggtgggaatgcaagtgaacttgggagggggcacgggcctgtagatcagggatagcgctgttgatcccctctctgtggctccaacccgttgggtcccttgctgcaaacccatgaagctggccctcagctccctgaccccctgtcctaggtcatgaaggacactctgcagggtgaagcaccagggagaggcctcggctgtctcctgtccccggcggggtgcctgctgtccgtcccgctttcatgttactgttgcagcttgtgctgagcctgcccagttggaggagactgggcacccctgcctcctgcctcccgcctcccgccaccctgtctcagtacctcccctccccgccccctgaaacatgtgcccctgccaaggccggagacccacagccctgaaacgagaagtgcccttaaggatcaccccagcccccacagccctggaataaatttcgcaattagtttcca

SEQ ID NO: 160987 - DNA, 3115 bp, Homo sapiens
  Payload ID: 11448
  Gene Symbol: NR5A2
  Gene Name: nuclear receptor subfamily 5, group A, member 2
  Uniprot ID: O00482
  ENST ID: ENST00000236914
  CDS Start-End: 235-1722
atggtttacagcaggtcactaatgttggaaaaagtacagagtccagggaaagacttgcttgtaactttatgaattctggatttttttttttcctttgctttttcttaactttcactaagggttactgtagtctgatgtgtccttcccaaggccacgaaatttgacaagctgcacttttcttttgctcaatgatttctgctttaagccaaagaactgcctataatttcactaagaatgtcttctaattcagatactggggatttacaagagtctttaaagcacggacttacacctattgtgtctcaatttaaaatggtgaattactcctatgatgaagatctggaagagctttgtcccgtgtgtggagataaagtgtctgggtaccattatgggctcctcacctgtgaaagctgcaagggattttttaagcgaacagtccaaaataataaaaggtacacatgtatagaaaaccagaactgccaaattgacaaaacacagagaaagcgttgtccttactgtcgttttcaaaaatgtctaagtgttggaatgaagctagaagctgtaagggccgaccgaatgcgtggaggaaggaataagtttgggccaatgtacaagagagacagggccctgaagcaacagaaaaaagccctcatccgagccaatggacttaagctagaagccatgtctcaggtgatccaagctatgccctctgacctgaccatttcctctgcaattcaaaacatccactctgcctccaaaggcctacctctgaaccatgctgccttgcctcctacagactatgacagaagtccctttgtaacatcccccattagcatgacaatgccccctcacggcagcctgcaaggttaccaaacatatggccactttcctagccgggccatcaagtctgagtacccagacccctataccagctcacccgagtccataatgggctattcatatatggatagttaccagacgagctctccagcaagcatcccacatctgatactggaacttttgaagtgtgagccagatgagcctcaagtccaggctaaaatcatggcctatttgcagcaagagcaggctaaccgaagcaagcacgaaaagctgagcacctttgggcttatgtgcaaaatggcagatcaaactctcttctccattgtcgagtgggccaggagtagtatcttcttcagagaacttaaggttgatgaccaaatgaagctgcttcagaactgctggagtgagctcttaatcctcgaccacatttaccgacaagtggtacatggaaaggaaggatccatcttcctggttactgggcaacaagtggactattccataatagcatcacaagccggagccaccctcaacaacctcatgagtcatgcacaggagttagtggcaaaacttcgttctctccagtttgatcaacgagagttcgtatgtctgaaattcttggtgctctttagtttagatgtcaaaaaccttgaaaacttccagctggtagaaggtgtccaggaacaagtcaatgccgccctgctggactacacaatgtgtaactacccgcagcagacagagaaatttggacagctacttcttcgactacccgaaatccgggccatcagtatgcaggctgaagaatacctctactacaagcacctgaacggggatgtgccctataataaccttctcattgaaatgttgcatgccaaaagagcataagttacaacccctaggagctctgctttcaaaacaaaaagagattgggggagtggggagggggaagaagaacaggaagaaaaaaagtactctgaactgctccaagtaacgctaattaaaaacttgctttaaagatattgaatttaaaaaggcataataatcaaatacttaatagcaaataaatgatgtatcagggtatttgtattgcaaactgtgaatcaaaggcttcacagccccagaggattccatataaaagacattgtaatggagtggattgaactcacagatggataccaacacggtcagaagaaaaacggacagaacggttcttgtatatttaaactgatctccactatgaagaaatttaggaactaatcttattaattaggcttatacagcgggggatttgagcttacaggattcctccatggtaaagctgaactgaaacaattctcaagaatgcatcagctgtacctacaatagcccctccctcttcctttgaaggccccagcacctctgccctgtggtcaccgaatctgtactaaggacctgtgttcagccacacccagtggtagctccaccaaatcatgaacagcctaattttgagtgtctgtgtcttagacctgcaaacagctaataggaaattctattaatatgttagcttgccattttaaatatgttctgagggttgttttgtctcgtgttcatgatgttaagaaaatgcaggcagtatccctcatcttatgtaagtgttaattaatattaagggaaatgactacaaactttcaaagcaaatgctccatagctaaagcaacttagaccttatttctgctactgttgctgaaatgtggctttggcattgttggatttcataaaaaatttctggcaggaagtcttgttagtatacatcagtctttttcatcatccaagtttgtagttcatttaaaaatacaacattaaacacattttgctaggatgtcaaatagtcacagttctaagtagttggaaacaaaattgacgcatgttaatctatgcaaagagaaaggaaaggatgaggtgatgtattgactcaaggttcattcttgctgcaattgaacatcctcaagagttgggatggaaatggtgatttttacatgtgtcctggaaagatattaaagtaattcaaatcttccccaaaggggaaaggaagagagtgatactgacctttttaagtcatagaccaaagtctgctgtagaacaaatatgggaggacaaagaatcgcaaattcttcaaatgactattatcagtattattaacatgcgatgccacaggtatgaaagtcttgccttatttcacaattttaaaaggtagctgtgcagatgtggatcaacatttgtttaaaataaagtattaata

SEQ ID NO: 160988 - DNA, 1793 bp, Homo sapiens
  Payload ID: 11448
  Gene Symbol: NR5A2
  Gene Name: nuclear receptor subfamily 5, group A, member 2
  ENST ID: ENST00000367357
  CDS Start-End: 1-1133
aagatctggaagagctttgtcccgtgtgtggagataaagtgtctgggtaccattatgggctcctcacctgtgaaagctgcaagggattttttaagcgaacagtccaaaataataaaaggtacacatgtatagaaaaccagaactgccaaattgacaaaacacagagaaagcgttgtccttactgtcgttttcaaaaatgtctaagtgttggaatgaagctagaagctgtaagggccgaccgaatgcgtggaggaaggaataagtttgggccaatgtacaagagagacagggccctgaagcaacagaaaaaagccctcatccgagccaatggacttaagctagaagccatgtctcaggtgatccaagctatgccctctgacctgaccatttcctctgcaattcaaaacatccactctgcctccaaaggcctacctctgaaccatgctgccttgcctcctacagactatgacagaagtccctttgtaacatcccccattagcatgacaatgccccctcacggcagcctgcaaggttaccaaacatatggccactttcctagccgggccatcaagtctgagtacccagacccctataccagctcacccgagtccataatgggctattcatatatggatagttaccagacgagctctccagcaagcatcccacatctgatactggaacttttgaagtgtgagccagatgagcctcaagtccaggctaaaatcatggcctatttgcagcaagagcaggctaaccgaagcaagcacgaaaagctgagcacctttgggcttatgtgcaaaatggcagatcaaactctcttctccattgtcgagtgggccaggagtagtatcttcttcagagaacttaagggtctcactctgtcgcccagtctggagtgcagtggcacgatcttggctcatggcaacctccacctcctgcattcaagtgattcgcctgcctcagcctcccgagtagctgggattacaggcgtgcaccacaacacccatctaatttttgtatttttagtagagatgggattttgccatgttggccaggctggtctcaaaactcctgacctcagggtgatctgcctgcctcggcctcccaaagtgctgggattatgggcatgagccactgcgcctggccgtaattgtgcttttttttccttttttctttttttgagatggagttacactcttgttgcctgggctggggtgcaatggcacagtctcggctcactgcaacctccacctcctgggttccagcaattctcctgcctcagcctcccgagtagctgggattacaggcatgcgccaccatgcctagctaattttcgtattattagtagaaacaaggtttcaccatgtcagccaggctggtctcaaactcctgacctcagatgatccacccgccttggcctcccaaagtgctgggattacagatgtgagccaccacgctcagccaaattgtactttcagtaaagtactttactgtttacaaagaacttccatatacatttttttggtcctggtctctgtctttcattttgggagcatggatgtaactggcctttcatcaatggttcagtagtgttgttttttaaagcctacaacagaaccatctcctatgaattgactatcacctgtctaaatgccctgtttacagcatgttgtacctgcaagagcaggatatttaaagtactttataattgataattgccattatcaatatgctcacctctttaccatattccaacaggtcttaaaggacttgtattattttttaccgaa

SEQ ID NO: 160989 - DNA, 5086 bp, Homo sapiens
  Payload ID: 11448
  Gene Symbol: NR5A2
  Gene Name: nuclear receptor subfamily 5, group A, member 2
  Uniprot ID: O00482
  ENST ID: ENST00000367362
  CDS Start-End: 247-1872
gaaactggatacatggtttacagcaggtcactaatgttggaaaaagtacagagtccagggaaagacttgcttgtaactttatgaattctggatttttttttttcctttgctttttcttaactttcactaagggttactgtagtctgatgtgtccttcccaaggccacgaaatttgacaagctgcacttttcttttgctcaatgatttctgctttaagccaaagaactgcctataatttcactaagaatgtcttctaattcagatactggggatttacaagagtctttaaagcacggacttacacctattggtgctgggcttccggaccgacacggatcccccatccccgcccgcggtcgccttgtcatgctgcccaaagtggagacggaagccctgggactggctcgatcgcatggggaacagggccagatgccggaaaacatgcaagtgtctcaatttaaaatggtgaattactcctatgatgaagatctggaagagctttgtcccgtgtgtggagataaagtgtctgggtaccattatgggctcctcacctgtgaaagctgcaagggattttttaagcgaacagtccaaaataataaaaggtacacatgtatagaaaaccagaactgccaaattgacaaaacacagagaaagcgttgtccttactgtcgttttcaaaaatgtctaagtgttggaatgaagctagaagctgtaagggccgaccgaatgcgtggaggaaggaataagtttgggccaatgtacaagagagacagggccctgaagcaacagaaaaaagccctcatccgagccaatggacttaagctagaagccatgtctcaggtgatccaagctatgccctctgacctgaccatttcctctgcaattcaaaacatccactctgcctccaaaggcctacctctgaaccatgctgccttgcctcctacagactatgacagaagtccctttgtaacatcccccattagcatgacaatgccccctcacggcagcctgcaaggttaccaaacatatggccactttcctagccgggccatcaagtctgagtacccagacccctataccagctcacccgagtccataatgggctattcatatatggatagttaccagacgagctctccagcaagcatcccacatctgatactggaacttttgaagtgtgagccagatgagcctcaagtccaggctaaaatcatggcctatttgcagcaagagcaggctaaccgaagcaagcacgaaaagctgagcacctttgggcttatgtgcaaaatggcagatcaaactctcttctccattgtcgagtgggccaggagtagtatcttcttcagagaacttaaggttgatgaccaaatgaagctgcttcagaactgctggagtgagctcttaatcctcgaccacatttaccgacaagtggtacatggaaaggaaggatccatcttcctggttactgggcaacaagtggactattccataatagcatcacaagccggagccaccctcaacaacctcatgagtcatgcacaggagttagtggcaaaacttcgttctctccagtttgatcaacgagagttcgtatgtctgaaattcttggtgctctttagtttagatgtcaaaaaccttgaaaacttccagctggtagaaggtgtccaggaacaagtcaatgccgccctgctggactacacaatgtgtaactacccgcagcagacagagaaatttggacagctacttcttcgactacccgaaatccgggccatcagtatgcaggctgaagaatacctctactacaagcacctgaacggggatgtgccctataataaccttctcattgaaatgttgcatgccaaaagagcataagttacaacccctaggagctctgctttcaaaacaaaaagagattgggggagtggggagggggaagaagaacaggaagaaaaaaagtactctgaactgctccaagtaacgctaattaaaaacttgctttaaagatattgaatttaaaaaggcataataatcaaatacttaatagcaaataaatgatgtatcagggtatttgtattgcaaactgtgaatcaaaggcttcacagccccagaggattccatataaaagacattgtaatggagtggattgaactcacagatggataccaacacggtcagaagaaaaacggacagaacggttcttgtatatttaaactgatctccactatgaagaaatttaggaactaatcttattaattaggcttatacagcgggggatttgagcttacaggattcctccatggtaaagctgaactgaaacaattctcaagaatgcatcagctgtacctacaatagcccctccctcttcctttgaaggccccagcacctctgccctgtggtcaccgaatctgtactaaggacctgtgttcagccacacccagtggtagctccaccaaatcatgaacagcctaattttgagtgtctgtgtcttagacctgcaaacagctaataggaaattctattaatatgttagcttgccattttaaatatgttctgagggttgttttgtctcgtgttcatgatgttaagaaaatgcaggcagtatccctcatcttatgtaagtgttaattaatattaagggaaatgactacaaactttcaaagcaaatgctccatagctaaagcaacttagaccttatttctgctactgttgctgaaatgtggctttggcattgttggatttcataaaaaatttctggcaggaagtcttgttagtatacatcagtctttttcatcatccaagtttgtagttcatttaaaaatacaacattaaacacattttgctaggatgtcaaatagtcacagttctaagtagttggaaacaaaattgacgcatgttaatctatgcaaagagaaaggaaaggatgaggtgatgtattgactcaaggttcattcttgctgcaattgaacatcctcaagagttgggatggaaatggtgatttttacatgtgtcctggaaagatattaaagtaattcaaatcttccccaaaggggaaaggaagagagtgatactgacctttttaagtcatagaccaaagtctgctgtagaacaaatatgggaggacaaagaatcgcaaattcttcaaatgactattatcagtattattaacatgcgatgccacaggtatgaaagtcttgccttatttcacaattttaaaaggtagctgtgcagatgtggatcaacatttgtttaaaataaagtattaatactttaaagtcaaataagatatagtgtttacattctttaggtcctgaggggcagggggatctgtgatataacaaaatagcaaaagcggtaatttccttaatgttatttttctgattggtaattatttttaacagtacttaattattctatgtcgtgagacactaaaatcaaaaacgggaatctcatttagactttaatttttttgagattatcggcggcacaatcactttgtagaaactgtaaaaaataaaagtatctcctagtcccttaattttttcataaatatttctggcttttgagtagtgtatttatattgtatatcatactttcaactgtagacaattatgatgctaatttattgtttcttggtttcacctttgtataagatatagccaagactgaagaaaccaaatatatgtgtttactgtagcatgtcttcaaattagtggaacttagttcagggacatagaagagtcttaatgaattaaaatcattcacttgattaaatgtctgtaaatcttcatcattcctactgtagtttatttaatatctattgtaaattatgtgacttgtagcttcctctggttttcaagtaaactcaacaaggtggagtcttacctggttttcctttccaagcattgtaaattgtataccaaagatattagttattacttctgtgtgtacaaagaggattattttattatgtttattaatcacctctaatactcatccacatgaagggtacacattaggtaagctgggcgttgactcatgcgcagtctcagtcacccgtgttatcttcgtggctcaaaggacaatgcaaaatcgccgatcagagctcatacccaaagcattacagagaacagcagcatcattgccctccccagctgaaaaacaagttggctagaagatacatggagaggaatggtgtggtcaacagttaatgaaacggttctatcatgcatgtgtaatgtggatggagacaattataagatttgactataactatttggagggtctttaacattgccaaaaaaacaaatatgttgatttttattttattttattttttattttaagaggcgggatcttgatctcacatgttgcccaggctggccttgaactcctgggctcaagcattcctcctgcctcagcctcccccatagctgggactaggggtgcatgccagcatacctggctacgttgactcttaaaatctatgttctcttattttaaagatacagtgctccccactgaaaattaaacctaaaaaatgtcacatattggtatgttgttaacctggtagattaaatcatgagaatgattagaaagacgggcaacacagcgggttacatccacactgctgatcacaccaacgacaggagctgataagcaagaaagcgtcacagccagcgtctgttcacccaaggttgacaagtgaagtttctctaatgttgattgttagccgatttgtaacctggcatttacttagcaactgccttatcaattacaggatttgccggtaaaagcagactcaaatataaaggtttttggcttaacttggtttattatagttgctctatgtttgtaaacagacaatctctaatgtctgattatttgtatcacagatctgcagctgccttggacttgaatccatgcaatgtttagagtgtgaagtcagttacttgttgatgttttcttactgtatcaatgaaatacatattgtcatgtcagttcttgccaggaacttctcaacaaaatggaattttttttttcagtatttcaataaatattgatatgcccagcctgataatttttaaaa

SEQ ID NO: 160990 - DNA, 213 bp, Homo sapiens
  Payload ID: 11448
  Gene Symbol: NR5A2
  Gene Name: nuclear receptor subfamily 5, group A, member 2
  ENST ID: ENST00000447034
  CDS Start-End: 1-213
gtctttaaagcacggacttacacctattgatcgaggaaattgccgctctggctgcttctccttcgccgccacgctcagacagaggtcgcttctgactagctgtgctgggcttccggaccgacacggatcccccatccccgcccgcggtcgccttgtcatgctgcccaaagtggagacggaagccctgggactggctcgatcgcatggggaaca

SEQ ID NO: 160991 - DNA, 1713 bp, Homo sapiens
  Payload ID: 11448
  Gene Symbol: NR5A2
  Gene Name: nuclear receptor subfamily 5, group A, member 2
  ENST ID: ENST00000474307
  CDS Start-End: 192-533
cagggaaagacttgcttgtaactttatgaattctggatttttttttttcctttgctttttcttaactttcactaagggttactgtagtctgatgtgtccttcccaaggccacgaaatttgacaagctgcacttttcttttgctcaatgatttctgctttaagccaaagaactgcctataatttcactaagaatgtcttctaattcagatactggggatttacaagagtctttaaagcacggacttacacctattgataacacagaaaatacaggcacaagaaagatgagagagcagcacacaaccatttcgcatctttttcgtcgggcagaaccgccgcggtgcgcaggcaaggagtccttcccggcagctccgcgcagctccggttccgcgtccggggccgcagctagagcgcgctcgggccggagacgcggactgcgcgcgcacgggggacgcgcgctcgggggctcgcgcccgcgcgggcggtcttgggctcctgctgcgcgcagccccagctggccgctgccaaaatagagttgagctgggtcgggagaccacgcacgccgatccctcacagtctcccccacaccccatgggtgaattaaagagggtaaggtaggggaaagagacgctgttgcacttttctctgcaaccctggaagaactgtgtttccagctaccgcacgcgcaactcacatcgcaagggaccgaggcggtacactctgagcgtaaacagagaacacctgcagctctggaatcggtcccaccgcagagggctgggaaccggaggactgtcggtccagcccataaggggctgctggggactaaacctcaagaaaagtaccgaagaaggctctcccctggcctcagcgagactaccccaacatcctaaacctgtgcaggcacttccgggcgccggattccgggataacaaaattccagtcaatttgccgtgtctcaatttaaaatggtgaattactcctatgatgaagatctggaagagctttgtcccgtgtgtggagataaagtgtctgggtaccattatgggctcctcacctgtgaaagctgcaaggtttgctcacacattgctacctgaaaaatataatgtccaacaccaaaataaaccagtggattacttcttttaagctaaatttaggctccttttttaaagactcaactaaaaatgagggagaaagagagagtcttagggagatgattcttagaagtgtgtgtctgatttagttcaaaaggcaaagaaatttatgctgtttagaaaactttgccagtctcatggttctaaaatactttattgtagtaaagtgatatagctgtagaaagacttccatttctaacagtcctaaatattgattttgcttgacttatatatatttaaagcatcgttgttcttgaaagggaatatgacaaactatttcccaaatacattttaacttcagagtatttctgtgctataagtctaaacattctttatccacagacataaaagcctaaattcccaactgtgtgatttcatcttgatttattccaaaataattttaaggattttttgaaatttatatcataaagaccaagaaatcagattttagtttttaatataataatttttataaatatatgacctatttaagtgcatggattttaatatgtaaaatatgctatattgttaccaaaaatataaattatactttaagaattta

SEQ ID NO: 160992 - DNA, 4775 bp, Homo sapiens
  Payload ID: 11448
  Gene Symbol: NR5A2
  Gene Name: nuclear receptor subfamily 5, group A, member 2
  Uniprot ID: O00482
  ENST ID: ENST00000544748
  CDS Start-End: 156-1565
atagtttgtcatctttttagctgcgaagacgccttcgtgggtctgcgtccggagcaaggcggttacccgatcccggcagtgagccgcgccgcgcgtcgtggcggcctgatttctgtttaactttaatagggcgatctcgagtgtctcaatttaaaatggtgaattactcctatgatgaagatctggaagagctttgtcccgtgtgtggagataaagtgtctgggtaccattatgggctcctcacctgtgaaagctgcaagggattttttaagcgaacagtccaaaataataaaaggtacacatgtatagaaaaccagaactgccaaattgacaaaacacagagaaagcgttgtccttactgtcgttttcaaaaatgtctaagtgttggaatgaagctagaagctgtaagggccgaccgaatgcgtggaggaaggaataagtttgggccaatgtacaagagagacagggccctgaagcaacagaaaaaagccctcatccgagccaatggacttaagctagaagccatgtctcaggtgatccaagctatgccctctgacctgaccatttcctctgcaattcaaaacatccactctgcctccaaaggcctacctctgaaccatgctgccttgcctcctacagactatgacagaagtccctttgtaacatcccccattagcatgacaatgccccctcacggcagcctgcaaggttaccaaacatatggccactttcctagccgggccatcaagtctgagtacccagacccctataccagctcacccgagtccataatgggctattcatatatggatagttaccagacgagctctccagcaagcatcccacatctgatactggaacttttgaagtgtgagccagatgagcctcaagtccaggctaaaatcatggcctatttgcagcaagagcaggctaaccgaagcaagcacgaaaagctgagcacctttgggcttatgtgcaaaatggcagatcaaactctcttctccattgtcgagtgggccaggagtagtatcttcttcagagaacttaaggttgatgaccaaatgaagctgcttcagaactgctggagtgagctcttaatcctcgaccacatttaccgacaagtggtacatggaaaggaaggatccatcttcctggttactgggcaacaagtggactattccataatagcatcacaagccggagccaccctcaacaacctcatgagtcatgcacaggagttagtggcaaaacttcgttctctccagtttgatcaacgagagttcgtatgtctgaaattcttggtgctctttagtttagatgtcaaaaaccttgaaaacttccagctggtagaaggtgtccaggaacaagtcaatgccgccctgctggactacacaatgtgtaactacccgcagcagacagagaaatttggacagctacttcttcgactacccgaaatccgggccatcagtatgcaggctgaagaatacctctactacaagcacctgaacggggatgtgccctataataaccttctcattgaaatgttgcatgccaaaagagcataagttacaacccctaggagctctgctttcaaaacaaaaagagattgggggagtggggagggggaagaagaacaggaagaaaaaaagtactctgaactgctccaagtaacgctaattaaaaacttgctttaaagatattgaatttaaaaaggcataataatcaaatacttaatagcaaataaatgatgtatcagggtatttgtattgcaaactgtgaatcaaaggcttcacagccccagaggattccatataaaagacattgtaatggagtggattgaactcacagatggataccaacacggtcagaagaaaaacggacagaacggttcttgtatatttaaactgatctccactatgaagaaatttaggaactaatcttattaattaggcttatacagcgggggatttgagcttacaggattcctccatggtaaagctgaactgaaacaattctcaagaatgcatcagctgtacctacaatagcccctccctcttcctttgaaggccccagcacctctgccctgtggtcaccgaatctgtactaaggacctgtgttcagccacacccagtggtagctccaccaaatcatgaacagcctaattttgagtgtctgtgtcttagacctgcaaacagctaataggaaattctattaatatgttagcttgccattttaaatatgttctgagggttgttttgtctcgtgttcatgatgttaagaaaatgcaggcagtatccctcatcttatgtaagtgttaattaatattaagggaaatgactacaaactttcaaagcaaatgctccatagctaaagcaacttagaccttatttctgctactgttgctgaaatgtggctttggcattgttggatttcataaaaaatttctggcaggaagtcttgttagtatacatcagtctttttcatcatccaagtttgtagttcatttaaaaatacaacattaaacacattttgctaggatgtcaaatagtcacagttctaagtagttggaaacaaaattgacgcatgttaatctatgcaaagagaaaggaaaggatgaggtgatgtattgactcaaggttcattcttgctgcaattgaacatcctcaagagttgggatggaaatggtgatttttacatgtgtcctggaaagatattaaagtaattcaaatcttccccaaaggggaaaggaagagagtgatactgacctttttaagtcatagaccaaagtctgctgtagaacaaatatgggaggacaaagaatcgcaaattcttcaaatgactattatcagtattattaacatgcgatgccacaggtatgaaagtcttgccttatttcacaattttaaaaggtagctgtgcagatgtggatcaacatttgtttaaaataaagtattaatactttaaagtcaaataagatatagtgtttacattctttaggtcctgaggggcagggggatctgtgatataacaaaatagcaaaagcggtaatttccttaatgttatttttctgattggtaattatttttaacagtacttaattattctatgtcgtgagacactaaaatcaaaaacgggaatctcatttagactttaatttttttgagattatcggcggcacaatcactttgtagaaactgtaaaaaataaaagtatctcctagtcccttaattttttcataaatatttctggcttttgagtagtgtatttatattgtatatcatactttcaactgtagacaattatgatgctaatttattgtttcttggtttcacctttgtataagatatagccaagactgaagaaaccaaatatatgtgtttactgtagcatgtcttcaaattagtggaacttagttcagggacatagaagagtcttaatgaattaaaatcattcacttgattaaatgtctgtaaatcttcatcattcctactgtagtttatttaatatctattgtaaattatgtgacttgtagcttcctctggttttcaagtaaactcaacaaggtggagtcttacctggttttcctttccaagcattgtaaattgtataccaaagatattagttattacttctgtgtgtacaaagaggattattttattatgtttattaatcacctctaatactcatccacatgaagggtacacattaggtaagctgggcgttgactcatgcgcagtctcagtcacccgtgttatcttcgtggctcaaaggacaatgcaaaatcgccgatcagagctcatacccaaagcattacagagaacagcagcatcattgccctccccagctgaaaaacaagttggctagaagatacatggagaggaatggtgtggtcaacagttaatgaaacggttctatcatgcatgtgtaatgtggatggagacaattataagatttgactataactatttggagggtctttaacattgccaaaaaaacaaatatgttgatttttattttattttattttttattttaagaggcgggatcttgatctcacatgttgcccaggctggccttgaactcctgggctcaagcattcctcctgcctcagcctcccccatagctgggactaggggtgcatgccagcatacctggctacgttgactcttaaaatctatgttctcttattttaaagatacagtgctccccactgaaaattaaacctaaaaaatgtcacatattggtatgttgttaacctggtagattaaatcatgagaatgattagaaagacgggcaacacagcgggttacatccacactgctgatcacaccaacgacaggagctgataagcaagaaagcgtcacagccagcgtctgttcacccaaggttgacaagtgaagtttctctaatgttgattgttagccgatttgtaacctggcatttacttagcaactgccttatcaattacaggatttgccggtaaaagcagactcaaatataaaggtttttggcttaacttggtttattatagttgctctatgtttgtaaacagacaatctctaatgtctgattatttgtatcacagatctgcagctgccttggacttgaatccatgcaatgtttagagtgtgaagtcagttacttgttgatgttttcttactgtatcaatgaaatacatattgtcatgtcagttcttgccaggaacttctcaacaaaatggaattttttttttcagtatttcaataaatattgatatgcccagcctgataattttt

SEQ ID NO: 160993 - DNA, 1846 bp, Homo sapiens
  Payload ID: 11449
  Gene Symbol: NR6A1
  Gene Name: nuclear receptor subfamily 6, group A, member 1
  Uniprot ID: Q15406
  ENST ID: ENST00000344523
  CDS Start-End: 169-1608
ggggcgcggagcggcgcggagccgggcggctcggggcccagagagagccgcggccgggagctcgcgggctcctgacaacctcctcccctcggcggacgacgaccacggcgactagggcgccggtcatggcggagcaacaaacccggcgcggaccctaggcaccaccgcatggagcgggacgaaccgccgcctagcggagggggaggcggcgggggctcggcggggttcctggagcctcccgccgcgctccctccgccgccgcgcaacggtttctgtcaggatgaattggcagagcttgacccaggcactatttctgtttcagatgatcgggctgaacaacgaacctgtctcatttgtggggaccgcgctacaggcttgcactatgggatcatctcctgtgagggctgcaaagggtttttcaagcggagcatttgcaacaaacgggtatatcgatgcagtcgtgacaagaactgtgtcatgtctcggaagcagaggaacaggtgccagtactgccgcctgctcaaatgcctccagatggggatgaaccggaaggctatcagagaagatggcatgcctggaggccggaataagagcattgggccagtccagatatcggaagaagaaatcgaaaggatcatgtctgggcaggagtttgaggaagaggccaatcactggagcaaccatggtgatagtgaccacagttcccctgggaacagggcttcggagagcaaccagccctcaccaggctccacactgtcttccaggtctgtggaactgaatggattcatggccttcagggaacagtacatgggaatgtctgtgcctccacattaccaatatataccgcacctttttagctattctggccactcaccacttctgccccaacaagctcgcagcctggatccccagtcatacagtctgattcaccagctgttatcagccgaggacctggaaccattgggcacgcccatgttgattgaagatggatacgctgtgacacaggcagaactatttgccctgctttgccgcctggccgacgagctgctctttaggcagattgcctggatcaagaaactgcctttcttctgcgagctctcaatcaaggattacacgtgcctcttgagctctacgtggcaggagctaatcctgctgtcttccctcaccgtttacagcaagcagatctttggggaactggctgatgtcactgccaagtactcgccctccgatgaagaactacacagatttagtgatgaagggatggaggtgatcgagcggctcatctacctctatcacaagttccatcagctaaaggtcagcaacgaggagtatgcttgcatgaaagcaattaacttcctaaatcaagatatcaggggtctgaccagtgcctcacagctggaacaattgaataaacgatactggtacatttgccaggattttactgaatataaatacacacatcagccgaaccgctttcctgatctcatgatgtgcttacctgagattcgatatattgcaggaaagatggtgaatgtgcccctggagcagctgcccctcctctttaaggtggtgctgcattcctgcaagaccagtgtgggcaaggaatgacctgttccaggcgccctcctcaggccaaccacagcgtcttgggtgggcaggacaggctctggagggaaaagccagagagaccaagatggaggctgtggagcagcatttcccgttgcctccatagcaagaagagtttttgtttgtttgtctgtttttttaacctcatttttctatatatttatttcacgacagagttgaatgtatggccttcaacatgatgcacatgcttttgtgtgaa

SEQ ID NO: 160994 - DNA, 1890 bp, Homo sapiens
  Payload ID: 11449
  Gene Symbol: NR6A1
  Gene Name: nuclear receptor subfamily 6, group A, member 1
  Uniprot ID: Q15406
  ENST ID: ENST00000373584
  CDS Start-End: 179-1609
gcggcgcggaggggcgcggagcggcgcggagccgggcggctcggggcccagagagagccgcggccgggagctcgcgggctcctgacaacctcctcccctcggcggacgacgaccacggcgactagggcgccggtcatggcggagcaacaaacccggcgcggaccctaggcaccaccgcatggagcgggacgaaccgccgcctagcggagggggaggcggcgggggctcggcggggttcctggagcctcccgccgcgctccctccgccgccgcgcaacggtttctgtcaggatgaattggcagagcttgacccaggcactaatgatcgggctgaacaacgaacctgtctcatttgtggggaccgcgctacaggcttgcactatgggatcatctcctgtgagggctgcaaagggtttttcaagcggagcatttgcaacaaacgggtatatcgatgcagtcgtgacaagaactgtgtcatgtctcggaagcagaggaacaggtgccagtactgccgcctgctcaaatgcctccagatggggatgaaccggaaggctatcagagaagatggcatgcctggaggccggaataagagcattgggccagtccagatatcggaagaagaaatcgaaaggatcatgtctgggcaggagtttgaggaagaggccaatcactggagcaaccatggtgatagtgaccacagttcccctgggaacagggcttcggagagcaaccagccctcaccaggctccacactgtcttccagtaggtctgtggaactgaatggattcatggccttcagggaacagtacatgggaatgtctgtgcctccacattaccaatatataccgcacctttttagctattctggccactcaccacttctgccccaacaagctcgcagcctggatccccagtcatacagtctgattcaccagctgttatcagccgaggacctggaaccattgggcacgcccatgttgattgaagatggatacgctgtgacacaggcagaactatttgccctgctttgccgcctggccgacgagctgctctttaggcagattgcctggatcaagaaactgcctttcttctgcgagctctcaatcaaggattacacgtgcctcttgagctctacgtggcaggagctaatcctgctgtcttccctcaccgtttacagcaagcagatctttggggaactggctgatgtcactgccaagtactcgccctccgatgaagaactacacagatttagtgatgaagggatggaggtgatcgagcggctcatctacctctatcacaagttccatcagctaaaggtcagcaacgaggagtatgcttgcatgaaagcaattaacttcctaaatcaagatatcaggggtctgaccagtgcctcacagctggaacaattgaataaacgatactggtacatttgccaggattttactgaatataaatacacacatcagccgaaccgctttcctgatctcatgatgtgcttacctgagattcgatatattgcaggaaagatggtgaatgtgcccctggagcagctgcccctcctctttaaggtggtgctgcattcctgcaagaccagtgtgggcaaggaatgacctgttccaggcgccctcctcaggccaaccacagcgtcttgggtgggcaggacaggctctggagggaaaagccagagagaccaagatggaggctgtggagcagcatttcccgttgcctccatagcaagaagagtttttgtttgtttgtctgtttttttaacctcatttttctatatatttatttcacgacagagttgaatgtatggccttcaacatgatgcacatgcttttgtgtgaatgcagccaatgcattttcttacagtttacagaatgtgaagatg

SEQ ID NO: 160995 - DNA, 1898 bp, Homo sapiens
  Payload ID: 11449
  Gene Symbol: NR6A1
  Gene Name: nuclear receptor subfamily 6, group A, member 1
  Uniprot ID: Q15406
  ENST ID: ENST00000416460
  CDS Start-End: 192-1619
gtgctgagggggcgcggcgcggaggggcgcggagcggcgcggagccgggcggctcggggcccagagagagccgcggccgggagctcgcgggctcctgacaacctcctcccctcggcggacgacgaccacggcgactagggcgccggtcatggcggagcaacaaacccggcgcggaccctaggcaccaccgcatggagcgggacgaaccgccgcctagcggagggggaggcggcgggggctcggcggggttcctggagcctcccgccgcgctccctccgccgccgcgcaacggtttctgtcaggatgaattggcagagcttgacccaggcactaatgatcgggctgaacaacgaacctgtctcatttgtggggaccgcgctacaggcttgcactatgggatcatctcctgtgagggctgcaaagggtttttcaagcggagcatttgcaacaaacgggtatatcgatgcagtcgtgacaagaactgtgtcatgtctcggaagcagaggaacaggtgccagtactgccgcctgctcaaatgcctccagatggggatgaaccggaaggctatcagagaagatggcatgcctggaggccggaataagagcattgggccagtccagatatcggaagaagaaatcgaaaggatcatgtctgggcaggagtttgaggaagaggccaatcactggagcaaccatggtgatagtgaccacagttcccctgggaacagggcttcggagagcaaccagccctcaccaggctccacactgtcttccaggtctgtggaactgaatggattcatggccttcagggaacagtacatgggaatgtctgtgcctccacattaccaatatataccgcacctttttagctattctggccactcaccacttctgccccaacaagctcgcagcctggatccccagtcatacagtctgattcaccagctgttatcagccgaggacctggaaccattgggcacgcccatgttgattgaagatggatacgctgtgacacaggcagaactatttgccctgctttgccgcctggccgacgagctgctctttaggcagattgcctggatcaagaaactgcctttcttctgcgagctctcaatcaaggattacacgtgcctcttgagctctacgtggcaggagctaatcctgctgtcttccctcaccgtttacagcaagcagatctttggggaactggctgatgtcactgccaagtactcgccctccgatgaagaactacacagatttagtgatgaagggatggaggtgatcgagcggctcatctacctctatcacaagttccatcagctaaaggtcagcaacgaggagtatgcttgcatgaaagcaattaacttcctaaatcaagatatcaggggtctgaccagtgcctcacagctggaacaattgaataaacgatactggtacatttgccaggattttactgaatataaatacacacatcagccgaaccgctttcctgatctcatgatgtgcttacctgagattcgatatattgcaggaaagatggtgaatgtgcccctggagcagctgcccctcctctttaaggtggtgctgcattcctgcaagaccagtgtgggcaaggaatgacctgttccaggcgccctcctcaggccaaccacagcgtcttgggtgggcaggacaggctctggagggaaaagccagagagaccaagatggaggctgtggagcagcatttcccgttgcctccatagcaagaagagtttttgtttgtttgtctgtttttttaacctcatttttctatatatttatttcacgacagagttgaatgtatggccttcaacatgatgcacatgcttttgtgtgaatgcagccaatgcattttcttacagtttacagaatgtgaaga

SEQ ID NO: 160996 - DNA, 7031 bp, Homo sapiens
  Payload ID: 11449
  Gene Symbol: NR6A1
  Gene Name: nuclear receptor subfamily 6, group A, member 1
  Uniprot ID: Q15406
  ENST ID: ENST00000487099
  CDS Start-End: 159-1601
gcggcgcggagccgggcggctcggggcccagagagagccgcggccgggagctcgcgggctcctgacaacctcctcccctcggcggacgacgaccacggcgactagggcgccggtcatggcggagcaacaaacccggcgcggaccctaggcaccaccgcatggagcgggacgaaccgccgcctagcggagggggaggcggcgggggctcggcggggttcctggagcctcccgccgcgctccctccgccgccgcgcaacggtttctgtcaggatgaattggcagagcttgacccaggcactatttctgtttcagatgatcgggctgaacaacgaacctgtctcatttgtggggaccgcgctacaggcttgcactatgggatcatctcctgtgagggctgcaaagggtttttcaagcggagcatttgcaacaaacgggtatatcgatgcagtcgtgacaagaactgtgtcatgtctcggaagcagaggaacaggtgccagtactgccgcctgctcaaatgcctccagatggggatgaaccggaaggctatcagagaagatggcatgcctggaggccggaataagagcattgggccagtccagatatcggaagaagaaatcgaaaggatcatgtctgggcaggagtttgaggaagaggccaatcactggagcaaccatggtgatagtgaccacagttcccctgggaacagggcttcggagagcaaccagccctcaccaggctccacactgtcttccagtaggtctgtggaactgaatggattcatggccttcagggaacagtacatgggaatgtctgtgcctccacattaccaatatataccgcacctttttagctattctggccactcaccacttctgccccaacaagctcgcagcctggatccccagtcatacagtctgattcaccagctgttatcagccgaggacctggaaccattgggcacgcccatgttgattgaagatggatacgctgtgacacaggcagaactatttgccctgctttgccgcctggccgacgagctgctctttaggcagattgcctggatcaagaaactgcctttcttctgcgagctctcaatcaaggattacacgtgcctcttgagctctacgtggcaggagctaatcctgctgtcttccctcaccgtttacagcaagcagatctttggggaactggctgatgtcactgccaagtactcgccctccgatgaagaactacacagatttagtgatgaagggatggaggtgatcgagcggctcatctacctctatcacaagttccatcagctaaaggtcagcaacgaggagtatgcttgcatgaaagcaattaacttcctaaatcaagatatcaggggtctgaccagtgcctcacagctggaacaattgaataaacgatactggtacatttgccaggattttactgaatataaatacacacatcagccgaaccgctttcctgatctcatgatgtgcttacctgagattcgatatattgcaggaaagatggtgaatgtgcccctggagcagctgcccctcctctttaaggtggtgctgcattcctgcaagaccagtgtgggcaaggaatgacctgttccaggcgccctcctcaggccaaccacagcgtcttgggtgggcaggacaggctctggagggaaaagccagagagaccaagatggaggctgtggagcagcatttcccgttgcctccatagcaagaagagtttttgtttgtttgtctgtttttttaacctcatttttctatatatttatttcacgacagagttgaatgtatggccttcaacatgatgcacatgcttttgtgtgaatgcagccaatgcattttcttacagtttacagaatgtgaagatgtttaatgttacagtgttgtcattgtttagaaatagttcttttgtattttgagggagagggtgggatggggctaagatgactatttccataatgttgacaaagatgactacctcaatggaaatggggggtgtggccatccctactttttccacattttctcagcagactcatacatttgtctgtcagagagcaaattgccttttttagccacagaattgccagataaaacggcacactgtaagggggcaaagtgttgttaggagattcactaagcaaggttggtgagacggcaacagggtaggaggtgaggattgagccacgtcctttccttggaaagcgtgaaaattaagagagtagggcacagtgaccatatttaaggcaggtgtccttccacccaacaagtcctaagggcagaagaatttctgttctcacaccttgctgccccccttacccctgcaccaccatcattgtctaccactgcgaactttccatctaggcaaagtcctggcaatcacttgatccacaggactcgcctcccagctccctcggggcccccagctacctagtttccttacctggatctcctgaggcccaccttcctccttcccactcccttacacatttgacttcctattggccctttgaaaaaccagctgagcagaatgccatgttctgaagcctggtgcccactactgatttattctcctttcaccttgttttcttcaaagggtagtagggcaaggccagactgcaaaaagaatagacactccccttttgaaatctgttcctctcccctccccttcctaccgcaccctcaggtctaaatccgaaaacttcaggcttttttaaacaatgagaaggaccattcacctgtctgctgaccagaaatgttgcccctaagttcttctccaagttctccttttctctccagagtgagaccagttttcctcagggacccaggacacaaagcccaaggcccagagtggctcagctgccccttacttcagcagtggactggccagccaaggcctggagggctggagccagaagcacctggaagggaaggggggctttaaactacctcaggttcctaatggcccggctgctacctctgcagacatggcctggactccttgacctctcactacctgccccaccttatcccaggacgtgttccttaccctcttgactttggccagcgctacaccaggtctgtctttgaactctttcaggtgcttgtcctgcctacacccaggtatctttcacagccagtgtggcaagcagaccacttagttggctgcatgcctgggtaggttggaagggcccacggcaccttcttctgcctatttagtcaaaggctgtttgctgtctcctcaactcaacctagtaaagctacccaggagggcaccacgtcgtgtgcatactgggtagtccatgtctgattgtaattgtttctttctggtgaaatgttacgggtaccagcagagtgatgattttggcccttgatggatctaaaactcggaacattactcctcaatgccgtttccccagttgctctgagaaggaagagacatgttcctcaggaaaagctccagctagcatgtttttcacgtcagtgggaagattcttgtgtgttcgtgtgtatctgtttatttctaagttcacgatacttgttcccctgaattttatttaaccaactagatcacattctttggccacaggtcagactctgagctgctttcctccagatcgggaaggagacacatatcacagatgccttctctaagacagctcctgtgtacagcatcgttctttgctgaggcctctatctgtccaattattatttttgaaattgcttttcaaattaaacattttacccgttgtgttgggtgtcaaaagaaattgctctctgatgaggcaagaacatgtctctccaacaacgtagtattgaacagagcaagttgttaatttgtggagtaggggaaaggttctgcaagttgccattgtacaaatccagttttacaaatgtttgcagcagattccacagaacaaagagcccattcattgccgagagccctgcagaatctcagagcaaagtggctgtgtgttccgagccggagcctgacctgtggaccgtctttaatgtcttctgcaccagtccttttatgacgtgggctttttttaaacagggtaaagtgaatgtgttgcattgcaaactcaggtattatgaggagaaggtaggagtgtagctagcagcgtggagacattaggtcagccactagatgtatttgtgaatttggtttgaaggacacggagaaaggttggaggggaggtttggtgtgtttgttttttgctttcttccccataatgtttggttaacaggtagcctttttgcgagtggaaggagagaaaagttgtgcatgttttctctaatttctctttctgccctctctctgatccccaaccaccaaaagcactcactttgagtgaggatttttttttttttttttttttttttttttgaggcggagtctcgctctgtcgctcaggctggagtgcagtggtgcgatcttggctcactgcaagctccgcctcccgggttcatgccattctcctgcctcagcctcctgagtagctgggactacaggcgcccgccaccacacccggctaactttttttgtatttttagtagaaacattgtttcaccacgttagccaggatggtctccatctcctgacctcgtgatccgcctgcctcggcctcccaaagtgctgggattacaggcgtgagccactgcacccagccgagtgagaatttttatgccataaaaatacgactctgaaagctacatggaaaaggagaatcccacctccttgcactacattgaaacatgcaagcctttccctccctctcctttttgatgttttcttgtcccaagacaaaagtttggcatcttggaacttattcatgctctctggctgcctttgtagacttttggagtcctttgcaaggtttggtggtctcgtcgttaatctggagaaattccccagaatctgtctcaaagcgctcaacctggctcagaggacacccagcccctatgccccactcacaagagaggtgggcaagcccccagggataggaggaagtaagcaggatcctccctgtcctgtttcccagaaccagagcaaggaatggggaatcctaagggtttctgtggcatcactgaatgtcacccactccacatcaacctgcctctcacctgccaccctttttcagggaggtgagtacctgccatggtcactgttaccagatccttaaaatcctgggctctgagctaggtgcattgctctgttacccatttcctacatttgtttgtttgttcttgatttcctgggggaatgggactgatggagacagacaaacccactgtgggcagcatctaagccatgtccaaggttggtcgaattaagggaaccctggcctctcagcaggacagaaagctgagctgtggttccaggccctcctctctgggcccctggtgtgtatcttttttccttgttgcttttgaaatttttgcaattattttaagaatccagtctttcagaccagcccttttattaagctttgaatttttaattgatttttttaaagtaaaaaaaaaaaaaacccaaaaaacaaacaaaatttaacaaaaaaatccgctactcttactcccctgcctccccctaccccagcccatgagagttcccttgcactcccctctgcctttgcaactgatcatcctccctttctccttggcttgaagcatctatgtccagtatctgtgaaatgatgttttatctgtgtgtcaggatgagaaacggcagtcattccaccaagtgttggaaactggttagcctggagacaagggtttctggggccacagctcagggatgtgtatttaattacaggatccccagaaactcctctctaggctgccacagcaacattttttctgggcttgggagccatacctgaactgtttcctccaaggcgggaactccagagagcctgccaagtctggagcaagctggggcttctgctttggccagacctgggccaccatgagacttgaaggcttctagctgtcctacgacacgagccacggtggccctgcctctccccgctcatagaagcctggtccctctgtctagcccagttcccatctagcatccgtcttctgggcctgaagccctaaatggaccacagcctgcacaggaatcaactgtaggctcaaagggaggcggtgagtaaggtcagagcctgctccaagcccaagaacaaaagttgtgttatgggtggaggctagtcccccagatctagccctgccgtctttgccctttaatgaccattgttttctttctctaaaatgtcttgtaataggtgataatgttgttgattcaaatttccatgaaaaagaaaaaaaaaactacctcttaagcgacatcctggtcgattcctctctgaggaatcctgtgggaaaagaatactgtagctcctgctctgtttacatgtttctgtcgggaaagaagccccgcctgccctggggtgttggtgtttttgtctgtgttgccatcccaggtctgccataggggctggtggctgcattgtgatgtctgggctgtgtctggggattccttcccacctacccagccagggactagtcacccccctgaagaggcctccatttccttcctgtgctccagggcatagggagcaccactcccacagacaccacctttaagggctctagtggcacacacatccacgagcctacccccaggttacctgccctaggtccacctccacccacagtcctgtgtgtaggaatcgaggaaacgggatgtccctgagcccttgtctccaaagggccggccaagggctgcccgccagcctgactccatcaaccctccatgaccaaatgatagctggcgggctctgcaggctacccaggccctctgctacctcccaccctgccagctggcaagggatgggccctgttctgtgaattgactacctgtggaaatgtgaccaattagtgtgaaatgcatgtttagcaagtgttaggtactgtatttgaaccaataaatgtgaatccttctgcacatgg

SEQ ID NO: 160997 - DNA, 742 bp, Homo sapiens
  Payload ID: 11449
  Gene Symbol: NR6A1
  Gene Name: nuclear receptor subfamily 6, group A, member 1
  ENST ID: ENST00000475178
  CDS Start-End: 45-742
catggctgcaatagaacttttcagcagactacaagaagcatgaaatggagacatgggaagtttctgtttcagatgatcgggctgaacaacgaacctgtctcatttgtggggaccgcgctacaggcttgcactatgggatcatctcctgtgagggctgcaaagggtttttcaagcggagcatttgcaacaaacgggtatatcgatgcagtcgtgacaagaactgtgtcatgtctcggaagcagaggaacaggtgccagtactgccgcctgctcaaatgcctccagatggggatgaaccggaaggctatcagagaagatggcatgcctggaggccggaataagagcattgggccagtccagatatcggaagaagaaatcgaaaggatcatgtctgggcaggagtttgaggaagaggccaatcactggagcaaccatggtgatagtgaccacagttcccctgggaacagggcttcggagagcaaccagccctcaccaggctccacactgtcttccagtaggtctgtggaactgaatggattcatggccttcagggaacagtacatgggaatgtctgtgcctccacattaccaatatataccgcacctttttagctattctggccactcaccacttctgccccaacaagctcgcagcctggatccccagtcatacagtctgattcaccagctgttatcagccgaggacctggaaccattgggcacgcccatgttgattgaagatgg

SEQ ID NO: 160998 - DNA, 2424 bp, Homo sapiens
  Payload ID: 11450
  Gene Symbol: NRF1
  Gene Name: nuclear respiratory factor 1
  Uniprot ID: Q16656
  ENST ID: ENST00000223190
  CDS Start-End: 79-1590
gaggctgcgaggagccggcgcggtcgcagtctccacggcgcaggcccacggtagcgcagccgctctgagtagaacttcatggaggaacacggagtgacccaaaccgaacatatggctaccatagaagcacatgcagtggcccagcaagtgcagcaggtccatgtggctacttacaccgagcatagtatgctgagtgctgatgaagactcgccttcttctcccgaggacacctcttacgatgactcagatatactcaactccacagcagctgatgaggtgacagctcatctggcagctgcaggtcctgtgggaatggccgctgctgctgctgtggcaacaggaaagaaacggaaacggcctcatgtatttgagtctaatccatctatccggaagaggcaacaaacacgtttgcttcggaaacttcgagccacgttagatgaatatactactcgtgtgggacagcaagctattgtcctctgtatctcaccctccaaacctaaccctgtctttaaagtgtttggtgcagcacctttggagaatgtggtgcgtaagtacaagagcatgatcctggaagacctggagtctgctctggcagaacacgcccctgcgccacaggaggttaactcagaactgccgcctctcaccatcgacggaattccagtctctgtggacaaaatgacccaggcccagcttcgggcatttatcccagagatgctcaagtactctacaggtcggggaaaaccaggctgggggaaagaaagctgcaagcccatctggtggcctgaagatatcccctgggcaaatgtccggagtgatgtccgcacagaagagcaaaagcagagggtttcatggacccaggcactacggaccatagttaaaaactgttataaacagcatgggcgggaagaccttttgtatgcctttgaagatcagcaaacgcaaacacaggccacagccacacatagtatagctcatcttgtaccatcacagactgtagtccagacttttagtaaccctgatggcactgtctcacttatccaggttggtacgggggcaacagtagccacattggctgatgcttcagaattgccaaccacggtcaccgttgcccaagtgaattattctgccgtggctgatggagaggtggaacaaaattgggccacgttacagggaggtgagatgaccatccagacgacgcaagcatcagaggccacccaggcggtggcatcgttggcagaggccgcagtggcagcttctcaggagatgcagcagggagctacagtcactatggcgcttaacagcgaagctgccgcccatgctgtcgccaccctggctgaggccaccttacaaggtgggggacagatcgtcttgtctggggaaaccgcagcagccgtcggagcacttactggagtccaagatgctaatggcctggtccagatccctgtgagcatgtaccagactgtggtgaccagcctcgcccagggcaacggaccagtgcaggtggccatggcccctgtgaccaccaggatatcagacagcgcagtcaccatggacggccaagctgtggaggtggtgacattggaacagtgacatacagccatattatggcatcgttttctagtctacttcaaaattttttacacgtttgcagaggtgcaatcaaatggaattaagtctctcgactttggaaggaaagttttgttaacctttttttttttaaaaggaagaaagcggattttggaattgcattttttaaagcaccactcttgattttctgggattggtgaagaaactgcattgtcaatttcactgtcccaaaaaagccaaattgtggcaggacttctttctgcggaaatgtgtgtgtatacttatgtgtgtgtatgtgtgagtgtgaatatatgtatatgtgtacatatggacatacacatttacatatatataaagtatatatatacatatatatatatatatatgtatgaaacccgcatggaattatctgtatgaaatcaaggtgcgctgtggaaacaataattcacccagtttagtgggtggtagggtacgtggccagacacagtcacccagtttttgttcataccagggtcatgcgttgagctactgacaaactcaggcggaggtgaccatgcccttcaccaaagctgcctcccagtggccacacagaactctccctgctggactcacctgaggaaagaggctccagcatggggtgggtcagagatgtgcttgcaaggtccagggactgcgtggtctgccagctgagatgctcctcgggctggcccaggtgctgaccttgccacaggcagatgaatgtcttgaaagctcccgggcctcagcctcccatctcctctccttcccaggaatccttgatctcatgactattaaaatgttgctctggttttaaggtca

SEQ ID NO: 160999 - DNA, 2481 bp, Homo sapiens
  Payload ID: 11450
  Gene Symbol: NRF1
  Gene Name: nuclear respiratory factor 1
  Uniprot ID: Q16656
  ENST ID: ENST00000311967
  CDS Start-End: 79-1647
gaggctgcgaggagccggcgcggtcgcagtctccacggcgcaggcccacggtagcgcagccgctctgagtagaacttcatggaggaacacggagtgacccaaaccgaacatatggctaccatagaagcacatgcagtggcccagcaagtgcagcaggtccatgtggctacttacaccgagcatagtatgctgagtgctgatgaagactcgccttcttctcccgaggacacctcttacgatgactcagatatactcaactccacagcagctgatgaggtgacagctcatctggcagctgcaggtcctgtgggaatggccgctgctgctgctgtggcaacaggaaagaaacggaaacggcctcatgtatttgagtctaatccatctatccggaagaggcaacaaacacgtttgcttcggaaacttcgagccacgttagatgaatatactactcgtgtgggacagcaagctattgtcctctgtatctcaccctccaaacctaaccctgtctttaaagtgtttggtgcagcacctttggagaatgtggtgcgtaagtacaagagcatgatcctggaagacctggagtctgctctggcagaacacgcccctgcgccacaggaggttaactcagaactgccgcctctcaccatcgacggaattccagtctctgtggacaaaatgacccaggcccagcttcgggcatttatcccagagatgctcaagtactctacaggtcggggaaaaccaggctgggggaaagaaagctgcaagcccatctggtggcctgaagatatcccctgggcaaatgtccggagtgatgtccgcacagaagagcaaaagcagagggtttcatggacccaggcactacggaccatagttaaaaactgttataaacagcatgggcgggaagaccttttgtatgcctttgaagatcagcaaacgcaaacacaggccacagccacacatagtatagctcatcttgtaccatcacagactgtagtccagacttttagtaaccctgatggcactgtctcacttatccaggttggtacgggggcaacagtagccacattggctgatgcttcagaattgccaaccacggtcaccgttgcccaagtgaattattctgccgtggctgatggagaggtggaacaaaattgggccacgttacagggaggtgagatgaccatccagacgacgcaagcatcagaggccacccaggcggtggcatcgttggcagaggccgcagtggcagcttctcaggagatgcagcagggagctacagtcactatggcgcttaacagcgaagctgccgcccatgctgtcgccaccctggctgaggccaccttacaaggtgggggacagatcgtcttgtctggggaaaccgcagcagccgtcggagcacttactggagtccaagatgctaatggcctctttatggcagatcgtgcaggtcgcaagtggatcctgactgacaaagccacaggcctggtccagatccctgtgagcatgtaccagactgtggtgaccagcctcgcccagggcaacggaccagtgcaggtggccatggcccctgtgaccaccaggatatcagacagcgcagtcaccatggacggccaagctgtggaggtggtgacattggaacagtgacatacagccatattatggcatcgttttctagtctacttcaaaattttttacacgtttgcagaggtgcaatcaaatggaattaagtctctcgactttggaaggaaagttttgttaacctttttttttttaaaaggaagaaagcggattttggaattgcattttttaaagcaccactcttgattttctgggattggtgaagaaactgcattgtcaatttcactgtcccaaaaaagccaaattgtggcaggacttctttctgcggaaatgtgtgtgtatacttatgtgtgtgtatgtgtgagtgtgaatatatgtatatgtgtacatatggacatacacatttacatatatataaagtatatatatacatatatatatatatatatgtatgaaacccgcatggaattatctgtatgaaatcaaggtgcgctgtggaaacaataattcacccagtttagtgggtggtagggtacgtggccagacacagtcacccagtttttgttcataccagggtcatgcgttgagctactgacaaactcaggcggaggtgaccatgcccttcaccaaagctgcctcccagtggccacacagaactctccctgctggactcacctgaggaaagaggctccagcatggggtgggtcagagatgtgcttgcaaggtccagggactgcgtggtctgccagctgagatgctcctcgggctggcccaggtgctgaccttgccacaggcagatgaatgtcttgaaagctcccgggcctcagcctcccatctcctctccttcccaggaatccttgatctcatgactattaaaatgttgctctggttttaaggtca

SEQ ID NO: 161000 - DNA, 3568 bp, Homo sapiens
  Payload ID: 11450
  Gene Symbol: NRF1
  Gene Name: nuclear respiratory factor 1
  Uniprot ID: Q16656
  ENST ID: ENST00000353868
  CDS Start-End: 101-1669
ttcctggtccagaactttacacagaaaaggtgctcaaaggatatttgtttaatgaatgtggtatgctgacatttaaacaggacaaaacttgtagaacttcatggaggaacacggagtgacccaaaccgaacatatggctaccatagaagcacatgcagtggcccagcaagtgcagcaggtccatgtggctacttacaccgagcatagtatgctgagtgctgatgaagactcgccttcttctcccgaggacacctcttacgatgactcagatatactcaactccacagcagctgatgaggtgacagctcatctggcagctgcaggtcctgtgggaatggccgctgctgctgctgtggcaacaggaaagaaacggaaacggcctcatgtatttgagtctaatccatctatccggaagaggcaacaaacacgtttgcttcggaaacttcgagccacgttagatgaatatactactcgtgtgggacagcaagctattgtcctctgtatctcaccctccaaacctaaccctgtctttaaagtgtttggtgcagcacctttggagaatgtggtgcgtaagtacaagagcatgatcctggaagacctggagtctgctctggcagaacacgcccctgcgccacaggaggttaactcagaactgccgcctctcaccatcgacggaattccagtctctgtggacaaaatgacccaggcccagcttcgggcatttatcccagagatgctcaagtactctacaggtcggggaaaaccaggctgggggaaagaaagctgcaagcccatctggtggcctgaagatatcccctgggcaaatgtccggagtgatgtccgcacagaagagcaaaagcagagggtttcatggacccaggcactacggaccatagttaaaaactgttataaacagcatgggcgggaagaccttttgtatgcctttgaagatcagcaaacgcaaacacaggccacagccacacatagtatagctcatcttgtaccatcacagactgtagtccagacttttagtaaccctgatggcactgtctcacttatccaggttggtacgggggcaacagtagccacattggctgatgcttcagaattgccaaccacggtcaccgttgcccaagtgaattattctgccgtggctgatggagaggtggaacaaaattgggccacgttacagggaggtgagatgaccatccagacgacgcaagcatcagaggccacccaggcggtggcatcgttggcagaggccgcagtggcagcttctcaggagatgcagcagggagctacagtcactatggcgcttaacagcgaagctgccgcccatgctgtcgccaccctggctgaggccaccttacaaggtgggggacagatcgtcttgtctggggaaaccgcagcagccgtcggagcacttactggagtccaagatgctaatggcctctttatggcagatcgtgcaggtcgcaagtggatcctgactgacaaagccacaggcctggtccagatccctgtgagcatgtaccagactgtggtgaccagcctcgcccagggcaacggaccagtgcaggtggccatggcccctgtgaccaccaggatatcagacagcgcagtcaccatggacggccaagctgtggaggtggtgacattggaacagtgacatacagccatattatggcatcgttttctagtctacttcaaaattttttacacgtttgcagaggtgcaatcaaatggaattaagtctctcgactttggaaggaaagttttgttaacctttttttttttaaaaggaagaaagcggattttggaattgcattttttaaagcaccactcttgattttctgggattggtgaagaaactgcattgtcaatttcactgtcccaaaaaagccaaattgtggcaggacttctttctgcggaaatgtgtgtgtatacttatgtgtgtgtatgtgtgagtgtgaatatatgtatatgtgtacatatggacatacacatttacatatatataaagtatatatatacatatatatatatatatatgtatgaaacccgcatggaattatctgtatgaaatcaaggtgcgctgtggaaacaataattcacccagtttagtgggtggtagggtacgtggccagacacagtcacccagtttttgttcataccagggtcatgcgttgagctactgacaaactcaggcggaggtgaccatgcccttcaccaaagctgcctcccagtggccacacagaactctccctgctggactcacctgaggaaagaggctccagcatggggtgggtcagagatgtgcttgcaaggtccagggactgcgtggtctgccagctgagatgctcctcgggctggcccaggtgctgaccttgccacaggcagatgaatgtcttgaaagctcccgggcctcagcctcccatctcctctccttcccaggaatccttgatctcatgactattaaaatgttgctctggttttaaggtcagtcctgaattgctcgtatatatgaactgaaggtaaccgaagtattaggggtttgaggagtgcgtgcgtgtaagtgtgcttgtgtgtgtgcgtgcatggtgggggagaggatgggaagggggcgggggcagtggaagggaaaggaaggaaagaaaaatcgtcctagaccaggatacacccgtgggagcaattttctctactgtctgtagcttcacagaggaggcgctggaatgaacaagaagagacatctggtctgtggccacagcaccctgaacgcccctgatcttgtgtgatcttggaagctaagcttggttgggcccggtcagtacgcggaagggaagaagggacacctggccatagaaaacagctgagggtgtttgctgtgttcctggatcaggccctgcttcagaagggactcctggaggcccatgttccttgatgcaacctcgtggcccaggccgggagcagcttgcctcctcagaggtgttgactatctgggtgttcttggtaaccgttaactctgtctttctcagctgcaagccctgagtctccagtagctgaattcacctgacttttcaacaggccaaatctctgaaccttgagtacagggacagctcctcctccctcctcccagctctccccatgtgtgtgatggtgtatttaatgtgtttttttaatgcgacattaaaagattctccacgtcttgctcaacctttgagagaagtttcagattcttgtatttgcttgttttatataaaactatctaatgttctttatatgttcttttctgtacgtaatggggggaggggagggaaatttacatataaatagtcctagttctacaatttgttatttttttaattattattttttatcgtcattgtgaagttgtccagggactttaaagtccatgttcctttgtggtgaaataacctccaaatagtttgagaagttgccaagacgaagaaaaaagcaaaaccccagtagcagagcatggattctgtgttgtttcccattctgtctttgactgcctcattcaataaatagttaaaaatgtggcaacagg

SEQ ID NO: 161001 - DNA, 3523 bp, Homo sapiens
  Payload ID: 11450
  Gene Symbol: NRF1
  Gene Name: nuclear respiratory factor 1
  Uniprot ID: Q16656
  ENST ID: ENST00000393230
  CDS Start-End: 111-1622
cccctttcagttcctggtccagaactttacacagaaaaggtgctcaaaggatatttgtttaatgaatgtggtatgctgacatttaaacaggacaaaacttgtagaacttcatggaggaacacggagtgacccaaaccgaacatatggctaccatagaagcacatgcagtggcccagcaagtgcagcaggtccatgtggctacttacaccgagcatagtatgctgagtgctgatgaagactcgccttcttctcccgaggacacctcttacgatgactcagatatactcaactccacagcagctgatgaggtgacagctcatctggcagctgcaggtcctgtgggaatggccgctgctgctgctgtggcaacaggaaagaaacggaaacggcctcatgtatttgagtctaatccatctatccggaagaggcaacaaacacgtttgcttcggaaacttcgagccacgttagatgaatatactactcgtgtgggacagcaagctattgtcctctgtatctcaccctccaaacctaaccctgtctttaaagtgtttggtgcagcacctttggagaatgtggtgcgtaagtacaagagcatgatcctggaagacctggagtctgctctggcagaacacgcccctgcgccacaggaggttaactcagaactgccgcctctcaccatcgacggaattccagtctctgtggacaaaatgacccaggcccagcttcgggcatttatcccagagatgctcaagtactctacaggtcggggaaaaccaggctgggggaaagaaagctgcaagcccatctggtggcctgaagatatcccctgggcaaatgtccggagtgatgtccgcacagaagagcaaaagcagagggtttcatggacccaggcactacggaccatagttaaaaactgttataaacagcatgggcgggaagaccttttgtatgcctttgaagatcagcaaacgcaaacacaggccacagccacacatagtatagctcatcttgtaccatcacagactgtagtccagacttttagtaaccctgatggcactgtctcacttatccaggttggtacgggggcaacagtagccacattggctgatgcttcagaattgccaaccacggtcaccgttgcccaagtgaattattctgccgtggctgatggagaggtggaacaaaattgggccacgttacagggaggtgagatgaccatccagacgacgcaagcatcagaggccacccaggcggtggcatcgttggcagaggccgcagtggcagcttctcaggagatgcagcagggagctacagtcactatggcgcttaacagcgaagctgccgcccatgctgtcgccaccctggctgaggccaccttacaaggtgggggacagatcgtcttgtctggggaaaccgcagcagccgtcggagcacttactggagtccaagatgctaatggcctggtccagatccctgtgagcatgtaccagactgtggtgaccagcctcgcccagggcaacggaccagtgcaggtggccatggcccctgtgaccaccaggatatcagacagcgcagtcaccatggacggccaagctgtggaggtggtgacattggaacagtgacatacagccatattatggcatcgttttctagtctacttcaaaattttttacacgtttgcagaggtgcaatcaaatggaattaagtctctcgactttggaaggaaagttttgttaacctttttttttttaaaaggaagaaagcggattttggaattgcattttttaaagcaccactcttgattttctgggattggtgaagaaactgcattgtcaatttcactgtcccaaaaaagccaaattgtggcaggacttctttctgcggaaatgtgtgtgtatacttatgtgtgtgtatgtgtgagtgtgaatatatgtatatgtgtacatatggacatacacatttacatatatataaagtatatatatacatatatatatatatatatgtatgaaacccgcatggaattatctgtatgaaatcaaggtgcgctgtggaaacaataattcacccagtttagtgggtggtagggtacgtggccagacacagtcacccagtttttgttcataccagggtcatgcgttgagctactgacaaactcaggcggaggtgaccatgcccttcaccaaagctgcctcccagtggccacacagaactctccctgctggactcacctgaggaaagaggctccagcatggggtgggtcagagatgtgcttgcaaggtccagggactgcgtggtctgccagctgagatgctcctcgggctggcccaggtgctgaccttgccacaggcagatgaatgtcttgaaagctcccgggcctcagcctcccatctcctctccttcccaggaatccttgatctcatgactattaaaatgttgctctggttttaaggtcagtcctgaattgctcgtatatatgaactgaaggtaaccgaagtattaggggtttgaggagtgcgtgcgtgtaagtgtgcttgtgtgtgtgcgtgcatggtgggggagaggatgggaagggggcgggggcagtggaagggaaaggaaggaaagaaaaatcgtcctagaccaggatacacccgtgggagcaattttctctactgtctgtagcttcacagaggaggcgctggaatgaacaagaagagacatctggtctgtggccacagcaccctgaacgcccctgatcttgtgtgatcttggaagctaagcttggttgggcccggtcagtacgcggaagggaagaagggacacctggccatagaaaacagctgagggtgtttgctgtgttcctggatcaggccctgcttcagaagggactcctggaggcccatgttccttgatgcaacctcgtggcccaggccgggagcagcttgcctcctcagaggtgttgactatctgggtgttcttggtaaccgttaactctgtctttctcagctgcaagccctgagtctccagtagctgaattcacctgacttttcaacaggccaaatctctgaaccttgagtacagggacagctcctcctccctcctcccagctctccccatgtgtgtgatggtgtatttaatgtgtttttttaatgcgacattaaaagattctccacgtcttgctcaacctttgagagaagtttcagattcttgtatttgcttgttttatataaaactatctaatgttctttatatgttcttttctgtacgtaatggggggaggggagggaaatttacatataaatagtcctagttctacaatttgttatttttttaattattattttttatcgtcattgtgaagttgtccagggactttaaagtccatgttcctttgtggtgaaataacctccaaatagtttgagaagttgccaagacgaagaaaaaagcaaaaccccagtagcagagcatggattctgtgttgtttcccattctgtctttgactgcctcattcaataaatagttaaaaatgtggcaacaggaa

SEQ ID NO: 161002 - DNA, 3528 bp, Homo sapiens
  Payload ID: 11450
  Gene Symbol: NRF1
  Gene Name: nuclear respiratory factor 1
  Uniprot ID: Q16656
  ENST ID: ENST00000393232
  CDS Start-End: 118-1629
ggcggcagaagcggcagcgctcgccattgccgctggtggcaggaggctgcgaggagccggcgcggtcgcagtctccacggcgcaggcccacggtagcgcagccgctctgagaacttcatggaggaacacggagtgacccaaaccgaacatatggctaccatagaagcacatgcagtggcccagcaagtgcagcaggtccatgtggctacttacaccgagcatagtatgctgagtgctgatgaagactcgccttcttctcccgaggacacctcttacgatgactcagatatactcaactccacagcagctgatgaggtgacagctcatctggcagctgcaggtcctgtgggaatggccgctgctgctgctgtggcaacaggaaagaaacggaaacggcctcatgtatttgagtctaatccatctatccggaagaggcaacaaacacgtttgcttcggaaacttcgagccacgttagatgaatatactactcgtgtgggacagcaagctattgtcctctgtatctcaccctccaaacctaaccctgtctttaaagtgtttggtgcagcacctttggagaatgtggtgcgtaagtacaagagcatgatcctggaagacctggagtctgctctggcagaacacgcccctgcgccacaggaggttaactcagaactgccgcctctcaccatcgacggaattccagtctctgtggacaaaatgacccaggcccagcttcgggcatttatcccagagatgctcaagtactctacaggtcggggaaaaccaggctgggggaaagaaagctgcaagcccatctggtggcctgaagatatcccctgggcaaatgtccggagtgatgtccgcacagaagagcaaaagcagagggtttcatggacccaggcactacggaccatagttaaaaactgttataaacagcatgggcgggaagaccttttgtatgcctttgaagatcagcaaacgcaaacacaggccacagccacacatagtatagctcatcttgtaccatcacagactgtagtccagacttttagtaaccctgatggcactgtctcacttatccaggttggtacgggggcaacagtagccacattggctgatgcttcagaattgccaaccacggtcaccgttgcccaagtgaattattctgccgtggctgatggagaggtggaacaaaattgggccacgttacagggaggtgagatgaccatccagacgacgcaagcatcagaggccacccaggcggtggcatcgttggcagaggccgcagtggcagcttctcaggagatgcagcagggagctacagtcactatggcgcttaacagcgaagctgccgcccatgctgtcgccaccctggctgaggccaccttacaaggtgggggacagatcgtcttgtctggggaaaccgcagcagccgtcggagcacttactggagtccaagatgctaatggcctggtccagatccctgtgagcatgtaccagactgtggtgaccagcctcgcccagggcaacggaccagtgcaggtggccatggcccctgtgaccaccaggatatcagacagcgcagtcaccatggacggccaagctgtggaggtggtgacattggaacagtgacatacagccatattatggcatcgttttctagtctacttcaaaattttttacacgtttgcagaggtgcaatcaaatggaattaagtctctcgactttggaaggaaagttttgttaacctttttttttttaaaaggaagaaagcggattttggaattgcattttttaaagcaccactcttgattttctgggattggtgaagaaactgcattgtcaatttcactgtcccaaaaaagccaaattgtggcaggacttctttctgcggaaatgtgtgtgtatacttatgtgtgtgtatgtgtgagtgtgaatatatgtatatgtgtacatatggacatacacatttacatatatataaagtatatatatacatatatatatatatatatgtatgaaacccgcatggaattatctgtatgaaatcaaggtgcgctgtggaaacaataattcacccagtttagtgggtggtagggtacgtggccagacacagtcacccagtttttgttcataccagggtcatgcgttgagctactgacaaactcaggcggaggtgaccatgcccttcaccaaagctgcctcccagtggccacacagaactctccctgctggactcacctgaggaaagaggctccagcatggggtgggtcagagatgtgcttgcaaggtccagggactgcgtggtctgccagctgagatgctcctcgggctggcccaggtgctgaccttgccacaggcagatgaatgtcttgaaagctcccgggcctcagcctcccatctcctctccttcccaggaatccttgatctcatgactattaaaatgttgctctggttttaaggtcagtcctgaattgctcgtatatatgaactgaaggtaaccgaagtattaggggtttgaggagtgcgtgcgtgtaagtgtgcttgtgtgtgtgcgtgcatggtgggggagaggatgggaagggggcgggggcagtggaagggaaaggaaggaaagaaaaatcgtcctagaccaggatacacccgtgggagcaattttctctactgtctgtagcttcacagaggaggcgctggaatgaacaagaagagacatctggtctgtggccacagcaccctgaacgcccctgatcttgtgtgatcttggaagctaagcttggttgggcccggtcagtacgcggaagggaagaagggacacctggccatagaaaacagctgagggtgtttgctgtgttcctggatcaggccctgcttcagaagggactcctggaggcccatgttccttgatgcaacctcgtggcccaggccgggagcagcttgcctcctcagaggtgttgactatctgggtgttcttggtaaccgttaactctgtctttctcagctgcaagccctgagtctccagtagctgaattcacctgacttttcaacaggccaaatctctgaaccttgagtacagggacagctcctcctccctcctcccagctctccccatgtgtgtgatggtgtatttaatgtgtttttttaatgcgacattaaaagattctccacgtcttgctcaacctttgagagaagtttcagattcttgtatttgcttgttttatataaaactatctaatgttctttatatgttcttttctgtacgtaatggggggaggggagggaaatttacatataaatagtcctagttctacaatttgttatttttttaattattattttttatcgtcattgtgaagttgtccagggactttaaagtccatgttcctttgtggtgaaataacctccaaatagtttgagaagttgccaagacgaagaaaaaagcaaaaccccagtagcagagcatggattctgtgttgtttcccattctgtctttgactgcctcattcaataaatagttaaaaatgtggcaacagg

SEQ ID NO: 161003 - DNA, 814 bp, Homo sapiens
  Payload ID: 11450
  Gene Symbol: NRF1
  Gene Name: nuclear respiratory factor 1
  ENST ID: ENST00000454688
  CDS Start-End: 186-814
tggtggcaggaggctgcgaggagccggcgcggtcgcagtctccacggcgcaggcccacggtagcgcagccgctctgaggctggagtgcagtggtgtgatctcggctctctgcaacttccacatcccgggttcaagcgattctactgcctcagcctcccgagtagttgggactacagtagaacttcatggaggaacacggagtgacccaaaccgaacatatggctaccatagaagcacatgcagtggcccagcaagtgcagcaggtccatgtggctacttacaccgagcatagtatgctgagtgctgatgaagactcgccttcttctcccgaggacacctcttacgatgactcagatatactcaactccacagcagctgatgaggtgacagctcatctggcagctgcaggtcctgtgggaatggccgctgctgctgctgtggcaacaggaaagaaacggaaacggcctcatgtatttgagtctaatccatctatccggaagaggcaacaaacacgtttgcttcggaaacttcgagccacgttagatgaatatactactcgtgtgggacagcaagctattgtcctctgtatctcaccctccaaacctaaccctgtctttaaagtgtttggtgcagcacctttggagaatgtggtgcgtaagtacaagagcatgatcctggaagacctggagtctgctctggcagaacacgcccctgcgccacaggaggttaactcagaactgccgcctctcaccatcgacggaattccagtctctgtggacaaaatgacccaggcccagcttcgggcatttatccc

SEQ ID NO: 161004 - DNA, 2346 bp, Homo sapiens
  Payload ID: 11451
  Gene Symbol: NXF1
  Gene Name: nuclear RNA export factor 1
  Uniprot ID: Q9UBU9
  ENST ID: ENST00000294172
  CDS Start-End: 137-1996
cggcgcgcgacgtgctttgctgtataaatgcggtggcgcccggcgtagggacacttcggtcctgagcgcttgggagttaggttgtttgccggcgtagcggccagcgcctgagcccgcccttgatcttcgctgtggcatggcggacgaggggaagtcgtacagcgaacacgatgatgaacgcgttaatttccctcaaagaaagaagaaaggccggggtcccttccggtggaaatatggtgaaggaaaccgtaggtctggaagaggcggttctggtattcggtcttcccgccttgaggaagatgatggagatgtggcaatgagtgatgcccaggatggtccccgagtacgatacaacccctataccacccgacctaaccgtcggggtgatacttggcatgatcgagatcgcattcatgttactgtgcggagagacagagctcctccagagagaggaggggctggcaccagccaggatgggacctcaaagaactggttcaagattacaattccttatggcagaaagtatgacaaggcatggctcctgagcatgattcagagcaagtgcagtgtgcccttcacccctattgagtttcactatgagaatacacgggcccagttcttcgttgaagacgccagtactgcctctgcattgaaggctgtcaactataagattttggatcgggagaaccgaaggatatctatcatcatcaactcttctgctccaccccacactatactgaatgaactgaagccagaacaagtagaacagctaaagctgatcatgagcaaacgatacgatggctcccaacaagcccttgacctcaaaggcctccgttcagacccagatttggtggcccagaacattgacgttgtcctgaatcgcagaagctgtatggcagctaccctgaggatcattgaagagaacatccctgagctattgtccttgaacttgagcaacaacaggctgtacaggctggatgacatgtctagcattgttcagaaggcacccaacctgaagatcctaaacctttctggaaatgaattgaagtctgagcgggaattggacaagataaaggggctgaagctagaagagctctggctcgatggaaactccctgtgtgacaccttccgagaccagtccacctacatcagcgccattcgcgaacgatttcccaagttactacgcctggatggccatgagctacccccaccaattgcctttgatgttgaagcccccacgacgttaccgccctgcaagggaagctattttggaacagaaaacttgaagagtctggtcttgcacttcctgcaacagtactatgcaatttacgactctggagaccgacaagggctcctggatgcctaccatgatggggcctgctgttccctgagcattcctttcattcctcagaaccctgcccgaagcagcttagccgagtatttcaaggatagcagaaatgtgaagaagcttaaagaccctaccttgcggttccggctgctgaagcacacgcgtctcaacgttgttgccttcctcaatgagttgcccaaaacccagcacgacgtcaattccttcgtggtagacataagcgcccagacaagcacattgctgtgtttttctgtcaatggagtcttcaaggaagtggacggaaagtcccgggattctttgcgagccttcacccggacattcattgctgttcctgctagcaattcagggctatgtattgtaaatgatgagctatttgtgcggaatgccagttctgaagagatccaaagagccttcgctatgcctgcacccacgccttcctccagcccggtgcccaccctctctccagagcagcaggaaatgttgcaagcattctctacccagtctggcatgaacctcgagtggtcccagaagtgccttcaggacaacaactgggactacaccagatctgcccaggccttcactcatctcaaggccaagggcgagatcccagaagtggcattcatgaagtgatcgtagtcatgcctcagaagcagtcccccctgtaaatagtccttggatattaccgtctggttgtcgtctgtcatctcctcctgtctggcccgaggccgccccgtgactgtgaccgagggagggagggctgcctgatccctctcctcgcctgccttctggaagacttcagaagattgagcctcactggtgccaggaagccaaagcttactttgtagaactgacactaaactacccgaaggacttaggtgctttgtgtacttaaccccaggacctccttactttttaatataaagagtgatgttgtatttcgtgttctgcactttttaatataaagagtgatgttgtatttc

SEQ ID NO: 161005 - DNA, 589 bp, Homo sapiens
  Payload ID: 11451
  Gene Symbol: NXF1
  Gene Name: nuclear RNA export factor 1
  ENST ID: ENST00000533671
  CDS Start-End: 244-589
actcgaggtggacacccgagttgttgactcctggattcctgctggcatcctggtgttgggggacctgcggctcggagcggatggctcggggaacacgatgatgaacgcgttaatttccctcaaagaaagaagaaaggccggggtcccttccggtggaaatatggtgaaggaaaccgtaggtctggaagaggcggttctggtattcggtcttcccgccttgaggaagatgatggagatgtggcaatgagtgatgcccaggatggtccccgagtacgatacaacccctataccacccgacctaaccgtcggggtgatacttggcatgatcgagatcgcattcatgttactgtgcggagagacagagctcctccagagagaggaggggctggcaccagccaggatgggacctcaaagaactggttcaagattacaattccttatggcagaaagtatgacaaggcatggctcctgagcatgattcagagcaagtgcagtgtgcccttcacccctattgagtttcactatgagaatacacgggcccagttcttcgttgaagacgccagtactgcctctgcattgaaggctgtca

SEQ ID NO: 161006 - DNA, 572 bp, Homo sapiens
  Payload ID: 11451
  Gene Symbol: NXF1
  Gene Name: nuclear RNA export factor 1
  ENST ID: ENST00000525576
  CDS Start-End: 85-315
acttcggtcctgagcgcttgggagttaggttgtttgccggcgtagcggccagcgcctgagcccgcccttgatcttcgctgtggcatggcggacgaggggaagtcgtacagcgaacacgatgatgaacgcgttaatttccctcaaagaaagaagaaaggccggggtcccttccggtggaaatatggtgaaggaaaccgtaggtctggaagaggcggttctggtattcggtcttcccgccttgaggaagatgatggagatgtggcaatgagtgatgcccaggatggtccccgacaacccctataccacccgacctaaccgtcggggtgatacttggcatgatcgagatcgcattcatgttactgtgcggagagacagagctcctccagagagaggaggggctggcaccagccaggatgggacctcaaagaactggttcaagattacaattccttatggcagaaagtatgacaaggcatggctcctgagcatgattcagagcaagtgcagtgtgcccttcacccctattgagtttcactatgagaatacacgggcccagttcttcgttgaagacg

SEQ ID NO: 161007 - DNA, 619 bp, Homo sapiens
  Payload ID: 11451
  Gene Symbol: NXF1
  Gene Name: nuclear RNA export factor 1
  ENST ID: ENST00000527902
  CDS Start-End: 1-374
acataagcgcccagacaagcacattgctgtgtttttctgtcaatggagtcttcaaggaagtggacggaaagtcccgggattctttgcgagccttcacccggacattcattgctgttcctgctagcaattcaggttctgaagagatccaaagagccttcgctatgcctgcacccacgccttcctccagcccggtgcccaccctctctccagagcagcaggaaatgttgcaagcattctctacccagtctggcatgaacctcgagtggtcccagaagtgccttcaggacaacaactgggactacaccagatctgcccaggccttcactcatctcaaggccaagggcgagatcccagaagtggcattcatgaagtgatcgtagtcatgcctcagaagcagtcccccctgtaaatagtccttggatattaccgtctggttgtcgtctgtcatctcctcctgtctggcccgaggccgccccgtgactgtgaccgagggagggagggctgcctgatccctctcctcgcctgccttctggaagacttcagaagattgagcctcactggtgccaggaagccaaagcttactttgtagaactgacactaaactacccgaaggacttag

SEQ ID NO: 161008 - DNA, 1922 bp, Homo sapiens
  Payload ID: 11451
  Gene Symbol: NXF1
  Gene Name: nuclear RNA export factor 1
  ENST ID: ENST00000530875
  CDS Start-End: 114-1922
ataaatgcggtggcgcccggcgtagggacacttcggtcctgagcgcttgggagttaggttgtttgccggcgtagcggccagcgcctgagcccgcccttgatcttcgctgtggcatggcggacgaggggaagtcgtacagcgtttctacttcatttttcaaaagccctacacagttttccagtaacttttccctgatgctgccctcccacagagagggttctttcctgtggatagggagcggagtttgcatggagatggcctctgtcgttaaacacgatgatgaacgcgttaatttccctcaaagaaagaagaaaggccggggtcccttccggtggaaatatggtgaaggaaaccgtaggtctggaagaggcggttctggtattcggtcttcccgccttgaggaagatgatggagatgtggcaatgagtgatgcccaggatggtccccgagtacgatacaacccctataccacccgacctaaccgtcggggtgatacttggcatgatcgagatcgcattcatgttactgtgcggagagacagagctcctccagagagaggaggggctggcaccagccaggatgggacctcaaagaactggttcaagattacaattccttatggcagaaagtatgacaaggcatggctcctgagcatgattcagagcaagtgcagtgtgcccttcacccctattgagtttcactatgagaatacacgggcccagttcttcgttgaagacgccagtactgcctctgcattgaaggctgtcaactataagattttggatcgggagaaccgaaggatatctatcatcatcaactcttctgctccaccccacactatactgaatgaactgaagccagaacaagtagaacagctaaagctgatcatgagcaaacgatacgatggctcccaacaagcccttgacctcaaaggcctccgttcagacccagatttggtggcccagaacattgacgttgtcctgaatcgcagaagctgtatggcagctaccctgaggatcattgaagagaacatccctgagctattgtccttgaacttgagcaacaacaggctgtacaggctggatgacatgtctagcattgttcagaaggcacccaacctgaagatcctaaacctttctggaaatgaattgaagtctgagcgggaattggacaagataaaggggctgaagctagaagagctctggctcgatggaaactccctgtgtgacaccttccgagaccagtccacctacatcagcgccattcgcgaacgatttcccaagttactacgcctggatggccatgagctacccccaccaattgcctttgatgttgaagcccccacgacgttaccgccctgcaagggaagctattttggaacagaaaacttgaagagtctggtcttgcacttcctgcaacagtactatgcaatttacgactctggagaccgacaagggctcctggatgcctaccatgatggggcctgctgttccctgagcattcctttcattcctcagaaccctgcccgaagcagcttagccgagtatttcaaggatagcagaaatgtgaagaagcttaaagaccctaccttgcggttccggctgctgaagcacacgcgtctcaacgttgttgccttcctcaatgagttgcccaaaacccagcacgacgtcaattccttcgtggtagacataagcgcccagacaagcacattgctgtgtttttctgtcaatggagtcttcaaggaagtggacggaaagtcccgggattctttgcgagccttcacccggacattcattgctgttcctgctagcaattcagggctatgtattgtaaatgatgagctatttgtgcggaatgccagttctgaagagatccaaagagccttcgctatgcctgcacccacgccttcctccagcccggtg

SEQ ID NO: 161009 - DNA, 2795 bp, Homo sapiens
  Payload ID: 11451
  Gene Symbol: NXF1
  Gene Name: nuclear RNA export factor 1
  Uniprot ID: Q9UBU9
  ENST ID: ENST00000532297
  CDS Start-End: 631-2490
atagagacaacagtcaggggctggtggtggtgcttttgggggtctaggagagcccaaggccctgatattttaaaatgtcctcctcggcatctccagcaagttgccactgctggcgaagaaagcgaggtatagacaaggagccgagctgaaacactggctagattccggtaggggtctgagccatcactcccacctggaggcgcggtctccattcctctgaagccctttgtgcggcccccttcctcactgagttctgggctgcggcggcagcactgtgctctagcactaactctgaagctgccagggcagcgtcagcggacagatgaaaaggtgcggggacatgctggctgccagccggggttccgcaagttcaggtcttgggcggggcgtggagggccaggccccgcccctcgaacgacggccttaagtgtgcgcacgcgcagggggccgcgctttctccgggcggcggcaccgcccacagcctgggacgtcagcggcgcgcgacgtgctttgctgtataaatgcggtggcgcccggcgtagggacacttcggtcctgagcgcttgggagttaggttgtttgccggcgtagcggccagcgcctgagcccgcccttgatcttcgctgtggcatggcggacgaggggaagtcgtacagcgaacacgatgatgaacgcgttaatttccctcaaagaaagaagaaaggccggggtcccttccggtggaaatatggtgaaggaaaccgtaggtctggaagaggcggttctggtattcggtcttcccgccttgaggaagatgatggagatgtggcaatgagtgatgcccaggatggtccccgagtacgatacaacccctataccacccgacctaaccgtcggggtgatacttggcatgatcgagatcgcattcatgttactgtgcggagagacagagctcctccagagagaggaggggctggcaccagccaggatgggacctcaaagaactggttcaagattacaattccttatggcagaaagtatgacaaggcatggctcctgagcatgattcagagcaagtgcagtgtgcccttcacccctattgagtttcactatgagaatacacgggcccagttcttcgttgaagacgccagtactgcctctgcattgaaggctgtcaactataagattttggatcgggagaaccgaaggatatctatcatcatcaactcttctgctccaccccacactatactgaatgaactgaagccagaacaagtagaacagctaaagctgatcatgagcaaacgatacgatggctcccaacaagcccttgacctcaaaggcctccgttcagacccagatttggtggcccagaacattgacgttgtcctgaatcgcagaagctgtatggcagctaccctgaggatcattgaagagaacatccctgagctattgtccttgaacttgagcaacaacaggctgtacaggctggatgacatgtctagcattgttcagaaggcacccaacctgaagatcctaaacctttctggaaatgaattgaagtctgagcgggaattggacaagataaaggggctgaagctagaagagctctggctcgatggaaactccctgtgtgacaccttccgagaccagtccacctacatcagcgccattcgcgaacgatttcccaagttactacgcctggatggccatgagctacccccaccaattgcctttgatgttgaagcccccacgacgttaccgccctgcaagggaagctattttggaacagaaaacttgaagagtctggtcttgcacttcctgcaacagtactatgcaatttacgactctggagaccgacaagggctcctggatgcctaccatgatggggcctgctgttccctgagcattcctttcattcctcagaaccctgcccgaagcagcttagccgagtatttcaaggatagcagaaatgtgaagaagcttaaagaccctaccttgcggttccggctgctgaagcacacgcgtctcaacgttgttgccttcctcaatgagttgcccaaaacccagcacgacgtcaattccttcgtggtagacataagcgcccagacaagcacattgctgtgtttttctgtcaatggagtcttcaaggaagtggacggaaagtcccgggattctttgcgagccttcacccggacattcattgctgttcctgctagcaattcagggctatgtattgtaaatgatgagctatttgtgcggaatgccagttctgaagagatccaaagagccttcgctatgcctgcacccacgccttcctccagcccggtgcccaccctctctccagagcagcaggaaatgttgcaagcattctctacccagtctggcatgaacctcgagtggtcccagaagtgccttcaggacaacaactgggactacaccagatctgcccaggccttcactcatctcaaggccaagggcgagatcccagaagtggcattcatgaagtgatcgtagtcatgcctcagaagcagtcccccctgtaaatagtccttggatattaccgtctggttgtcgtctgtcatctcctcctgtctggcccgaggccgccccgtgactgtgaccgagggagggagggctgcctgatccctctcctcgcctgccttctggaagacttcagaagattgagcctcactggtgccaggaagccaaagcttactttgtagaactgacactaaactacccgaaggacttaggtgctttgtgtacttaaccccaggacctccttactttttaatataaagagtgatgttgta

SEQ ID NO: 161010 - DNA, 548 bp, Homo sapiens
  Payload ID: 11451
  Gene Symbol: NXF1
  Gene Name: nuclear RNA export factor 1
  ENST ID: ENST00000531474
  CDS Start-End: 360-548
tacacagttttccagtaacttttccctgatgctgccctcccacagagagggttctttcctgtggatagggagcggagtttgcatggagatggcctctgtcgttagtatgtatctcttccaatagttcagagtactagaagctatgattgccacaccaaaccggaccagttacttacttctaatttgtgttcctgtttctaactctagaacacgatgatgaacgcgttaatttccctcaaagaaagaagaaaggccggggtcccttccggtggaaatatggtgaaggaaaccgtaggtctggaagaggcggttctggtattcggtcttcccgccttgaggaagatgatggagatgtggcaatgagtgatgcccaggatggtccccgagtacgatacaacccctataccacccgacctaaccgtcggggtgatacttggcatgatcgagatcgcattcatgttactgtgcggagagacagagctcctccagagagaggaggggctggcaccagccaggatgggacctcaaagaactggttcaagattaca

SEQ ID NO: 161011 - DNA, 4128 bp, Homo sapiens
  Payload ID: 11451
  Gene Symbol: NXF1
  Gene Name: nuclear RNA export factor 1
  Uniprot ID: Q9UBU9
  ENST ID: ENST00000531709
  CDS Start-End: 115-1185
tataaatgcggtggcgcccggcgtagggacacttcggtcctgagcgcttgggagttaggttgtttgccggcgtagcggccagcgcctgagcccgcccttgatcttcgctgtggcatggcggacgaggggaagtcgtacagcgaacacgatgatgaacgcgttaatttccctcaaagaaagaagaaaggccggggtcccttccggtggaaatatggtgaaggaaaccgtaggtctggaagaggcggttctggtattcggtcttcccgccttgaggaagatgatggagatgtggcaatgagtgatgcccaggatggtccccgagtacgatacaacccctataccacccgacctaaccgtcggggtgatacttggcatgatcgagatcgcattcatgttactgtgcggagagacagagctcctccagagagaggaggggctggcaccagccaggatgggacctcaaagaactggttcaagattacaattccttatggcagaaagtatgacaaggcatggctcctgagcatgattcagagcaagtgcagtgtgcccttcacccctattgagtttcactatgagaatacacgggcccagttcttcgttgaagacgccagtactgcctctgcattgaaggctgtcaactataagattttggatcgggagaaccgaaggatatctatcatcatcaactcttctgctccaccccacactatactgaatgaactgaagccagaacaagtagaacagctaaagctgatcatgagcaaacgatacgatggctcccaacaagcccttgacctcaaaggcctccgttcagacccagatttggtggcccagaacattgacgttgtcctgaatcgcagaagctgtatggcagctaccctgaggatcattgaagagaacatccctgagctattgtccttgaacttgagcaacaacaggctgtacaggctggatgacatgtctagcattgttcagaaggcacccaacctgaagatcctaaacctttctggaaatgaattgaagtctgagcgggaattggacaagataaaggggctgaagctagaagagctctggctcgatggaaactccctgtgtgacaccttccgagaccagtccacctacatcaggtcagttgtagcctgtgtctcccctcctggggaccttcaccccctgggaggctgagctaatgcatcctgaccagggcccgtctgcggagatgtgcagccctgagctggaaccacctgtcctttgagaggatcgcgtgctccccactttggtctgtctgtgtcttccagctttgtcctgagatgttctctcttctcttctgacttgactatctgtttgctgggtctgtggcctttctctttcttcctgaacacaaccttttctagaatctccctaccctgttgttccaggaaaggcatctcccctttctactctaaccagagggtatcttgtacataccctatagatggggttgccttgtgccaagagcctggtgtccatgggttgaggaagccctccctacctgggacttcctactgagatgggccttccctcctttgtactgtgatggcccctcttgcccttgcgccaagagggacccttttctcaggatccacttgcccagggctgttgctgtccatgctgaggttgaggcctcctaggggctggtggcatgcaatctgtctctcttgcccagtgctatgagctgggctctccctgaagaagaaacctgggttccccaagatgtgaccagagctggggccccgccagcaggcgagggaatcccaaggcaggtgctgggcgtggaggccacgggggcataggctaccaaggagacagagaactgaccccctcgggggcgctgcctctccctcactcacacactgcacgtcaccctgtttggccccggtggatggctggttagccagagacgggtaagattcctcagggaaggaacaacctaagacaggcacagtcgcagaggggccatcaggagagaacttgggggcaacagaggtggggcatggaccctcacccccacaatcctacaggggcctgaaccctcacaccttctgagggaggtctcctgcccccatggctgctttgcttcccacgcccagttcagatcgggacccaggtagcagacagagacctggccaacagcaagtgcccactcaccacagcaaggatttgtttctcatttctaccttggaccacagggatggggcagctgaaagaaagggctgtgtcagggtgtctttctcccttttctccctcatttttctagatgcttttttgccttgtagttctttctctttttctttgctttctctttcctttttctgtctgtctcctatacctccccatctctcccttgcccctgccccatcttgcctttttctctttttcctccttttcctttcttattcctttgcctctcctcttcctgagccccacctgctcatctccctgccccaacatcctgtgccatccctgtggtgtgtttgggtcttggccaaagccagacctggcagaactgatggatacctggtgaggcagcggagcccctgggctcccaccccattccctcctcccggggctgcacaggtgagtaggtggaaggtaaggggggcagggaggggaaagaggtcctgggcttaaagcctgggcttggagtactgctccttgacactcagggtcaggcagagagaaaagagacagccttcaaggcagtccatgtctgggtgccccgggtcaggtggggagtgggggccatttttccctgagcacaggctgggagggagtggagggatgagcaggatgggatgggctgtccctcgggtttggtatatttgctcctagagcagcccaggaggcacggtggctctgaagcatcactcacttctgtcccgttcttgacagcgccattcgcgaacgatttcccaagttactacgcctggatggccatgagctacccccaccaattgcctttgatgttgaagcccccacgacgttaccgccctgcaagggaagctattttggaacagaaaacttgaagagtctggtcttgcacttcctgcaacagtactatgcaatttacgactctggagaccgacaagggctcctggatgcctaccatgatggggcctgctgttccctgagcattcctttcattcctcagaaccctgcccgaagcagcttagccgagtatttcaaggatagcagaaatgtgaagaagcttaaagaccctaccttgcggttccggctgctgaagcacacgcgtctcaacgttgttgccttcctcaatgagttgcccaaaacccagcacgacgtcaattccttcgtggtagacataagcgcccagacaagcacattgctgtgtttttctgtcaatggagtcttcaaggaagtggacggaaagtcccgggattctttgcgagccttcacccggacattcattgctgttcctgctagcaattcagggctatgtattgtaaatgatgagctatttgtgcggaatgccagttctgaagagatccaaagagccttcgctatgcctgcacccacgccttcctccagcccggtgcccaccctctctccagagcagcaggaaatgttgcaagcattctctacccagtctggcatgaacctcgagtggtcccagaagtgccttcaggacaacaactgggactacaccagatctgcccaggccttcactcatctcaaggccaagggcgagatcccagaagtggcattcatgaagtgatcgtagtcatgcctcagaagcagtcccccctgtaaatagtccttggatattaccgtctggttgtcgtctgtcatctcctcctgtctggcccgaggccgccccgtgactgtgaccgagggagggagggctgcctgatccctctcctcgcctgccttctggaagacttcagaagattgagcctcactggtgccaggaagccaaagcttactttgtagaactgacactaaactacccgaaggacttaggtgctttgtgtacttaaccccaggacctccttactttttaatataaagagtgatgttgtatttcgtgttctgcactttttaatataaagagtgatgttgtatttcgtg

SEQ ID NO: 161012 - DNA, 1023 bp, Homo sapiens
  Payload ID: 11451
  Gene Symbol: NXF1
  Gene Name: nuclear RNA export factor 1
  ENST ID: ENST00000531131
  CDS Start-End: 155-814
acttcggtcctgagcgcttgggagttaggttgtttgccggcgtagcggccagcgcctgagcccgcccttgatcttcgctgtggcatggcggacgaggggaagtcgtacagcgattccttatggcagaaagtatgacaaggcatggctcctgagcatgattcagagcaagtgcagtgtgcccttcacccctattgagtttcactatgagaatacacgggcccagttcttcgttgaagacgccagtactgcctctgcattgaaggctgtcaactataagattttggatcgggagaaccgaaggatatctatcatcatcaactcttctgctccaccccacactatactgaatgaactgaagccagaacaagtagaacagctaaagctgatcatgagcaaacgatacgatggctcccaacaagcccttgacctcaaaggcctccgttcagacccagatttggtggcccagaacattgacgttgtcctgaatcgcagaagctgtatggcagctaccctgaggatcattgaagagaacatccctgagctattgtccttgaacttgagcaacaacaggctgtacaggctggatgacatgtctagcattgttcagaaggcacccaacctgaagatcctaaacctttctggaaatgaattgaagtctgagcgggaattggacaagataaaggggctgaagctagaagagctctggctcgatggaaactccctgtgtgacaccttccgagaccagtccacctacatcaggtcagttgtagcctgtgtctcccctcctggggaccttcaccccctgggaggctgagctaatgcatcctgaccagggcccgtctgcggagatgtgcagccctgagctggaaccacctgtcctttgagaggatcgcgtgctccccactttggtctgtctgtgtcttccagctttgtcctgagatgttctctcttctcttctgacttgactatctgtttgctgggtctgtggcctttctctttcttcctgaacacaaccttttctag

SEQ ID NO: 161013 - DNA, 2143 bp, Homo sapiens
  Payload ID: 11452
  Gene Symbol: NXF2
  Gene Name: nuclear RNA export factor 2
  Uniprot ID: Q9GZY0
  ENST ID: ENST00000604790
  CDS Start-End: 58-1938
tcagcatttccaagttcgttctgtgagactgtagtgtcaggacaaagcaacaacaaaatgtgctctactctaaagaagtgtgggacatacagaactgaagttgcagaatgccatgaccatggtagcacttttcaaggaagaaagaaaggtgggagttctttccgggataattttgacaagaggagctgtcattatgaacatggtgggtatgagcgcccgccttcacactgccaggagaatgatggaagcgtggagatgagggatgtccacaaggaccaacaactaagacacactccttatagcatccgatgcgaaagaagaatgaaatggcatagtgaagacgaaatccgtattaccacgtggagaaatagaaaacctccggagagaaaaatgagtcagaacacacaggatggatacacaaggaactggtttaaggtcacaattccttacgggataaagtatgacaaggcatggctaatgaattcaatccagagccattgcagtgaccgcttcactccggttgatttccactacgtccgaaatcgggcatgcttctttgtccaggatgctagcgctgcctccgcattgaaggatgtcagttataagatttatgatgatgagaaccaaaagatatgtatatttgtcaatcattctactgcgccctactctgtgaagaataagttgaagccaggccaaatggagatgctaaagctgaccatgaacaaacggtacaatgtctcccagcaagctcttgatctccagaatctccgctttgacccagacttgatgggccgtgacattgatataatcctgaatcgaagaaactgcatggctgccaccctgaagatcattgaaagaaatttccctgagctgttgtctttgaacttgtgcaacaacaagctgtaccagctggatggcctttctgacattacagagaaggctcccaaagtcaagaccctgaatctctccaaaaataagctggagtcggcgtgggagttgggcaaggtgaaagggctgaagctcgaagagctatggctagaagggaacccgttgtgcagcaccttctcggaccagtccgcctatgtaagtgccatccgggattgtttccccaagttgttacgcctggacggccgagagttatccgcaccagtgattgttgacattgacagctctgagacaatgaaaccctgcaaggaaaactttactggatctgagaccctaaagcatttagtcctgcaattcctgcagcagtattactcgatctatgactctggagatcgacagggtctcctcggtgcttaccacgatgaggcctgcttctccttggctattcccttcgaccccaaggactcagccccgagcagcttgtgcaagtactttgaggatagcaggaatatgaaaacactcaaggacccctacctgaagggggaactgctgaggcgcacaaaacgtgacattgtggactccctcagtgcgttgcccaaaactcagcatgacctcagctccatcctggtggacgtgtggtgccagacggaaaggatgctctgcttttctgtcaatggggttttcaaggaagtggaaggacagtctcagggttctgttctcgccttcacccggaccttcattgctacccctggcagcagttccagtctgtgcatcgtgaatgacgagctgtttgtgagggatgccagcccccaagagactcagagtgccttctccatcccagtgtccacactctcctccagctctgagccctccctctcccaggagcagcaggaaatggtgcaggctttctctgcccagtctgggatgaaactggagtggtctcagaagtgccttcaggacaatgagtggaactacactagagctggccaggccttcactatgctccagaccgagggcaagatccccgcggaggccttcaagcaaatctcctaaaaggagccctccgatgtcttctttgtcttcgttcacatcctctttgtttcctcttttcaccagcctaaggcctggctgaccaggaagccaacgttaacttgcaggccacgtgacataaccacccaaagagccagttgctctgtgtattcgccccactcatgatcaccattttattttcataataaagagtgacgttacacgttgt

SEQ ID NO: 161014 - DNA, 2337 bp, Homo sapiens
  Payload ID: 11452
  Gene Symbol: NXF2
  Gene Name: nuclear RNA export factor 2
  Uniprot ID: Q9GZY0
  ENST ID: ENST00000625106
  CDS Start-End: 254-2134
aagattgcgtcttgtttgtggcaagattctgaggggaagtgtagctcccaggttggttccaagtcttcttccaattaggatcttatccaggacgcttcattgcatttggtcttcatttctccttagtctcctccaggctgacatttcctcaatctttattggtcttccacagccctgacacttttggagataccagtcagcatttccaagttcgttctgtgagactgtagtgtcaggacaaagcaacaacaaaatgtgctctactctaaagaagtgtgggacatacagaactgaagttgcagaatgccatgaccatggtagcacttttcaaggaagaaagaaaggtgggagttctttccgggataattttgacaagaggagctgtcattatgaacatggtgggtatgagcgcccgccttcacactgccaggagaatgatggaagcgtggagatgagggatgtccacaaggaccaacaactaagacacactccttatagcatccgatgcgaaagaagaatgaaatggcatagtgaagacgaaatccgtattaccacgtggagaaatagaaaacctccggagagaaaaatgagtcagaacacacaggatggatacacaaggaactggtttaaggtcacaattccttacgggataaagtatgacaaggcatggctaatgaattcaatccagagccattgcagtgaccgcttcactccggttgatttccactacgtccgaaatcgggcatgcttctttgtccaggatgctagcgctgcctccgcattgaaggatgtcagttataagatttatgatgatgagaaccaaaagatatgtatatttgtcaatcattctactgcgccctactctgtgaagaataagttgaagccaggccaaatggagatgctaaagctgaccatgaacaaacggtacaatgtctcccagcaagctcttgatctccagaatctccgctttgacccagacttgatgggccgtgacattgatataatcctgaatcgaagaaactgcatggctgccaccctgaagatcattgaaagaaatttccctgagctgttgtctttgaacttgtgcaacaacaagctgtaccagctggatggcctttctgacattacagagaaggctcccaaagtcaagaccctgaatctctccaaaaataagctggagtcggcgtgggagttgggcaaggtgaaagggctgaagctcgaagagctatggctagaagggaacccgttgtgcagcaccttctcggaccagtccgcctatgtaagtgccatccgggattgtttccccaagttgttacgcctggacggccgagagttatccgcaccagtgattgttgacattgacagctctgagacaatgaaaccctgcaaggaaaactttactggatctgagaccctaaagcatttagtcctgcaattcctgcagcagtattactcgatctatgactctggagatcgacagggtctcctcggtgcttaccacgatgaggcctgcttctccttggctattcccttcgaccccaaggactcagccccgagcagcttgtgcaagtactttgaggatagcaggaatatgaaaacactcaaggacccctacctgaagggggaactgctgaggcgcacaaaacgtgacattgtggactccctcagtgcgttgcccaaaactcagcatgacctcagctccatcctggtggacgtgtggtgccagacggaaaggatgctctgcttttctgtcaatggggttttcaaggaagtggaaggacagtctcagggttctgttctcgccttcacccggaccttcattgctacccctggcagcagttccagtctgtgcatcgtgaatgacgagctgtttgtgagggatgccagcccccaagagactcagagtgccttctccatcccagtgtccacactctcctccagctctgagccctccctctcccaggagcagcaggaaatggtgcaggctttctctgcccagtctgggatgaaactggagtggtctcagaagtgccttcaggacaatgagtggaactacactagagctggccaggccttcactatgctccagaccgagggcaagatccccgcggaggccttcaagcaaatctcctaaaaggagccctccgatgtcttctttgtcttcgttcacatcctctttgtttcctcttttcaccagcctaaggcctggctgaccaggaagccaacgttaacttgcaggccacgtgacataaccacccaaagagccagttgctctgtgtattcgccccactcatgatcaccattttattttcataataaagagtgacgttacacgtt

SEQ ID NO: 161015 - DNA, 2322 bp, Homo sapiens
  Payload ID: 11453
  Gene Symbol: NXF2B
  Gene Name: nuclear RNA export factor 2B
  Uniprot ID: Q9GZY0
  ENST ID: ENST00000602195
  CDS Start-End: 239-2119
ttgtggcaagattctgaggggaagtgtagctcccaggttggttccaagtcttcttccaattaggatcttatccaggacgcttcattgcatttggtcttcatttctccttagtctcctccaggctgacatttcctcaatctttattggtcttccacagccctgacacttttggagataccagtcagcatttccaagttcgttctgtgagactgtagtgtcaggacaaagcaacaacaaaatgtgctctactctaaagaagtgtgggacatacagaactgaagttgcagaatgccatgaccatggtagcacttttcaaggaagaaagaaaggtgggagttctttccgggataattttgacaagaggagctgtcattatgaacatggtgggtatgagcgcccgccttcacactgccaggagaatgatggaagcgtggagatgagggatgtccacaaggaccaacaactaagacacactccttatagcatccgatgcgaaagaagaatgaaatggcatagtgaagacgaaatccgtattaccacgtggagaaatagaaaacctccggagagaaaaatgagtcagaacacacaggatggatacacaaggaactggtttaaggtcacaattccttacgggataaagtatgacaaggcatggctaatgaattcaatccagagccattgcagtgaccgcttcactccggttgatttccactacgtccgaaatcgggcatgcttctttgtccaggatgctagcgctgcctccgcattgaaggatgtcagttataagatttatgatgatgagaaccaaaagatatgtatatttgtcaatcattctactgcgccctactctgtgaagaataagttgaagccaggccaaatggagatgctaaagctgaccatgaacaaacggtacaatgtctcccagcaagctcttgatctccagaatctccgctttgacccagacttgatgggccgtgacattgatataatcctgaatcgaagaaactgcatggctgccaccctgaagatcattgaaagaaatttccctgagctgttgtctttgaacttgtgcaacaacaagctgtaccagctggatggcctttctgacattacagagaaggctcccaaagtcaagaccctgaatctctccaaaaataagctggagtcggcgtgggagttgggcaaggtgaaagggctgaagctcgaagagctatggctagaagggaacccgttgtgcagcaccttctcggaccagtccgcctatgtaagtgccatccgggattgtttccccaagttgttacgcctggacggccgagagttatccgcaccagtgattgttgacattgacagctctgagacaatgaaaccctgcaaggaaaactttactggatctgagaccctaaagcatttagtcctgcaattcctgcagcagtattactcgatctatgactctggagatcgacagggtctcctcggtgcttaccacgatgaggcctgcttctccttggctattcccttcgaccccaaggactcagccccgagcagcttgtgcaagtactttgaggatagcaggaatatgaaaacactcaaggacccctacctgaagggggaactgctgaggcgcacaaaacgtgacattgtggactccctcagtgcgttgcccaaaactcagcatgacctcagctccatcctggtggacgtgtggtgccagacggaaaggatgctctgcttttctgtcaatggggttttcaaggaagtggaaggacagtctcagggttctgttctcgccttcacccggaccttcattgctacccctggcagcagttccagtctgtgcatcgtgaatgacgagctgtttgtgagggatgccagcccccaagagactcagagtgccttctccatcccagtgtccacactctcctccagctctgagccctccctctcccaggagcagcaggaaatggtgcaggctttctctgcccagtctgggatgaaactggagtggtctcagaagtgccttcaggacaatgagtggaactacactagagctggccaggccttcactatgctccagaccgagggcaagatccccgcggaggccttcaagcaaatctcctaaaaggagccctccgatgtcttctttgtcttcgttcacatcctctttgtttcctcttttcaccagcctaaggcctggctgaccaggaagccaacgttaacttgcaggccacgtgacataaccacccaaagagccagttgctctgtgtattcgccccactcatgatcaccattttattttcataataaagagtgacgttacacgtt

SEQ ID NO: 161016 - DNA, 2143 bp, Homo sapiens; identical to SEQ ID NO: 161013
  Payload ID: 11453
  Gene Symbol: NXF2B
  Gene Name: nuclear RNA export factor 2B
  Uniprot ID: Q9GZY0
  ENST ID: ENST00000604395
  CDS Start-End: 58-1938

SEQ ID NO: 161017 - DNA, 3193 bp, Homo sapiens
  Payload ID: 11453
  Gene Symbol: NXF2B
  Gene Name: nuclear RNA export factor 2B
  ENST ID: ENST00000618881
  CDS Start-End: 1670-2899
cctgactcacctagctcctcctgcagcatggcgtgttcacttccaagcggggcagactctgctgatggacagaatccggctccaggaactggcattccagttgcaccagttaactgtcctggcctcagtcttgctagtggccagaagcttctctggtgaagttttattcagatcacctgaatttgtggatagactgaaatgcaccaccaaggccctaactgaggaatttatctccaggcctgaagagactatgctgagtgtgagtgaacaggtgtctcaggaagtccatcaaggccttaaggacatgggcctcactactctgagcagtgaaaacacagcatctcttctaggccaactccagaacatcaccaagaaagagaactgcattcgtagcattgttgatcagtggatccgtttttttctcaaatgctgtttgcttcatggcatgcaggagtctctgctacactttcctggaggcctcattctcattgaaaaggagttggcagaactgggctggaagtttctcaatctgatgcatcataatcagcagagtcatttttcacaaaacgaaatctttccagaagatcacgaataagagagatcaaagctaggcagcttgagttgaagtagagctggaagaaggagttttgaggactgtttcaaaaccactggactagatgatctctaaagtggtgacatggacataggataatggttatagacagtccccctcccaacgggaaaaaatgaaagcaagcaaaaagttaccagctccaagccaacttgaaatccaatcaggatcttatccaggacgcttcattgcatttggtcttcatttctccttagtctcctccaggctgacatttcctcaatctttattggtcttccacagccctgacacttttggagataccagtcagcatttccaagttcgttctgtgagactgtagtgtcaggacaaagcaacaacaaaatgtgctctactctaaagaagtgtgggacatacagaactgaagggatgatgcttcctgtctgtcacaaggctgagtgaacacaacatgcctgtaggtccagaacattcttcctacagagaccagatgtccagaaagccctatctgctggattcagggaacgcctctcctcatttctgtcagcactatttgcaaaagcctccttctctgagatcttcaaagctgcagttctagccacagtctgcagggagttgcagaatgccatgaccatggtagcacttttcaaggaagaaagaaaggtgggagttctttccgggataattttgacaagaggagctgtcattatgaacatggtgggtatgagcgcccgccttcacactgccaggagaatgatggaagcgtggagatgagggatgtccacaaggaccaacaactaagacagtaagtgaccaggcagcctggtttgcacgtagcagcccccgggactgtgcaaccctttcattctctgtggtcttccttttcttctctcattagagaactgacgaatgctggaagtggaatagtggctgagcagtcctaattgtagccctggcgtcagtgagtggagcatgtataggagactttcttagatttaatggatacccgccttctctcctcttccccacagcactccttatagcatccgatgcgaaagaagaatgaaatggcatagtgaagacgaaatccgtattaccacgtggagaaatagaaaacctccggagagaaaaatgagtcagaacacacaggatggatacacaaggaactggtttaaggtcacaattccttacgggataaagtatgacaaggcatggctaatgaattcaatccagagccattgcagtgaccgcttcactccggttgatttccactacgtccgaaatcgggcatgcttctttgtccaggatgctagcgctgcctccgcattgaaggatgtcagttataagatttatgatgatgagaaccaaaagatatgtatatttgtcaatcattctactgcgccctactctgtgaagaataagttgaagccaggccaaatggagatgctaaagctgaccatgaacaaacggtacaatgtctcccagcaagctcttgatctccagaatctccgctttgacccagacttgatgggccgtgacattgatataatcctgaatcgaagaaactgcatggctgccaccctgaagatcattgaaagaaatttccctgagctgttgtctttgaacttgtgcaacaacaagctgtaccagctggatggcctttctgacattacagagaaggctcccaaagtcaagaccctgaatctctccaaaaataagctggagtcggcgtgggagttgggcaaggtgaaagggctgaagctcgaagagctatggctagaagggaacccgttgtgcagcaccttctcggaccagtccgcctatgtaagtgccatccgggattgtttccccaagttgttacgcctggacggccgagagttatccgcaccagtgattgttgacattgacagctctgagacaatgaaaccctgcaaggaaaactttactggatctgagaccctaaagcatttagtcctgcaattcctgcagcagtattactcgatctatgactctggagatcgacagggtctcctcggtgcttaccacgatgaggcctgcttctccttggctattcccttcgaccccaaggactcagccccgagcagcttgtgcaagtactttgaggatagcaggaatatgaaaacactcaaggacccctacctgaagggggaactgctgaggcgcacaaaacgtgacattgtggactccctcagtgcgttgcccaaaactcagcatgacctcagctccatcctggtggacgtgtggtgccagacggtgccttcaggacaatgagtggaactacactagagctggccaggccttcactatgctccagaccgagggcaagatccccgcggaggccttcaagcaaatctcctaaaaggagccctccgatgtcttctttgtcttcgttcacatcctctttgtttcctcttttcaccagcctaaggcctggctgaccaggaagccaacgttaacttgcaggccacgtgacataaccacccaaagagccagttgctctgtgtattcgccccactcatgatcaccattttattttcataataaagagtgacgttacacgttgta

SEQ ID NO: 161018 - DNA, 2884 bp, Homo sapiens
  Payload ID: 11453
  Gene Symbol: NXF2B
  Gene Name: nuclear RNA export factor 2B
  Uniprot ID: Q9GZY0
  ENST ID: ENST00000618302
  CDS Start-End: 801-2681
cctcctcctctgggatcttgaaaacgtagaattcccagagactctgctgatggacagaatccggctccaggaactggcattccagttgcaccagttaactgtcctggcctcagtcttgctagtggccagaagcttctctggtgaagttttattcagatcacctgaatttgtggatagactgaaatgcaccaccaaggccctaactgaggaatttatctccaggcctgaagagactatgctgagtgtgagtgaacaggtgtctcaggaagtccatcaaggccttaaggacatgggcctcactactctgagcagtgaaaacacagcatctcttctaggccaactccagaacatcaccaagaaagagaactgcattcgtagcattgttggagtctctgctacactttcctggaggcctcattctcattgaaaaggagttggcagaactgggctggaagtttctcaatctgatgcatcataatcagcagagtcatttttcacaaaacgaaatctttccagaagatcacgaataagagagatcaaagctaggcagcttgagttgaagtagagctggaagaaggagttttgaggactgtttcaaaaccactggactagatgatctctaaaggatcttatccaggacgcttcattgcatttggtcttcatttctccttagtctcctccaggctgacatttcctcaatctttattggtcttccacagccctgacacttttggagataccagtcagcatttccaagttcgttctgtgagactgtagtgtcaggacaaagcaacaacaaaatgtgctctactctaaagaagtgtgggacatacagaactgaagttgcagaatgccatgaccatggtagcacttttcaaggaagaaagaaaggtgggagttctttccgggataattttgacaagaggagctgtcattatgaacatggtgggtatgagcgcccgccttcacactgccaggagaatgatggaagcgtggagatgagggatgtccacaaggaccaacaactaagacacactccttatagcatccgatgcgaaagaagaatgaaatggcatagtgaagacgaaatccgtattaccacgtggagaaatagaaaacctccggagagaaaaatgagtcagaacacacaggatggatacacaaggaactggtttaaggtcacaattccttacgggataaagtatgacaaggcatggctaatgaattcaatccagagccattgcagtgaccgcttcactccggttgatttccactacgtccgaaatcgggcatgcttctttgtccaggatgctagcgctgcctccgcattgaaggatgtcagttataagatttatgatgatgagaaccaaaagatatgtatatttgtcaatcattctactgcgccctactctgtgaagaataagttgaagccaggccaaatggagatgctaaagctgaccatgaacaaacggtacaatgtctcccagcaagctcttgatctccagaatctccgctttgacccagacttgatgggccgtgacattgatataatcctgaatcgaagaaactgcatggctgccaccctgaagatcattgaaagaaatttccctgagctgttgtctttgaacttgtgcaacaacaagctgtaccagctggatggcctttctgacattacagagaaggctcccaaagtcaagaccctgaatctctccaaaaataagctggagtcggcgtgggagttgggcaaggtgaaagggctgaagctcgaagagctatggctagaagggaacccgttgtgcagcaccttctcggaccagtccgcctatgtaagtgccatccgggattgtttccccaagttgttacgcctggacggccgagagttatccgcaccagtgattgttgacattgacagctctgagacaatgaaaccctgcaaggaaaactttactggatctgagaccctaaagcatttagtcctgcaattcctgcagcagtattactcgatctatgactctggagatcgacagggtctcctcggtgcttaccacgatgaggcctgcttctccttggctattcccttcgaccccaaggactcagccccgagcagcttgtgcaagtactttgaggatagcaggaatatgaaaacactcaaggacccctacctgaagggggaactgctgaggcgcacaaaacgtgacattgtggactccctcagtgcgttgcccaaaactcagcatgacctcagctccatcctggtggacgtgtggtgccagacggaaaggatgctctgcttttctgtcaatggggttttcaaggaagtggaaggacagtctcagggttctgttctcgccttcacccggaccttcattgctacccctggcagcagttccagtctgtgcatcgtgaatgacgagctgtttgtgagggatgccagcccccaagagactcagagtgccttctccatcccagtgtccacactctcctccagctctgagccctccctctcccaggagcagcaggaaatggtgcaggctttctctgcccagtctgggatgaaactggagtggtctcagaagtgccttcaggacaatgagtggaactacactagagctggccaggccttcactatgctccagaccgagggcaagatccccgcggaggccttcaagcaaatctcctaaaaggagccctccgatgtcttctttgtcttcgttcacatcctctttgtttcctcttttcaccagcctaaggcctggctgaccaggaagccaacgttaacttgcaggccacgtgacataaccacccaaagagccagttgctctgtgtattcgccccactcatgatcaccattttattttcataataaagagtgacgttacacgtt

SEQ ID NO: 161019 - DNA, 1938 bp, Homo sapiens
  Payload ID: 11454
  Gene Symbol: NXF3
  Gene Name: nuclear RNA export factor 3
  Uniprot ID: Q9H4D5
  ENST ID: ENST00000395065
  CDS Start-End: 103-1698
ttgctctcgccttcgtcagcagccctcctcaatcttctccaaactcccgtccccaggccacacagattctcctcaagagagccctataaggacattggtaaaatgtcactgccttcaggacacactacgggtcacactgatcaagttgttcaaagaagagcaagatgttgggatatttaccaaaggagatttagcagtaggtctgaacctgtcaatcctggcatgcattcttcatcccatcagcagcaagatggagatgcagcaatgcatggtgcccacatggactctccagtaagatacactccctatactatttcaccctataatcggaaaggcagttttcgtaaacaagaccaaacccacgttaacatggagagagagcaaaaacctccagagagaagaatggaggggaacatgccggatgggaccttagggagctggttcaagatcacagttccctttggcataaaatacaatgagaagtggctgctgaatttgattcagaatgaatgcagtgtacccttcgtcccagttgagtttcactatgaaaacatgcatgccagcttctttgtggagaatgccagcatcgcctatgcactgaagaatgtcagtggcaagatttgggatgaggataatgaaaagatatcaatctttgtcaaccctgctggcataccccactttgtgcacagggagctgaagtcagaaaaggtggagcagataaagctggccatgaaccaacagtgtgatgtctcccaggaagctcttgatatccagagactcccattttacccagacatggtgaaccgtgatactaagatggcatcgaatcctagaaagtgcatggctgcctccctggacgtccatgaagagaacatacctacagtgatgtctgcaggggagatggacaagtggaaagggatagagccaggagagaagtgtgcggacagaagcccagtgtgcacgaccttctcggatacctccagcaacataaactccatcctggaattgttccccaaattattatgcctggatggccagcagtcacccagagcaactttatgtggtactgaagcccacaagaggttaccaacctgtaagggaagcttctttggatctgagatgttgaagaatctggtcctgcaattcctgcagcagtattacttgatctatgactctggagatcgacagggtctccttagtgcttaccacgatgaggcctgcttctccctgagcattcccttcaatcctgaggactcagccccgagcagcttctgcaagttcttcaaggatagcaggaatataaaaattctcaaggacccctaccttcggggggagctgctgaagcacacaaaacttgatattgtggactccctcagtgcgttgcctaaaactcagcatgacctcagctccttcctggtggacatgtggtaccagacggaatggatgctctgcttttctgtcaacggggtgttcaaggaagtggaaggacagtctcagggttctgttctcgccttcacccggaccttcattgctacccctggcagcagttccagtctgtgcatcgtgaatgacaagctctttgtgcgggataccagccaccaagggacccagagtgccttgttcaccctagtgcccacagccttctccagctccgtgcctgccttctcccaggagcagcagaaaatgctgccttcgtaacaaccagtgtgactacgtcagagctcctcatgttcttgcatggcccaagatgtatttccctgtgactgaaccaggagatctggctggggctaagaagccgaagcccaactcacagggctgactctcatccttccaaaggggccagttgttctgtgcacttgtccacccctgttacccccaggatctctgttccttttcacaataaagtatggtgtcttgttatgtcaaatccctgcaaaa

SEQ ID NO: 161020 - DNA, 1081 bp, Homo sapiens
  Payload ID: 11454
  Gene Symbol: NXF3
  Gene Name: nuclear RNA export factor 3
  ENST ID: ENST00000427570
  CDS Start-End: 1-1081
caatgagaagtggctgctgaatttgattcagaatgaatgcagtgtacccttcgtcccagttgagtttcactatgaaaacatgcatgccagcttctttgtggagaatgccagcatcgcctatgcactgaagaatgtcagtggcaagatttgggatgaggataatgaaaagatatcaatctttgtcaaccctgctggcataccccactttgtgcacagggagctgaagtcagaaaaggtggagcagataaagctggccatgaaccaacagtgtgatgtctcccaggaagctcttgatatccagagactcccattttacccagacatggtgaaccgtgatactaagatggcatcgaatcctagaaagtgcatggctgcctccctggacgtccatgaagagaacatacctacagtgatgtctgcaggggagatggacaagtggaaagggatagagccaggagagaagtgtgcggacagaagcccagtgtgcacgaccttctcggatacctccagcaacataaactccatcctggaattgttccccaaattattatgcctggatggccagcagtcacccagagcaactttatgtggtactgaagcccacaagaggttaccaacctgtaagggaagcttctttggatctgagatgttgaagaatctggtcctgcaattcctgcagcagtattacttgatctatgactctggagatcgacagggtctccttagtgcttaccacgatgaggcctgcttctccctgagcattcccttcaatcctgaggactcagccccgagcagcttctgcaagttcttcaaggatagcaggaatataaaaattctcaaggacccctaccttcggggggagctgctgaagcacacaaaacttgatattgtggactccctcagtgcgttgcctaaaactcagcatgacctcagctccttcctggtggacatgtggtaccagacggaatggatgctctgcttttctgtcaacggggtgttcaaggaagtctcagggttctgttctcgccttcacccggaccttcattgctacccctggcagcagttccagtctgtgcatcgt

SEQ ID NO: 161021 - DNA, 2062 bp, Homo sapiens
  Payload ID: 11455
  Gene Symbol: NXF5
  Gene Name: nuclear RNA export factor 5
  Uniprot ID: Q9H1B4
  ENST ID: ENST00000263032
  CDS Start-End: 361-1554
tccaggtttgttctggaaaacactaggtctgagagacagcaacaacaaaagtatactctaccattaaagaaataatgccgtatatgtagtagcacttttcaaagaaggaagaaaggtgggagtcatttccagggtaattttgacaagaggaactgtcattatgaacatggtgggtatgaacttctgccttcacgctgccaggagaatgatggaagcatggagatgagggatgtccacaaggaccgccaactaagacacactccttatagaatccaatgcaacaggaagctagtgaaatgacatagtgaagatcaaatccatattaccatttggagaaatagaaaacctccagagagaaaaatgaggcggaacacacaagatgaaaacatgaggaaatggttcaaggtcacaattccttatgggataaagtatgacaaggcatggctaatgaattcaatccagagcaattgcagtgtccccttcactccggttgatttccactacatccgaaatcgggcatgcttctttgtccaggttgctagtgctgcctctgcattgaaggatgtcagttataagatttatgatgatgagaaccaaaagatatgtatatttgtcagtcattttactgcgccctactctgtgaagaataagttgaagccaggccaaatggagatgctaaagctgaccatgaacaaacggtacaatgtctcccagcaagctcttgatctccagaatctccgctttgacccagacttgatgggccgtgacattgatataatcctgaatcgaagaaactgcatggctgccaccctgaagatcactgaaagaaatttccctgagctgttgtctttgaacttgtgcaacaacaaactgtaccagctggatggcctttctgacattacagagaaggctcccaaagtcaagaccctgaatctctccaaaaataagctggagtcggcgtgggagttgggcaaggtgaaagggctgaagctcgaagagctatggctagaagggaacccgttgtgcagcaccttctcggaccagtctgcctatgtaagtgccatccgggattgtttccccaagttgttacgcctggacggccgagagttatccgcaccagtgattgttgacattgacagctctgagacaatgaaaccctgcaaggaaaactttactggatctgagaccctaaagcatttagtcctgcaattcctgcagcagagcaacttgtgcaagtacttcaaggatagcaggaatataaaaattctcaaagacccctacctgcagaggaagctgctaaagcacacaaaatgtccacgaaacgtggactccctcagtgcattgcctgaaactcagcatgacttcacctccatcctggtggacatgtggtaccagaccgtgaacacctgcttcctccctcgggcaggcccagagagccagaggtggtggtgtttgttgtctctgaagtggaaggatggtctcagggttctgatcttgccttcatgtggaccttcatcactacctctggccgcaattccagtctgtgcatcatgaatgataagctgtttctgagggatgccagcccccaagagactcagagtgccttctccatcccagtgtccacactctcctccagctctgagccctccctctcctaggagcacaggaaatggtgcaggctttctctgcccagtctgggatgaaactagagtggtctcagaagtgccttcaggacaataagtggaactacattagagctggtcaggtcttcactatgctccagactgagggcaagatcccagtggaggccttcaagcaaatcccctaaaaggagccctttgatgtcatctttgtcttccttctcatcctctttgtttcctcttttcaccagcctaagaccactctaaggactggggttggaggcctggctgaccaagaagccaaagttaacttgcaggccacaggacatagccacctgaagagccagttgttctgtgtatttgccccactcatgatcaccgtttattttcataataaacagtgacgttacatgttgtatgtt

SEQ ID NO: 161022 - DNA, 1967 bp, Homo sapiens
  Payload ID: 11455
  Gene Symbol: NXF5
  Gene Name: nuclear RNA export factor 5
  Uniprot ID: Q9H1B4
  ENST ID: ENST00000332614
  CDS Start-End: 361-1269
tccaggtttgttctggaaaacactaggtctgagagacagcaacaacaaaagtatactctaccattaaagaaataatgccgtatatgtagtagcacttttcaaagaaggaagaaaggtgggagtcatttccagggtaattttgacaagaggaactgtcattatgaacatggtgggtatgaacttctgccttcacgctgccaggagaatgatggaagcatggagatgagggatgtccacaaggaccgccaactaagacacactccttatagaatccaatgcaacaggaagctagtgaaatgacatagtgaagatcaaatccatattaccatttggagaaatagaaaacctccagagagaaaaatgaggcggaacacacaagatgaaaacatgaggaaatggttcaaggtcacaatatgtatatttgtcagtcattttactgcgccctactctgtgaagaataagttgaagccaggccaaatggagatgctaaagctgaccatgaacaaacggtacaatgtctcccagcaagctcttgatctccagaatctccgctttgacccagacttgatgggccgtgacattgatataatcctgaatcgaagaaactgcatggctgccaccctgaagatcactgaaagaaatttccctgagctgttgtctttgaacttgtgcaacaacaaactgtaccagctggatggcctttctgacattacagagaaggctcccaaagtcaagaccctgaatctctccaaaaataagctggagtcggcgtgggagttgggcaaggtgaaagggctgaagctcgaagagctatggctagaagggaacccgttgtgcagcaccttctcggaccagtctgcctatgtaagtgccatccgggattgtttccccaagttgttacgcctggacggccgagagttatccgcaccagtgattgttgacattgacagctctgagacaatgaaaccctgcaaggaaaactttactggatctgagaccctaaagcatttagtcctgcaattcctgcagcagagcaacttgtgcaagtacttcaaggatagcaggaatataaaaattctcaaagacccctacctgcagaggaagctgctaaagcacacaaaatgtccacgaaacgtggactccctcagtgcattgcctgaaactcagcatgacttcacctccatcctggtggacatgtggtaccagaccgtgaacacctgcttcctccctcgggcaggcccagagagccagaggtgggtaggaggttaaggaggatcctgagcacctgagcgcttccttttcaggaaaggatgctctgcttttctgtcaacggagtgttcaaggaaggtggtggtgtttgttgtctctgaagtggaaggatggtctcagggttctgatcttgccttcatgtggaccttcatcactacctctggccgcaattccagtctgtgcatcatgaatgataagctgtttctgagggatgccagcccccaagagactcagagtgccttctccatcccagtgtccacactctcctccagctctgagccctccctctcctaggagcacaggaaatggtgcaggctttctctgcccagtctgggatgaaactagagtggtctcagaagtgccttcaggacaataagtggaactacattagagctggtcaggtcttcactatgctccagactgagggcaagatcccagtggaggccttcaagcaaatcccctaaaaggagccctttgatgtcatctttgtcttccttctcatcctctttgtttcctcttttcaccagcctaagaccactctaaggactggggttggaggcctggctgaccaagaagccaaagttaacttgcaggccacaggacatagccacctgaagagccagttgttctgtgtatttgccccactcatgatcaccgtttattttcataataaacagtgacgttacatgttgtatgtt

SEQ ID NO: 161023 - DNA, 1848 bp, Homo sapiens
  Payload ID: 11455
  Gene Symbol: NXF5
  Gene Name: nuclear RNA export factor 5
  Uniprot ID: Q9H1B4
  ENST ID: ENST00000361330
  CDS Start-End: 361-1278
tccaggtttgttctggaaaacactaggtctgagagacagcaacaacaaaagtatactctaccattaaagaaataatgccgtatatgtagtagcacttttcaaagaaggaagaaaggtgggagtcatttccagggtaattttgacaagaggaactgtcattatgaacatggtgggtatgaacttctgccttcacgctgccaggagaatgatggaagcatggagatgagggatgtccacaaggaccgccaactaagacacactccttatagaatccaatgcaacaggaagctagtgaaatgacatagtgaagatcaaatccatattaccatttggagaaatagaaaacctccagagagaaaaatgaggcggaacacacaagatgaaaacatgaggaaatggttcaaggtcacaatatgtatatttgtcagtcattttactgcgccctactctgtgaagaataagttgaagccaggccaaatggagatgctaaagctgaccatgaacaaacggtacaatgtctcccagcaagctcttgatctccagaatctccgctttgacccagacttgatgggccgtgacattgatataatcctgaatcgaagaaactgcatggctgccaccctgaagatcactgaaagaaatttccctgagctgttgtctttgaacttgtgcaacaacaaactgtaccagctggatggcctttctgacattacagagaaggctcccaaagtcaagaccctgaatctctccaaaaataagctggagtcggcgtgggagttgggcaaggtgaaagggctgaagctcgaagagctatggctagaagggaacccgttgtgcagcaccttctcggaccagtctgcctatgtaagtgccatccgggattgtttccccaagttgttacgcctggacggccgagagttatccgcaccagtgattgttgacattgacagctctgagacaatgaaaccctgcaaggaaaactttactggatctgagaccctaaagcatttagtcctgcaattcctgcagcagagcaacttgtgcaagtacttcaaggatagcaggaatataaaaattctcaaagacccctacctgcagaggaagctgctaaagcacacaaaatgtccacgaaacgtggactccctcagtgcattgcctgaaactcagcatgacttcacctccatcctggtggacatgtggtaccagaccgtgaacacctgcttcctccctcgggcaggcccagagagccagagtggaaggatggtctcagggttctgatcttgccttcatgtggaccttcatcactacctctggccgcaattccagtctgtgcatcatgaatgataagctgtttctgagggatgccagcccccaagagactcagagtgccttctccatcccagtgtccacactctcctccagctctgagccctccctctcctaggagcacaggaaatggtgcaggctttctctgcccagtctgggatgaaactagagtggtctcagaagtgccttcaggacaataagtggaactacattagagctggtcaggtcttcactatgctccagactgagggcaagatcccagtggaggccttcaagcaaatcccctaaaaggagccctttgatgtcatctttgtcttccttctcatcctctttgtttcctcttttcaccagcctaagaccactctaaggactggggttggaggcctggctgaccaagaagccaaagttaacttgcaggccacaggacatagccacctgaagagccagttgttctgtgtatttgccccactcatgatcaccgtttattttcataataaacagtgacgttacatgttgtatgtt

SEQ ID NO: 161024 - DNA, 2037 bp, Homo sapiens
  Payload ID: 11455
  Gene Symbol: NXF5
  Gene Name: nuclear RNA export factor 5
  Uniprot ID: Q9H1B4
  ENST ID: ENST00000372803
  CDS Start-End: 361-1467
tccaggtttgttctggaaaacactaggtctgagagacagcaacaacaaaagtatactctaccattaaagaaataatgccgtatatgtagtagcacttttcaaagaaggaagaaaggtgggagtcatttccagggtaattttgacaagaggaactgtcattatgaacatggtgggtatgaacttctgccttcacgctgccaggagaatgatggaagcatggagatgagggatgtccacaaggaccgccaactaagacacactccttatagaatccaatgcaacaggaagctagtgaaatgacatagtgaagatcaaatccatattaccatttggagaaatagaaaacctccagagagaaaaatgaggcggaacacacaagatgaaaacatgaggaaatggttcaaggtcacaattccttatgggataaagtatgacaaggcatggctaatgaattcaatccagagcaattgcagtgtccccttcactccggttgatttccactacatccgaaatcgggcatgcttctttgtccaggttgctagtgctgcctctgcattgaaggatgtcagttataagatttatgatgatgagaaccaaaagatatgtatatttgtcagtcattttactgcgccctactctgtgaagaataagttgaagccaggccaaatggagatgctaaagctgaccatgaacaaacggtacaatgtctcccagcaagctcttgatctccagaatctccgctttgacccagacttgatgggccgtgacattgatataatcctgaatcgaagaaactgcatggctgccaccctgaagatcactgaaagaaatttccctgagctgttgtctttgaacttgtgcaacaacaaactgtaccagctggatggcctttctgacattacagagaaggctcccaaagtcaagaccctgaatctctccaaaaataagctggagtcggcgtgggagttgggcaaggtgaaagggctgaagctcgaagagctatggctagaagggaacccgttgtgcagcaccttctcggaccagtctgcctatgtaagtgccatccgggattgtttccccaagttgttacgcctggacggccgagagttatccgcaccagtgattgttgacattgacagctctgagacaatgaaaccctgcaaggaaaactttactggatctgagaccctaaagcatttagtcctgcaattcctgcagcagagcaacttgtgcaagtacttcaaggatagcaggaatataaaaattctcaaagacccctacctgcagaggaagctgctaaagcacacaaaatgtccacgaaacgtggactccctcagtgcattgcctgaaactcagcatgacttcacctccatcctggtggacatgtggtaccagaccgtgaacacctgcttcctccctcgggcaggcccagagagccagagtggaaggatggtctcagggttctgatcttgccttcatgtggaccttcatcactacctctggccgcaattccagtctgtgcatcatgaatgataagctgtttctgagggatgccagcccccaagagactcagagtgccttctccatcccagtgtccacactctcctccagctctgagccctccctctcctaggagcacaggaaatggtgcaggctttctctgcccagtctgggatgaaactagagtggtctcagaagtgccttcaggacaataagtggaactacattagagctggtcaggtcttcactatgctccagactgagggcaagatcccagtggaggccttcaagcaaatcccctaaaaggagccctttgatgtcatctttgtcttccttctcatcctctttgtttcctcttttcaccagcctaagaccactctaaggactggggttggaggcctggctgaccaagaagccaaagttaacttgcaggccacaggacatagccacctgaagagccagttgttctgtgtatttgccccactcatgatcaccgtttattttcataataaacagtgacgttacatgttgtatgtt

SEQ ID NO: 161025 - DNA, 1973 bp, Homo sapiens
  Payload ID: 11455
  Gene Symbol: NXF5
  Gene Name: nuclear RNA export factor 5
  Uniprot ID: Q9H1B4
  ENST ID: ENST00000493509
  CDS Start-End: 361-867
tccaggtttgttctggaaaacactaggtctgagagacagcaacaacaaaagtatactctaccattaaagaaataatgccgtatatgtagtagcacttttcaaagaaggaagaaaggtgggagtcatttccagggtaattttgacaagaggaactgtcattatgaacatggtgggtatgaacttctgccttcacgctgccaggagaatgatggaagcatggagatgagggatgtccacaaggaccgccaactaagacacactccttatagaatccaatgcaacaggaagctagtgaaatgacatagtgaagatcaaatccatattaccatttggagaaatagaaaacctccagagagaaaaatgaggcggaacacacaagatgaaaacatgaggaaatggttcaaggtcacaattccttatgggataaagtatgacaaggcatggctaatgaattcaatccagagcaattgcagtgtccccttcactccggttgatttccactacatccgaaatcgggcatgcttctttgtccaggttgctagtgctgcctctgcattgaaggatgtcagttataagatttatgatgatgagaaccaaaagatatgtatatttgtcagtcattttactgcgccctactctgtgaagaataagttgaagccaggccaaatggagatgctaaagctgaccatgaacaaacggtacaatgtctcccagcaagctcttgatctccagaatctccgctttgacccagacttgatgggccgtgacattgatataatcctgaatcgaagaaactgcatggctgccaccctgaagatcactgaaagaaatttccctgagagaaggctcccaaagtcaagaccctgaatctctccaaaaataagctggagtcggcgtgggagttgggcaaggtgaaagggctgaagctcgaagagctatggctagaagggaacccgttgtgcagcaccttctcggaccagtctgcctatgtaagtgccatccgggattgtttccccaagttgttacgcctggacggccgagagttatccgcaccagtgattgttgacattgacagctctgagacaatgaaaccctgcaaggaaaactttactggatctgagaccctaaagcatttagtcctgcaattcctgcagcagagcaacttgtgcaagtacttcaaggatagcaggaatataaaaattctcaaagacccctacctgcagaggaagctgctaaagcacacaaaatgtccacgaaacgtggactccctcagtgcattgcctgaaactcagcatgacttcacctccatcctggtggacatgtggtaccagaccgtgaacacctgcttcctccctcgggcaggcccagagagccagagtggaaggatggtctcagggttctgatcttgccttcatgtggaccttcatcactacctctggccgcaattccagtctgtgcatcatgaatgataagctgtttctgagggatgccagcccccaagagactcagagtgccttctccatcccagtgtccacactctcctccagctctgagccctccctctcctaggagcacaggaaatggtgcaggctttctctgcccagtctgggatgaaactagagtggtctcagaagtgccttcaggacaataagtggaactacattagagctggtcaggtcttcactatgctccagactgagggcaagatcccagtggaggccttcaagcaaatcccctaaaaggagccctttgatgtcatctttgtcttccttctcatcctctttgtttcctcttttcaccagcctaagaccactctaaggactggggttggaggcctggctgaccaagaagccaaagttaacttgcaggccacaggacatagccacctgaagagccagttgttctgtgtatttgccccactcatgatcaccgtttattttcataataaacagtgacgttacatgttgtatgtt

SEQ ID NO: 161026 - DNA, 1348 bp, Homo sapiens
  Payload ID: 11455
  Gene Symbol: NXF5
  Gene Name: nuclear RNA export factor 5
  Uniprot ID: Q9H1B4
  ENST ID: ENST00000473265
  CDS Start-End: 182-1279
acttctgccttcacgctgccaggagaatgatggaagcatggagatgagggatgtccacaaggaccgccaactaagacacactccttatagaatccaatgcaacaggaagctagtgaaatgacatagtgaagatcaaatccatattaccatttggagaaatagaaaacctccagagagaaaaatgaggcggaacacacaagatgaaaacatgaggaaatggttcaaggtcacaattccttatgggataaagtatgacaaggcatggctaatgaattcaatccagagcaattgcagtgtccccttcactccggttgatttccactacatccgaaatcgggcatgcttctttgtccaggttgctagtgctgcctctgcattgaaggatgtcagttataagatttatgatgatgagaaccaaaagatatgtatatttgtcagtcattttactgcgccctactctgtgaagaataagttgaagccaggccaaatggagatgctaaagctgaccatgaacaaacggtacaatgtctcccagcaagctcttgatctccagaatctccgctttgacccagacttgatgggccgtgacattgatataatcctgaatcgaagaaactgcatggctgccaccctgaagatcactgaaagaaatttccctgagctgttgtctttgaacttgtgcaacaacaaactgtaccagctggatggcctttctgacattacagagaaggctcccaaagtcaagaccctgaatctctccaaaaataagctggagtcggcgtgggagttgggcaaggtgaaagggctgaagctcgaagagctatggctagaagggaacccgttgtgcagcaccttctcggaccagtctgcctatgtaagtgccatccgggattgtttccccaagttgttacgcctggacggccgagagttatccgcaccagtgattgttgacattgacagctctgagacaatgaaaccctgcaaggaaaactttactggatctgagaccctaaagcatttagtcctgcaattcctgcagcagagcaacttgtgcaagtacttcaaggatagcaggaatataaaaattctcaaagacccctacctgcagaggaagctgctaaagcacacaaaatgtccacgaaacgtggactccctcagtgcattgcctgaaactcagcatgacttcacctccatcctggtggacatgtggtaccagaccgtgaacacctgcttcctccctcgggcaggcccagagagccagagcctaagaccactctaaggactggggttggaggcctggctgaccaagaagccaaagttaacttgcaggccacaggacatagccacc

SEQ ID NO: 161027 - DNA, 1991 bp, Homo sapiens
  Payload ID: 11455
  Gene Symbol: NXF5
  Gene Name: nuclear RNA export factor 5
  Uniprot ID: Q9H1B4
  ENST ID: ENST00000537026
  CDS Start-End: 290-1483
agaatgccgtatatgtagtagcacttttcaaagaaggaagaaaggtgggagtcatttccagggtaattttgacaagaggaactgtcattatgaacatggtgggtatgaacttctgccttcacgctgccaggagaatgatggaagcatggagatgagggatgtccacaaggaccgccaactaagacacactccttatagaatccaatgcaacaggaagctagtgaaatgacatagtgaagatcaaatccatattaccatttggagaaatagaaaacctccagagagaaaaatgaggcggaacacacaagatgaaaacatgaggaaatggttcaaggtcacaattccttatgggataaagtatgacaaggcatggctaatgaattcaatccagagcaattgcagtgtccccttcactccggttgatttccactacatccgaaatcgggcatgcttctttgtccaggttgctagtgctgcctctgcattgaaggatgtcagttataagatttatgatgatgagaaccaaaagatatgtatatttgtcagtcattttactgcgccctactctgtgaagaataagttgaagccaggccaaatggagatgctaaagctgaccatgaacaaacggtacaatgtctcccagcaagctcttgatctccagaatctccgctttgacccagacttgatgggccgtgacattgatataatcctgaatcgaagaaactgcatggctgccaccctgaagatcactgaaagaaatttccctgagctgttgtctttgaacttgtgcaacaacaaactgtaccagctggatggcctttctgacattacagagaaggctcccaaagtcaagaccctgaatctctccaaaaataagctggagtcggcgtgggagttgggcaaggtgaaagggctgaagctcgaagagctatggctagaagggaacccgttgtgcagcaccttctcggaccagtctgcctatgtaagtgccatccgggattgtttccccaagttgttacgcctggacggccgagagttatccgcaccagtgattgttgacattgacagctctgagacaatgaaaccctgcaaggaaaactttactggatctgagaccctaaagcatttagtcctgcaattcctgcagcagagcaacttgtgcaagtacttcaaggatagcaggaatataaaaattctcaaagacccctacctgcagaggaagctgctaaagcacacaaaatgtccacgaaacgtggactccctcagtgcattgcctgaaactcagcatgacttcacctccatcctggtggacatgtggtaccagaccgtgaacacctgcttcctccctcgggcaggcccagagagccagaggtggtggtgtttgttgtctctgaagtggaaggatggtctcagggttctgatcttgccttcatgtggaccttcatcactacctctggccgcaattccagtctgtgcatcatgaatgataagctgtttctgagggatgccagcccccaagagactcagagtgccttctccatcccagtgtccacactctcctccagctctgagccctccctctcctaggagcacaggaaatggtgcaggctttctctgcccagtctgggatgaaactagagtggtctcagaagtgccttcaggacaataagtggaactacattagagctggtcaggtcttcactatgctccagactgagggcaagatcccagtggaggccttcaagcaaatcccctaaaaggagccctttgatgtcatctttgtcttccttctcatcctctttgtttcctcttttcaccagcctaagaccactctaaggactggggttggaggcctggctgaccaagaagccaaagttaacttgcaggccacaggacatagccacctgaagagccagttgttctgtgtatttgccccactcatgatcaccgtttattttcataataaacagtgacgttacatgttgtatgtt

SEQ ID NO: 161028 - DNA, 2541 bp, Homo sapiens
  Payload ID: 11456
  Gene Symbol: NSRP1
  Gene Name: nuclear speckle splicing regulatory protein 1
  Uniprot ID: Q9H0G5
  ENST ID: ENST00000247026
  CDS Start-End: 64-1740
cgtgacgacatcggcgtcagcgtcacggaggcgtcggccacgttcagcggacacgggagcaagatggcgattccgggcaggcagtatgggcttattttgccaaagaaaacacagcagttgcaccctgttttgcaaaaaccatcagtgtttgggaatgattctgatgatgatgatgagacctctgtgagtgaaagccttcagagggaagctgctaagaagcaggccatgaaacagaccaaactggaaatccagaaggcccttgcagaagatgctactgtgtatgaatatgacagtatttatgatgaaatgcagaaaaaaaaggaggaaaataatcccaaattgcttttggggaaagacagaaagcccaagtatattcacaacttgctaaaagcagttgagatcagaaaaaaggaacaggaaaaaagaatggaaaagaaaatacagagagaacgagaaatggaaaagggggagtttgatgataaagaagcatttgtgacatctgcatataagaaaaaactgcaagagagagctgaagaagaagaaagagaaaagagggctgctgcactggaagcatgtttggatgtaaccaagcagaaagatctcagtggattttataggcacctattaaatcaagcagttggtgaagaggaagtacctaaatgcagctttcgtgaagccagatctggtataaaggaagaaaaatcaaggggcttctccaatgaagtaagttcaaaaaacagaataccacaagagaaatgcattcttcaaactgatgtgaaagtagaggaaaacccagatgcagacagtgacttcgatgctaagagcagtgcggatgatgaaatagaagaaactagagtgaactgcagaagggaaaaggtcatagagacccctgagaatgacttcaagcaccacaggagtcaaaaccactctcggtcacctagtgaagaaagagggcacagtaccaggcaccacacgaaaggatcacgaacgtcgagaggacatgagaaaagggaagatcagcaccagcagaagcaatccagagaccaagagaaccattacactgaccgtgattaccggaaagaaagggattctcataggcacagagaggccagtcatagagattcccattggaagaggcatgaacaggaagataaaccaagggcgagggaccaaagagaaagaagtgacagagtatggaaaagggagaaagatagggagaaatattcccaaagagaacaagaaagagatagacaacaaaatgatcagaaccgacccagtgagaaaggagagaaggaagagaaaagcaaagcaaaggaagagcatatgaaagtaaggaaggaaagatatgaaaataatgataaatacagagatagagaaaaacgagaggtaggtgttcagtcttcagaaagaaatcaagacagaaaggaaagcagcccaaattctagggcaaaggataaatttcttgaccaagaaagatccaacaaaatgagaaacatggcaaaggacaaagaaagaaaccaagagaaaccctctaattctgaatcatcactgggagcaaaacacagactcacagaggaagggcaagagaagggtaaagaacaagagagaccacctgaggcagtgagcaagtttgcaaagcggaacaatgaagaaactgtaatgtcagctagagacaggtacttggccaggcagatggcgcgggttaatgcaaagacctatattgagaaagaagatgattgatggctaccccaagagaaagatttaaggaagcacagaaaactgtaattcctggaacctgctgcgtaaaaccataaaggagtgtgttaccagtagtttggagggcatttttaaatttattttcaaaattttaagttaaaagtcagtcttacagcttggatgtttggatgtggatgtttggctgaatttatatatagtgtgtactcatcaataccacattctttgttgtattcaagaaccgttaagagtgtgctaattccctgtaggtacataatgaggaaaatttgctccactacaaccattaaaaaataattttggccagatacggtagctcgtgcctgtaataccaacattttgggaggccaaggcagaaggatattgaggctaggcattcaagaccagcctaggcaggataataagaccttgtctctatttaaaaaacaaaaagcctagcatggtagtccatgcctgtagtcccagctgttcgagaggctgaggcaagaagatcacttgagcctaggaatttgatgttacagtgaggtatgatcatgccactgcactccaacctgggcaacagaatgagaccctgtctctaaaaaattttttttaaataaataatttaactcttctaataatgttttgttgcaggaaatgtatttcagataaaatatggatttgaaaaacagaaaatatactttatgttctgaaatttgtatttaagtataaaatgtgaatcatcttgtctaaatagcttacagcatagttggcttaaatgaaaataaaatgatatgcttatacatttta

SEQ ID NO: 161029 - DNA, 1800 bp, Homo sapiens
  Payload ID: 11456
  Gene Symbol: NSRP1
  Gene Name: nuclear speckle splicing regulatory protein 1
  ENST ID: ENST00000394826
  CDS Start-End: 25-177
acgttcagcggacacgggagcaagatggcgattccgggcaggcaatggggtttcactcttgttgcccaggctggagtgcaatggtgcaatctcggctcaccgcaacctccacctcctgggttcaagcgattttcctgcctcagcctcccaaatagctgcaattacagacctctgtgagtgaaagccttcagagggaagctgctaagaagcaggccatgaaacagaccaaactggaaatccagaaggcccttgcagaagatgctactgtgtatgaatatgacagtatttatgatgaaatgcagaaaaaaaaggaggaaaataatcccaaattgcttttggggaaagacagaaagcccaagtatattcacaacttgctaaaagcagttgagatcagaaaaaaggaacaggaaaaaagaatggaaaagaaaatacagagagaacgagaaatggaaaagggggagtttgatgataaagaagcatttgtgacatctgcatataagaaaaaactgcaagagagagctgaagaagaagaaagagaaaagagggctgctgcactggaagcatgtttggatgtaaccaagcagaaagatctcagtggattttataggcacctattaaatcaagcagttggtgaagaggaagtacctaaatgcagctttcgtgaagccagatctggtataaaggaagaaaaatcaaggggcttctccaatgaagtaagttcaaaaaacagaataccacaagagaaatgcattcttcaaactgatgtgaaagtagaggaaaacccagatgcagacagtgacttcgatgctaagagcagtgcggatgatgaaatagaagaaactagagtgaactgcagaagggaaaaggtcatagagacccctgagaatgacttcaagcaccacaggagtcaaaaccactctcggtcacctagtgaagaaagagggcacagtaccaggcaccacacgaaaggatcacgaacgtcgagaggacatgagaaaagggaagatcagcaccagcagaagcaatccagagaccaagagaaccattacactgaccgtgattaccggaaagaaagggattctcataggcacagagaggccagtcatagagattcccattggaagaggcatgaacaggaagataaaccaagggcgagggaccaaagagaaagaagtgacagagtatggaaaagggagaaagatagggagaaatattcccaaagagaacaagaaagagatagacaacaaaatgatcagaaccgacccagtgagaaaggagagaaggaagagaaaagcaaagcaaaggaagagcatatgaaagtaaggaaggaaagatatgaaaataatgataaatacagagatagagaaaaacgagaggtaggtgttcagtcttcagaaagaaatcaagacagaaaggaaagcagcccaaattctagggcaaaggataaatttcttgaccaagaaagatccaacaaaatgagaaacatggcaaaggacaaagaaagaaaccaagagaaaccctctaattctgaatcatcactgggagcaaaacacagactcacagaggaagggcaagagaagggtaaagaacaagagagaccacctgaggcagtgagcaagtttgcaaagcggaacaatgaagaaactgtaatgtcagctagagacaggtacttggccaggcagatggcgcgggttaatgcaaagacctatattgagaaagaagatgattgatggctaccccaagagaaagatttaaggaagcacagaaaactgtaattcctggaacctgctgcgtaaaacc

SEQ ID NO: 161030 - DNA, 583 bp, Homo sapiens
  Payload ID: 11456
  Gene Symbol: NSRP1
  Gene Name: nuclear speckle splicing regulatory protein 1
  ENST ID: ENST00000584154
  CDS Start-End: 26-154
cacgttcagcggacacgggagcaagatggcgattccgggcaggcagtatgggcttattttgccaaagaaaacacagcagttgcaccctgttttgcaaaaaccatcagtgtttgggaatgattctgatgatgatgatgaggtttttggcatttaatcgtcatccttagtggtaattgttaaagtacctttatttagaaaattgagaatcaaatgaccttcaaaagatcatcagtttttcctgactttttcagacctctgtgagtgaaagccttcagagggaagctgctaagaagcaggccatgaaacagaccaaactggaaatccagaaggcccttgcagaagatgctactgtgtatgaatatgacagtatttatgatgaaatgcagaaaaaaaaggaggaaaataatcccaaattgcttttggggaaagacagaaagcccaagtatattcacaacttgctaaaagcagttgagatcagaaaaaaggaacaggaaaaaagaatggaaaagaaaatacagagagaacgagaaatggaaaagggggagtttgatgataaagaagcatttgtgacatctgcatataa

SEQ ID NO: 161031 - DNA, 564 bp, Homo sapiens
  Payload ID: 11456
  Gene Symbol: NSRP1
  Gene Name: nuclear speckle splicing regulatory protein 1
  ENST ID: ENST00000584317
  CDS Start-End: 15-239
gacacgggagcaagatggcgattccgggcaggcagtatgggcttattttgccaaagaaaacacagcagttgcaccctgttttgcaaaaaccatcagtgtttgggaatgattctgatgatgatgatgagatggggtttcactcttgttgcccaggctggagtgcaatggtgcaatctcggctcaccgcaacctccacctcctgggttcaagcgattttcctgcctcagcctcccaaatagctgcaattacagtagagacggggcttcatcaggttggccacgctgatctcaaactcctgagctcaagtgatccagccgcctcagcctcccaaagcgctgggattacagacctctgtgagtgaaagccttcagagggaagctgctaagaagcaggccatgaaacagaccaaactggaaatccagaaggcccttgcagaagatgctactgtgtatgaatatgacagtatttatgatgaaatgcagaaaaaaaaggaggaaaataatcccaaattgcttttggggaaagacagaaagcccaagtatattcacaacttgctaaaagcag

SEQ ID NO: 161032 - DNA, 482 bp, Homo sapiens
  Payload ID: 11456
  Gene Symbol: NSRP1
  Gene Name: nuclear speckle splicing regulatory protein 1
  ENST ID: ENST00000584423
  CDS Start-End: 64-342
cgtgacgacatcggcgtcagcgtcacggaggcgtcggccacgttcagcggacacgggagcaagatggcgattccgggcaggcagtatgggcttattttgccaaagaaaacacagcagttgcaccctgttttgcaaaaaccatcagtgtttgggaatgattctgatgatgatgatgaggatcttgctctttcacccaggatggagtgcaatttgtgcagtcacaactcatggcagcctcaacctcccaggccgaagcacgcctctcacctcagcctcccaagtagctgggaccacaggcacacaccaccatgcctggctaattttttaatttattttttgtagagacagagtctcactgcgttgcctaggctgctcttgaactcctgggctcaagtgatccacctgctttggcctcccaaagtgttgggcttataggtgtgagccactgcacctggctgtgaacttagtatgtgtatatatgt

SEQ ID NO: 161033 - DNA, 1242 bp, Homo sapiens
  Payload ID: 11456
  Gene Symbol: NSRP1
  Gene Name: nuclear speckle splicing regulatory protein 1
  ENST ID: ENST00000475652
  CDS Start-End: 16-141
ggacacgggagcaagatggcgattccgggcaggcagaatattgttctgagaagccacagaaaaagggtatgggcttattttgccaaagaaaacacagcagttgcaccctgttttgcaaaaaccatcagtgtttgggaatgattctgatgatgatgatgagacctctgtgagtgaaagccttcagagggaagctgctaagaagcaggccatgaaacagaccaaactggaaatccagaaggcccttgcagaagatgctactgtgtatgaatatgacagtatttatgatgaaatgcagaaaaaaaaggaggaaaataatcccaaattgcttttggggaaagacagaaagcccaagtatattcacaacttgctaaaagcagttgagatcagaaaaaaggaacaggaaaaaagaatggaaaagaaaatacagagagaacgagaaatggaaaagggggagtttgatgataaagaagcatttgtgacatctgcatataagaaaaaactgcaagagagagctgaagaagaagaaagagaaaagagggctgctgcactggaagcatgtttggatgtaaccaagcagaaagatctcagtggattttataggcacctattaaatcaagcagttggtgaagaggaagtacctaaatgcagctttcgtgaagccagatctggtataaaggaagaaaaatcaaggggcttctccaatgaagtaagttcaaaaaacagaataccacaagagaaatgcattcttcaaactgatgtgaaagtagaggaaaacccagatgcagacagtgacttcgatgctaagagcagtgcggatgatgaaatagaagaaactagagtgaactgcagaagggaaaaggtcatagagacccctgagaatgacttcaagcaccacaggagtcaaaaccactctcggtcacctagtgaagaaagagggcacagtaccaggcaccacacgaaaggatcacgaacgtcgagaggacatgagaaaagggaagatcagcaccagcagaagcaatccagagaccaagagaaccattacactgaccgtgattaccggaaagaaagggattctcataggcacagagaggccagtcatagagattcccattggaagaggcatgaacaggaagataaaccaagggcgagggaccaaagagaaagaagtgacagagtatggaaaagggagaaagatagggagaaatattcccaaagagaacaagaaagagatagacaacaaaa

SEQ ID NO: 161034 - DNA, 582 bp, Homo sapiens
  Payload ID: 11456
  Gene Symbol: NSRP1
  Gene Name: nuclear speckle splicing regulatory protein 1
  ENST ID: ENST00000585881
  CDS Start-End: 390-582
cgagaagtcctgaggaacatagattcccctcccccgtacattttcccggatggaagcccgaagtttgagggagaaacttgtgaggaaataaaggaagttaggctgaggggcagagagcgagacttttctattttccaaaagctcggtctgaggcccctcagtcttgcttcctaacccgcgcttgagtttctccccgcttggatgctctcaggggcagtgtgaagagagacagttcctggcttccttagagggccttgttctccttggcagaagctcaagtcctgattcccgcccttccttctcgttttaggaatattgttctgagaagccacagaaaaaggacctctgtgagtgaaagccttcagagggaagctgctaagaagcaggccatgaaacagaccaaactggaaatccagaaggcccttgcagaagatgctactgtgtatgaatatgacagtatttatgatgaaatgcagaaaaaaaaggaggaaaataatcccaaattgcttttggggaaagacagaaagcccaagtatattcacaacttgctaaaagcagttgagatcagaaaaaaggaacagg

SEQ ID NO: 161035 - DNA, 497 bp, Homo sapiens
  Payload ID: 11456
  Gene Symbol: NSRP1
  Gene Name: nuclear speckle splicing regulatory protein 1
  ENST ID: ENST00000588614
  CDS Start-End: 185-497
aacataaaggtttaatttctatttcaaaaaaaatatatgcaggtatgggcttattttgccaaagaaaacacagcagttgcaccctgttttgcaaaaaccatcagtgtttgggaatgattctgatgatgatgatgagacctctgtgagtgaaagccttcagagggaagctgctaagaagcaggccatgaaacagaccaaactggaaatccagaaggcccttgcagaagatgctactgtgtatgaatatgacagtatttatgatgaaatgcagaaaaaaaaggaggaaaataatcccaaattgcttttggggaaagacagaaagcccaagtatattcacaacttgctaaaagcagttgagatcagaaaaaaggaacaggaaaaaagaatggaaaagaaaatacagagagaacgagaaatggaaaagggggagtttgatgataaagaagcatttgtgacatctgcatataagaaaaaactgcaagagagagctgaagaag

SEQ ID NO: 161036 - DNA, 540 bp, Homo sapiens
  Payload ID: 11456
  Gene Symbol: NSRP1
  Gene Name: nuclear speckle splicing regulatory protein 1
  ENST ID: ENST00000479218
  CDS Start-End: 18-143
gcggacacgggagcaagatggcgattccgggcaggcagaatattgttctgagaagccacagaaaaagggtatgggcttattttgccaaagaaaacacagcagttgcaccctgttttgcaaaaaccatcagtgtttgggaatgattctgatgatgatgatgaggatcttgctctttcacccaggatggagtgcaatttgtgcagtcacaactcatggcagcctcaacctcccaggccgaagcacgcctctcacctcagcctcccaagtagctgggaccacaggcacacaccaccatgcctggctaattttttaatttattttttgtagagacagagtctcactgcgttgcctaggctgctcttgaactcctgggctcaagtgatccacctgctttggcctcccaaagtgttgggcttataggtgtgagccactgcacctggctgtgaacttagtatgtgtatatatgtatatgtagttatatatatatataaaattatatatataaaattactcagaagccatagtatattccttttatag

SEQ ID NO: 161037 - DNA, 368 bp, Homo sapiens
  Payload ID: 11456
  Gene Symbol: NSRP1
  Gene Name: nuclear speckle splicing regulatory protein 1
  ENST ID: ENST00000589608
  CDS Start-End: 1-205
gtatgggcttattttgccaaagaaaacacagcagttgcaccctgttttgcaaaaaccatcagtgtttgggaatgattctgatgatgatgatgagatggggtttcactcttgttgcccaggctggagtgcaatggtgcaatctcggctcaccgcaacctccacctcctgggttcaagcgattttcctgcctcagcctcccaaatagctgcaattacagacctctgtgagtgaaagccttcagagggaagctgctaagaagcaggccatgaaacagaccaaactggaaatccagaaggcccttgcagaagatgctactgtgtatgaatatgacagtatttatgatgaaatgcagaaaaaaaaggaggaaa

SEQ ID NO: 161038 - DNA, 774 bp, Homo sapiens
  Payload ID: 11456
  Gene Symbol: NSRP1
  Gene Name: nuclear speckle splicing regulatory protein 1
  ENST ID: ENST00000580103
  CDS Start-End: 304-774
cttgagtttctccccgcttggatgctctcaggggcagtgtgaagagagacagttcctggcttccttagagggccttgttctccttggcagaagctcaagtcctgattcccgcccttccttctcgttttaggaatattgttctgagaagccacagaaaaagggtatgggcttattttgccaaagaaaacacagcagttgcaccctgttttgcaaaaaccatcagtgtttgggaatgattctgatgatgatgatgagacctctgtgagtgaaagccttcagagggaagctgctaagaagcaggccatgaaacagaccaaactggaaatccagaaggcccttgcagaagatgctactgtgtatgaatatgacagtatttatgatgaaatgcagaaaaaaaaggaggaaaataatcccaaattgcttttggggaaagacagaaagcccaagtatattcacaacttgctaaaagcagttgagatcagaaaaaaggaacaggaaaaaagaatggaaaagaaaatacagagagaacgagaaatggaaaagggggagtttgatgataaagaagcatttgtgacatctgcatataagaaaaaactgcaagagagagctgaagaagaagaaagagaaaagagggctgctgcactggaagcatgtttggatgtaaccaagcagaaagatctcagtggattttataggcacctattaaatcaagcagttggtgaagaggaagtacctaaatgcagctttcgtgaagccagatctggtataaaggaa

SEQ ID NO: 161039 - DNA, 2420 bp, Homo sapiens
  Payload ID: 11456
  Gene Symbol: NSRP1
  Gene Name: nuclear speckle splicing regulatory protein 1
  ENST ID: ENST00000612959
  CDS Start-End: 106-1620
ggaggcgtcggccacgttcagcggacacgggagcaagatggcgattccgggcaggcaacctctgtgagtgaaagccttcagagggaagctgctaagaagcaggccatgaaacagaccaaactggaaatccagaaggcccttgcagaagatgctactgtgtatgaatatgacagtatttatgatgaaatgcagaaaaaaaaggaggaaaataatcccaaattgcttttggggaaagacagaaagcccaagtatattcacaacttgctaaaagcagttgagatcagaaaaaaggaacaggaaaaaagaatggaaaagaaaatacagagagaacgagaaatggaaaagggggagtttgatgataaagaagcatttgtgacatctgcatataagaaaaaactgcaagagagagctgaagaagaagaaagagaaaagagggctgctgcactggaagcatgtttggatgtaaccaagcagaaagatctcagtggattttataggcacctattaaatcaagcagttggtgaagaggaagtacctaaatgcagctttcgtgaagccagatctggtataaaggaagaaaaatcaaggggcttctccaatgaagtaagttcaaaaaacagaataccacaagagaaatgcattcttcaaactgatgtgaaagtagaggaaaacccagatgcagacagtgacttcgatgctaagagcagtgcggatgatgaaatagaagaaactagagtgaactgcagaagggaaaaggtcatagagacccctgagaatgacttcaagcaccacaggagtcaaaaccactctcggtcacctagtgaagaaagagggcacagtaccaggcaccacacgaaaggatcacgaacgtcgagaggacatgagaaaagggaagatcagcaccagcagaagcaatccagagaccaagagaaccattacactgaccgtgattaccggaaagaaagggattctcataggcacagagaggccagtcatagagattcccattggaagaggcatgaacaggaagataaaccaagggcgagggaccaaagagaaagaagtgacagagtatggaaaagggagaaagatagggagaaatattcccaaagagaacaagaaagagatagacaacaaaatgatcagaaccgacccagtgagaaaggagagaaggaagagaaaagcaaagcaaaggaagagcatatgaaagtaaggaaggaaagatatgaaaataatgataaatacagagatagagaaaaacgagaggtaggtgttcagtcttcagaaagaaatcaagacagaaaggaaagcagcccaaattctagggcaaaggataaatttcttgaccaagaaagatccaacaaaatgagaaacatggcaaaggacaaagaaagaaaccaagagaaaccctctaattctgaatcatcactgggagcaaaacacagactcacagaggaagggcaagagaagggtaaagaacaagagagaccacctgaggcagtgagcaagtttgcaaagcggaacaatgaagaaactgtaatgtcagctagagacaggtacttggccaggcagatggcgcgggttaatgcaaagacctatattgagaaagaagatgattgatggctaccccaagagaaagatttaaggaagcacagaaaactgtaattcctggaacctgctgcgtaaaaccataaaggagtgtgttaccagtagtttggagggcatttttaaatttattttcaaaattttaagttaaaagtcagtcttacagcttggatgtttggatgtggatgtttggctgaatttatatatagtgtgtactcatcaataccacattctttgttgtattcaagaaccgttaagagtgtgctaattccctgtaggtacataatgaggaaaatttgctccactacaaccattaaaaaataattttggccagatacggtagctcgtgcctgtaataccaacattttgggaggccaaggcagaaggatattgaggctaggcattcaagaccagcctaggcaggataataagaccttgtctctatttaaaaaacaaaaagcctagcatggtagtccatgcctgtagtcccagctgttcgagaggctgaggcaagaagatcacttgagcctaggaatttgatgttacagtgaggtatgatcatgccactgcactccaacctgggcaacagaatgagaccctgtctctaaaaaattttttttaaataaataatttaactcttctaataatgttttgttgcaggaaatgtatttcagataaaatatggatttgaaaaacagaaaatatactttatgttctgaaatttgtatttaagtataaaatgtgaatcatcttgtctaaatagcttacagcatagttggcttaaatgaaaataaaatgatatgcttatacatttt

SEQ ID NO: 161040 - DNA, 1660 bp, Homo sapiens
  Payload ID: 11457
  Gene Symbol: NFYA
  Gene Name: nuclear transcription factor Y, alpha
  Uniprot ID: P23511
  ENST ID: ENST00000353205
  CDS Start-End: 164-1120
cggcagtggcggcggcagcggcggctggagcctctgattgggtttcggagtccggtactggagccaatcagcgcgggcagcgaaccgggggagcgaggcacggagtgtacctcacagccttctaggatctccagagtggacaggaatctcacttggagggaccatggagcagtatacagcaaacagcaatagttcgacagagcagattgttgtccaggcaggacagattcagcagcaggtccaagggcagccattaatggtgcaggtcagtggaggccagctaatcacatcaactggccaacccatcatggtccaggctgtccctggtggacaaggtcaaaccatcatgcaagtacctgtttctggaacacagggtttgcagcaaatacagttggtcccacctggacagatccagatccagggtggacaggctgtgcaggtgcagggccagcagggccagacccagcagatcatcatccagcagccccagacggctgtcactgctggccagactcagacacagcagcagattgctgtccagggacagcaagtggcacagactgctgaagggcagaccatcgtctatcaaccagttaatgcagatggcaccattctccagcaagttacagtccctgtttcaggcatgatcactatcccagcagccagtttggcaggagcacagattgttcaaacaggagccaataccaacacaaccagcagtgggcaagggactgtcactgtgacactaccagtggcaggcaatgtggtcaattcaggagggatggtcatgatggttcctggggctggctctgtgcctgctatccaaagaatccctctacctggagcagagatgcttgaagaagagcctctctacgtgaatgccaaacaataccaccgtattcttaagaggaggcaagcccgagctaaactagaggcagaagggaaaattccaaaggagagaaggaaatacctgcatgagtctcggcaccgtcatgccatggcacggaagcgtggtgaaggtggacgatttttctctccaaaggaaaaggatagtccccatatgcaggatccaaaccaagccgatgaagaagcaatgacacagatcatccgagtgtcctaaccccacgccatgtgatggagctgatcaaggtcatgtttctcactgttccaggaaattgatcaactcttccaatgggacattgatgatcacattctgccctttactacaggacagaaaccacttagtttttaataagtggctcagtattacaattgcagcgatgcctggcaaattgaagttgcaagcctttgtcttactctttcagtcaggacctatttcagactgttgatgacattgacatttcatggattcggatgatgcaaggagacacatgccaccccagcagtacacaaagcacttaccttgactggtgaagtcagccagccatctcagcagggaagaacaaccttctcaaccaaaactgcaatcaggaaagcagcagcccactccttcccatggaatctagacagcatttatccctctggtgggggaatctcacactgactaactgaatggacgctttgtattcagagatggcttccaggcaaggaagttctatcttgtgatacggaaacaataaattcctgagatacattcttc

SEQ ID NO: 161041 - DNA, 3811 bp, Homo sapiens
  Payload ID: 11457
  Gene Symbol: NFYA
  Gene Name: nuclear transcription factor Y, alpha
  Uniprot ID: P23511
  ENST ID: ENST00000341376
  CDS Start-End: 202-1245
gattcccctttgttcgggttcgccattttgctaggcagcggcagtggcggcggcagcggcggctggagcctctgattgggtttcggagtccggtactggagccaatcagcgcgggcagcgaaccgggggagcgaggcacggagtgtacctcacagccttctaggatctccagagtggacaggaatctcacttggagggaccatggagcagtatacagcaaacagcaatagttcgacagagcagattgttgtccaggcaggacagattcagcagcagcagcagggtggtgtcactgctgtgcagttgcagactgaggcccaggtggcatccgcctcaggccagcaagtccagaccctccaggtagtccaagggcagccattaatggtgcaggtcagtggaggccagctaatcacatcaactggccaacccatcatggtccaggctgtccctggtggacaaggtcaaaccatcatgcaagtacctgtttctggaacacagggtttgcagcaaatacagttggtcccacctggacagatccagatccagggtggacaggctgtgcaggtgcagggccagcagggccagacccagcagatcatcatccagcagccccagacggctgtcactgctggccagactcagacacagcagcagattgctgtccagggacagcaagtggcacagactgctgaagggcagaccatcgtctatcaaccagttaatgcagatggcaccattctccagcaagttacagtccctgtttcaggcatgatcactatcccagcagccagtttggcaggagcacagattgttcaaacaggagccaataccaacacaaccagcagtgggcaagggactgtcactgtgacactaccagtggcaggcaatgtggtcaattcaggagggatggtcatgatggttcctggggctggctctgtgcctgctatccaaagaatccctctacctggagcagagatgcttgaagaagagcctctctacgtgaatgccaaacaataccaccgtattcttaagaggaggcaagcccgagctaaactagaggcagaagggaaaattccaaaggagagaaggaaatacctgcatgagtctcggcaccgtcatgccatggcacggaagcgtggtgaaggtggacgatttttctctccaaaggaaaaggatagtccccatatgcaggatccaaaccaagccgatgaagaagcaatgacacagatcatccgagtgtcctaaccccacgccatgtgatggagctgatcaaggtcatgtttctcactgttccaggaaattgatcaactcttccaatgggacattgatgatcacattctgccctttactacaggacagaaaccacttagtttttaataagtggctcagtattacaattgcagcgatgcctggcaaattgaagttgcaagcctttgtcttactctttcagtcaggacctatttcagactgttgatgacattgacatttcatggattcggatgatgcaaggagacacatgccaccccagcagtacacaaagcacttaccttgactggtgaagtcagccagccatctcagcagggaagaacaaccttctcaaccaaaactgcaatcaggaaagcagcagcccactccttcccatggaatctagacagcatttatccctctggtgggggaatctcacactgactaactgaatggacgctttgtattcagagatggcttccaggcaaggaagttctatcttgtgatacggaaacaataaattcctgagatacattcttccaatctgtggtaataataagaattcctctctgcccagatggtaggttgatatttctggactctagccaagaaaaagctaattctggggatagaatgataaaagactcaagcactaaaaatatacattgccgaatctctttttctagctttgaaaagttgtggcctgcttgtccctctgttgactggtcatctggaccatcgtacttgctgtggctacttctaagacaatgtagagggttattaaaccttgaaactgcctttcctaagtagagaacaagactattcaacaacttctttgctgaagcactgaggagatttgtaatactcctaaaggaagggccaaactagagattttcaatcatagactttgtgacagcatttggggaactaaaagattcatgtgtttcagcctagtgggagagagtgggggagaggaagagagagagagagcatgtatacccgtatgttatcatagagcacgattctccagtggatggatacctggaatggatcattaagatgaagagagtaattcacatttactctagaacctttaacaagcactgaaaggaagaagcctgagatttgatccttgacaatttctggaaagcactggtcagtcacactgtcctggacagagtccaagttacccactaaagcttgaggtggatgttggcttcactcctgcagcacaatgctggccctagaaagcgagcattttcattcttcccatggcagctgattctttggtgccagttttcatgttttctccataggccttgtgcagaaaggttttctcattgcatccatactgtgagaataaactgcagactgaaagaaacatgcctgcagggtcaggaactgggccactgttcccagaacgggttgtgcctcagaaatctatttctcttttagatgttgaaccctgagagaactaagatgatatttcagaagagttggctgccttctctggaaacaaggaaaacccaataattccgaggaacattgggggttaaataccaagaataaaaattggttcttctttgacttcagcttaactgtattaagacagaaattaagccctctaaaaacaccacaaagagagatgattgtaatgatagaaatagaggtacagagctatgcaaaggaaacaggaagtgaaatattcctagtcccagggatctggtaatcgctcctggcttccagatgtcaaaggactgatcctttggtaagctcactagaaacttctagctctacaagagtttgggatattaatgttattcagtaagtcccaagtttttcagagaatagattactaacaatgaggaatttatattccttggttaatttaggagtctaagatgcagagttcagaaagaaattactcagacctaactttgagtgcttaagctgccaacagttagaagatgctatttatttgtgtctgtaagtttgtacatagtaatgccagccttgttgctgaattttttatttggggggagatgactttgaattttgtttgaaatgcttcagttgtcattttgtcattgcatttcaaatagctcatgacccttttcttgtggtcactttggcacaccatagtagcccacaaagtgggggcagggtattgacatttggattttttctttgatactagttcttttattcatttttatttgtgactgtagtgataactttacagatggagaaagagtgaatggatgaatgaataattggtttaatgcctagttatgcaacttgagtgcttttttttttttttgcaggataattttaagtgtatatattttaactgcactggtacattgaacatgtcagtgtcgatgccactggaccaacagagcattttgtggctatagggtgcctgataataatgtcttgatttttctttgggattcaactatatcgaaggtttttcccccagcagtatgggggcgtacaggtgatcgatcattaatgtcattgcaattgttattttttaaaataaatttataaaaataaccgaaaa

SEQ ID NO: 161042 - DNA, 3512 bp, Homo sapiens
  Payload ID: 11458
  Gene Symbol: NFYB
  Gene Name: nuclear transcription factor Y, beta
  Uniprot ID: P25208
  ENST ID: ENST00000240055
  CDS Start-End: 229-852
gtcgcgccgagggaagcggcccgcggcggagggaggggaggccgagtcctggaagcggagctccgcgctgggactggttccttcgcagccattttctgtccaaccaaacagccgattggagacgggagccaaccagggctgcattggaggttgaaatcacaaagattagacacctttttagataggtgttcttcagcaccactgacaacacggttctgacagtatttcatgacaatggatggtgacagttctacaacagatgcttctcaactaggaatctctgcagactatattggaggaagtcattatgttatacagcctcatgatgatactgaggacagcatgaatgatcatgaagacacaaatggttcaaaagaaagtttcagagaacaagatatatatcttccaatagcaaacgtggctaggataatgaaaaatgccatacctcaaacgggaaagattgcaaaagatgccaaagaatgtgttcaagaatgtgtaagtgagttcatcagttttataacatctgaagcaagtgaaaggtgccatcaagagaaacggaaaacaatcaatggagaagatattctctttgctatgtctactttaggctttgacagttatgtggaacctctgaaattataccttcagaaattcagagaggctatgaaaggagaaaagggaattggtggagcagtcacagctacagatggactaagtgaagagcttacagaggaggcatttactaaccagttaccagctggcttaataaccacagacggtcaacaacaaaatgttatggtttacacaacatcatatcaacagatttctggtgttcagcaaattcagttttcatgatctgaagaaatgatggaatggggagtgtagagaaatgagagtctgtatgattctggaacagagacatcagaaggaaagactggtgaaaagatgtatctttgtatattaatagctgtaatgtagcttcctgatgcttgactaattgaggtgttaattctgacttgagaatctttttcatgaatgattttaaagaaaaatttggattttaaaggtattaaaatatttttgttttgtacgagagtttgttgctctgtatgactcctgtatgcattgtatattgcaatttattactgtcagagatttgtagacagtttcttattttcatattgaatcatgttacttttgtaattcaagtaagcggctgggttaattcatgatgtttgcccttttaataaaatataagggtagagttcattttgaatgcaagttgcctttattataaatttgagtttgtcttggttataccttgcatgataacctagctagatttctagcatttgctgtatttattaaaattattatttttttggtaaaacattaatagtttaagcagcatcatttttttaaaaaatgtaattgaataagtgtgaatgcagaagcaaatattgtctgccctgttaaacttggtgcccattaacagtgtttacactgttcatcgtgcctgttaatgtagttttagttactggagcttttttaagactagatttggttttgagttacatttttaagaatgtgggaatatatttaagtttaatgtagtcctagtgctcttgaaatggtgcccctttcatttggtacatgattttttttcaaatcatatcttcaagtactatagtattctcttacagaagaggagttttatagtctgatggtaaatgtcttcattttacctttttaattgaaatgtcaagtttcctgttacactatggaaaccaagaaacatcagacatcattgcgtgtacagaccttttgcatgggtgagtggatgaaatggagaacagagtgagtgctgtgaacggtgtgaaatagaagccaacttctagtatgctgtcttcatctctgcaataaactaaacgtaaataatgtaactttgtataatttagtagtatgtacttggattgtttctttttgaaaagtgaggatttgtattttctcatctattctttttggtgttaattaacttgagggatttcttttttaagtttttaatatcaaaaattgctattgtatagtttgcctaaaaggaagttggagtgaatatcatctttgaaggacactcaaatttataaggtagaagcaatttcccagatataggctgaacagaaacatttactttgccagaaggagcctttaggagtatatgtgggctaatcagaggttaataatgtcctcatctcctactctccatttaaaaaacaaacttcattgtagtaaattcaaataggaaaaaatgggggagtagttaagcaaaatcaacagtcatcctactatgttgaaagaaccaatgttaatattttgataaatatcatttgtccttttactttgctaaatatgtatatttttataaaaatgggctcatattgtgcataccattttgtaacctgcttttttcacttaacaatatattgggaacatcttttccaggtcatgcatagtcttctgcatcatttttattggtttattattctgctgtatgactcaatcataattcatttaatcttctattggatattttgactatttacatcttttcacagttataaacagcacttcactgaatcccatgtacatccatgactgttttcttaaattctttgaattgctgggttaccaaatatgcaaaattttaaggcttttgatacttcgttatgagtgtatttttgagatattttccacttgatccaagcagtgtgtcactatataactgataaaagcacttggtctttgattatcagatactgtctctaaaattattttaaagattaatatttgttcaagtagagaatgaagataaaaaaggaatttgaggccaggtatggggtgtctcatgcctataattccagcactttgggaggccaaggcaggcagatcactttgaggtcaggagtttgagaccagcctggccaacatggagaaccccccgtctctacaaaaaatacaaaattagcagggtgtggtggtgcacacctgtagtcccttactccctggtggctgaggcattatcccttgaacctgggaggcagagcctaaagtgagccgagatcgcgccactgcactccagcctgggtgacacagcaagactcttgtctcaaacaaacaggaatttgagtaaattttaaattagtatatactacaacaaatttccaaacttcataatttgctagtagtgctaactaaaattttacaccaggtaaaatcaggtcaccttttttatgtattgacttcattgttggacttcatactctgatgggaaagaaaatggacattctgaatgtgtcaggtgcataatatcctaatttatgcttgtcagagctggggtctctgtcttccttggcccatgttgcatttaactgaatgtcatgttttctcctctggaacttcttatgtatgcaagctcccatgttaacctatcataaaaatgttttttataattttgtaaa

SEQ ID NO: 161043 - DNA, 1727 bp, Homo sapiens
  Payload ID: 11458
  Gene Symbol: NFYB
  Gene Name: nuclear transcription factor Y, beta
  Uniprot ID: P25208
  ENST ID: ENST00000551727
  CDS Start-End: 722-1345
tcccgccctcccgcgcgggccgaggccgggccccgcgcctgcgaggccgctcccgcagcgggccgggccggggagcgggcgcggggccgcggcgcggctctttgtgcgccgggctgaggagcggcgggacgcgggccaggccacctcaccctcgccgccgttgagctccgggcccggggccgaggaggggccgcggggctgcgtcggggccccgctctcgacggcgtcccgggccggctccattttgtgcggggagccggccgaggggcgggagacgcggcccgggccctggccccgtagccccggcggcggcgcgagtccccgggggcgccctcctcccgcccgcggggctgtggcggggcccggcgctttgtctgcccgcacatcccgggggccgcgcggcgggtgggaggcaggcgttgggcgcggggccggggcggccgggcgagtcaggggatgcgctctgggggcggcctcctggcactcgcagggctgacaggtcgccgggaccaggccgtggggccggggccacccaggcacctgcgtggggaggaaggcatggctttagcttccccgcagcctggtttgcgcgtaaagaatgcagccatctggcggtttgcggtccctgtacttgccccgaaggttgaaatcacaaagattagacacctttttagataggtgttcttcagcaccactgacaacacggttctgacagtatttcatgacaatggatggtgacagttctacaacagatgcttctcaactaggaatctctgcagactatattggaggaagtcattatgttatacagcctcatgatgatactgaggacagcatgaatgatcatgaagacacaaatggttcaaaagaaagtttcagagaacaagatatatatcttccaatagcaaacgtggctaggataatgaaaaatgccatacctcaaacgggaaagattgcaaaagatgccaaagaatgtgttcaagaatgtgtaagtgagttcatcagttttataacatctgaagcaagtgaaaggtgccatcaagagaaacggaaaacaatcaatggagaagatattctctttgctatgtctactttaggctttgacagttatgtggaacctctgaaattataccttcagaaattcagagaggctatgaaaggagaaaagggaattggtggagcagtcacagctacagatggactaagtgaagagcttacagaggaggcatttactaaccagttaccagctggcttaataaccacagacggtcaacaacaaaatgttatggtttacacaacatcatatcaacagatttctggtgttcagcaaattcagttttcatgatctgaagaaatgatggaatggggagtgtagagaaatgagagtctgtatgattctggaacagagacatcagaaggaaagactggtgaaaagatgtatctttgtatattaatagctgtaatgtagcttcctgatgcttgactaattgaggtgttaattctgacttgagaatctttttcatgaatgattttaaagaaaaatttggattttaaaggtattaaaatatttttgttttgtacgagagtttgttgctctgtatgactcctgtatgcattgtatattgcaatttattactgtcagagatttgtagacagtttcttattttcatattgaatcatgttacttttgtaattcaagtaagcggctgggttaattcatgatgttt

SEQ ID NO: 161044 - DNA, 618 bp, Homo sapiens
  Payload ID: 11458
  Gene Symbol: NFYB
  Gene Name: nuclear transcription factor Y, beta
  ENST ID: ENST00000551446
  CDS Start-End: 225-618
agccattttctgtccaaccaaacagccgattggagacgggagccaaccagggctgcattggaggttgaaatcacaaagattagacacctttttagataggtgttcttcagcaccactgacaacacggttctgacagtatttcatgacagttatgtaacatttgtcctgcaagctgaggacagagaccttgtctgttgttgacagctacgtgaccagcacatagcatgaacctgatggatggtgacagttctacaacagatgcttctcaactaggaatctctgcagactatattggaggaagtcattatgttatacagcctcatgatgatactgaggacagcatgaatgatcatgaagacacaaatggttcaaaagaaagtttcagagaacaagatatatatcttccaatagcaaacgtggctaggataatgaaaaatgccatacctcaaacgggaaagattgcaaaagatgccaaagaatgtgttcaagaatgtgtaagtgagttcatcagttttataacatctgaagcaagtgaaaggtgccatcaagagaaacggaaaacaatcaatggagaagatattctctttgctatgtctactttaggctttgacagttatg

SEQ ID NO: 161045 - DNA, 2158 bp, Homo sapiens
  Payload ID: 11459
  Gene Symbol: NFYC
  Gene Name: nuclear transcription factor Y, gamma
  Uniprot ID: Q13952
  ENST ID: ENST00000308733
  CDS Start-End: 7-1383
gtcgagatgtccacagaaggaggatttggtggtactagcagcagtgatgcccagcaaagcctacagtcgttctggcctcgggtcatggaagaaatccggaatttaacagtgaaagacttccgagtgcaggaactcccactggctcgtattaagaagattatgaaactggatgaagatgtgaagatgatcagtgcagaagcgcctgtactctttgccaaggcagcccagatttttatcacagagttgactcttcgagcctggattcacacagaagataacaagcgccggactctacagagaaatgatatcgccatggcaattacaaaatttgatcagtttgattttctcatcgatattgttccaagagatgaactgaaacctccaaagcgtcaggaggaggtgcgccagtctgtaactcctgccgagccagtccagtactatttcacgctggctcagcaacccaccgctgtccaagtccagggccagcagcaaggccagcagaccaccagctccacgaccaccatccagcctgggcagatcatcatcgcacagcctcagcagggccagaccacacctgtgacaatgcaggttggagaaggtcagcaggtgcagattgtccaggctcagccacagggtcaagcccaacaggcccagagtggcactggacagaccatgcaggtgatgcagcagatcatcactaacacaggagagatccagcagatcccggtgcagctgaatgccggccagctgcagtatatccgcttagcccagcctgtatcaggcactcaagttgtgcagggacagatccagacacttgccaccaatgctcaacaggggcaaagaaatgcaagtcaggggaagcctcgaaggtgcctgaaagaaaccttacagattacacagacagaggtccagcaaggacagcagcagttcagccagttcacagatggacagaggaacagcgtgcagcaagctcgagtctctgagctaacgggagaggcagagcccagagaagtgaaagccacaggaaattcaactccctgcacctcttccctgcccaccacacaccccccctcacaccgggctggtgcctcctgtgtctgctgctcccaaccccagcagagctccacttcccctcctccttctgacgccttgcagtgggtggtggttgaggtatctgggacccccaaccagctcgagacccatagggagctgcatgcccctctcccagggatgacctcactctctcctctccacccctcgcagcagctctaccagatccagcaagtcaccatgcctgcgggccaggacctcgcccagcccatgttcatccagtcagccaaccagccctccgacgggcaggccccccaggtgaccggcgactgagggcctgagctggcaaggccaaggacacccaacacaatttttgccatacagccccaggcaatgggcacagccttcctccccagaggacccggccgacctcagcgcctcctgcaggctaggacactggtgcactacaccccatgcctgggggccgagattctccagcagaaagatgcaatattttttgtttcctttttttccatttttttctctaaggaatcaatatttcaatatgttgagtgtgtgtccaatgctatgaaattaaaatattaaataacatatttatggcattttcttgaagagtgtggttgaagaaatatttctccttttgtttttcttttttttttgtttgttactgccacttctttttaggagcaaatctccccaggggtgtacggtatttcttgactctgggaacagctgctacccccaagacttgccacgttgttctgccctcagatggaattaggtgaatgtgtgtagctgctttttcactcgtggtcctctccccatcccttgctctgaccccagagctctgtgtatttgcatccagaggccatggaaacattctttgcatttaagagacagatttattccctgtggagagtgggtggattcattgccacactcttttctcccagggacccaggaaactaggactttgtgtgtttgctgcccacctcccttttattttttaaatgcattaaaaactgtgctagtctcctttgcatggacttcaagctgcatgaaatgcaataaatctcattttagataa

SEQ ID NO: 161046 - DNA, 1202 bp, Homo sapiens
  Payload ID: 11459
  Gene Symbol: NFYC
  Gene Name: nuclear transcription factor Y, gamma
  Uniprot ID: Q13952
  ENST ID: ENST00000372651
  CDS Start-End: 83-1090
gggataggagtgacttaaattctcccagtcggtggaggtataaataactacatgtaaaattaatgcagttcccgttgtcgagatgtccacagaaggaggatttggtggtactagcagcagtgatgcccagcaaagcctacagtcgttctggcctcgggtcatggaagaaatccggaatttaacagtgaaagacttccgagtgcaggaactcccactggctcgtattaagaagattatgaaactggatgaagatgtgaagatgatcagtgcagaagcgcctgtactctttgccaaggcagcccagatttttatcacagagttgactcttcgagcctggattcacacagaagataacaagcgccggactctacagagaaatgatatcgccatggcaattacaaaatttgatcagtttgattttctcatcgatattgttccaagagatgaactgaaacctccaaagcgtcaggaggaggtgcgccagtctgtaactcctgccgagccagtccagtactatttcacgctggctcagcaacccaccgctgtccaagtccagggccagcagcaaggccagcagaccaccagctccacgaccaccatccagcctgggcagatcatcatcgcacagcctcagcagggccagaccacacctgtgacaatgcaggttggagaaggtcagcaggtgcagattgtccaggctcagccacagggtcaagcccaacaggcccagagtggcactggacagaccatgcaggtgatgcagcagatcatcactaacacaggagagatccagcagatcccggtgcagctgaatgccggccagctgcagtatatccgcttagcccagcctgtatcaggcactcaagttgtgcagggacagatccagacacttgccaccaatgctcaacagattacacagacagaggtccagcaaggacagcagcagttcagccagttcacagatggacagcagctctaccagatccagcaagtcaccatgcctgcgggccaggacctcgcccagcccatgttcatccagtcagccaaccagccctccgacgggcaggccccccaggtgaccggcgactgagggcctgagctggcaaggccaaggacacccaacacaatttttgccatacagccccaggcaatgggcacagccttcctccccagaggacccggccgacctcagcgcctcctgc

SEQ ID NO: 161047 - DNA, 2363 bp, Homo sapiens
  Payload ID: 11459
  Gene Symbol: NFYC
  Gene Name: nuclear transcription factor Y, gamma
  Uniprot ID: Q13952
  ENST ID: ENST00000372652
  CDS Start-End: 269-1588
cagggcttcattggagcctcggagtttttcactgaggcaggggtcagctgaaagacaaagaaaaatggcgaatagtttgttggggggtgggaggacagctgttcgggttttcagtggagtggacattccagactcatgtttctgcatctcctgctgccttttgtttcctccgtcctttggggggtagggataggagtgacttaaattctcccagtcggtggaggtataaataactacatgtaaaattaatgcagttcccgttgtcgagatgtccacagaaggaggatttggtggtactagcagcagtgatgcccagcaaagcctacagtcgttctggcctcgggtcatggaagaaatccggaatttaacagtgaaagacttccgagtgcaggaactcccactggctcgtattaagaagattatgaaactggatgaagatgtgaagatgatcagtgcagaagcgcctgtactctttgccaaggcagcccagatttttatcacagagttgactcttcgagcctggattcacacagaagataacaagcgccggactctacagagaaatgatatcgccatggcaattacaaaatttgatcagtttgattttctcatcgatattgttccaagagatgaactgaaacctccaaagcgtcaggaggaggtgcgccagtctgtaactcctgccgagccagtccagtactatttcacgctggctcagcaacccaccgctgtccaagtccagggccagcagcaaggccagcagaccaccagctccacgaccaccatccagcctgggcagatcatcatcgcacagcctcagcagggccagaccacacctgtgacaatgcaggttggagaaggtcagcaggtgcagattgtccaggctcagccacagggtcaagcccaacaggcccagagtggcactggacagaccatgcaggtgatgcagcagatcatcactaacacaggagagatccagcagatcccggtgcagctgaatgccggccagctgcagtatatccgcttagcccagcctgtatcaggcactcaagttgtgcagggacagatccagacacttgccaccaatgctcaacagattacacagacagaggtccagcaaggacagcagcagttcagccagttcacagatggacagaggaacagcgtgcagcaagctcgagtctctgagctaacgggagaggcagagcccagagaagtgaaagccacaggaaattcaactccctgcacctcttccctgcccaccacacaccccccctcacaccgggctggtgcctcctgtgtctgctgctcccaaccccagcagagctccacttcccctcctccttctgacgccttgcagtgggtggtggttgaggtatctgggacccccaaccagctcgagacccatagggagctgcatgcccctctcccagggatgacctcactctctcctctccacccctcgcagcagctctaccagatccagcaagtcaccatgcctgcgggccaggacctcgcccagcccatgttcatccagtcagccaaccagccctccgacgggcaggccccccaggtgaccggcgactgagggcctgagctggcaaggccaaggacacccaacacaatttttgccatacagccccaggcaatgggcacagccttcctccccagaggacccggccgacctcagcgcctcctgcaggctaggacactggtgcactacaccccatgcctgggggccgagattctccagcagaaagatgcaatattttttgtttcctttttttccatttttttctctaaggaatcaatatttcaatatgttgagtgtgtgtccaatgctatgaaattaaaatattaaataacatatttatggcattttcttgaagagtgtggttgaagaaatatttctccttttgtttttcttttttttttgtttgttactgccacttctttttaggagcaaatctccccaggggtgtacggtatttcttgactctgggaacagctgctacccccaagacttgccacgttgttctgccctcagatggaattaggtgaatgtgtgtagctgctttttcactcgtggtcctctccccatcccttgctctgaccccagagctctgtgtatttgcatccagaggccatggaaacattctttgcatttaagagacagatttattccctgtggagagtgggtggattcattgccacactcttttctcccagggacccaggaaactaggactttgtgtgtttgctgcccacctcccttttattttttaaatgcattaaaaactgtgctagtctcctttgcatggacttcaagctgcatgaaatgcaataaatctcattttagataa

SEQ ID NO: 161048 - DNA, 1862 bp, Homo sapiens
  Payload ID: 11459
  Gene Symbol: NFYC
  Gene Name: nuclear transcription factor Y, gamma
  Uniprot ID: Q13952
  ENST ID: ENST00000372653
  CDS Start-End: 679-1584
gtgctcttgcctggcccgctgctgtcgccgccgccgcgctcgtggggtccgtgtgcctcgtcggcccggcccgcgggctttctcccattggcggaaggcgacggcgggggggctcgctcgtgattggtcggtggcggggaggccgcggacctggcaccttattggacgcgccagctccggtctaggggacacgggcttccaccatgttagccaggctggtcttcaactcctgacctcaggtgatccacccacctcggcctcccaaagtgctgggattataggcgtgagccaccgtgcccagccaggctatgctgggtgtctttttgagatttaggaacctctcagaataaaatctggaagcctgttccatttgcattatgagatttgcattacaatgcaggctgaagtgcagtagtgcaatcatggctcattgcagtctcccagctcctcggctcaagtgatcctcctgccccagcctcctgagtagcgggagctacagacacacaaacacaggatactgccagaaactgggcaagaggctgtttgtgaatctcagaaggcacccggatcttgctctgctgttcctgctcaggctggagtgcagtggcgcaatcatggctcactgcaggcttgaccacccaggctcaagcagtcctcccgcctcagcctcttgtcgagatgtccacagaaggaggatttggtggtactagcagcagtgatgcccagcaaagcctacagtcgttctggcctcgggtcatggaagaaatccggaatttaacagtgaaagacttccgagtgcaggaactcccactggctcgtattaagaagattatgaaactggatgaagatgtgaagatgatcagtgcagaagcgcctgtactctttgccaaggcagcccagatttttatcacagagttgactcttcgagcctggattcacacagaagataacaagcgccggactctacagagaaatgatatcgccatggcaattacaaaatttgatcagtttgattttctcatcgatattgttccaagagatgaactgaaacctccaaagcgtcaggaggaggtgcgccagtctgtaactcctgccgagccagtccagtactatttcacgctggctcagcaacccaccgctgtccaagtccagggccagcagcaaggccagcagaccaccagctccacgaccaccatccagcctgggcagatcatcatcgcacagcctcagcagggccagaccatgcaggtgatgcagcagatcatcactaacacaggagagatccagcagatcccggtgcagctgaatgccggccagctgcagtatatccgcttagcccagcctgtatcaggcactcaagttgtgcagggacagatccagacacttgccaccaatgctcaacagattacacagacagaggtccagcaaggacagcagcagttcagccagttcacagatggacagcagctctaccagatccagcaagtcaccatgcctgcgggccaggacctcgcccagcccatgttcatccagtcagccaaccagccctccgacgggcaggccccccaggtgaccggcgactgagggcctgagctggcaaggccaaggacacccaacacaatttttgccatacagccccaggcaatgggcacagccttcctccccagaggacccggccgacctcagcgcctcctgcaggctaggacactggtgcactacaccccatgcctgggggccgagattctccagcagaaagatgcaatattttttgtttcctttttttccatttttttctctaaggaatcaatatttcaatatgttgagtgtgtgtccaatgctatgaaattaaaatattaaataac

SEQ ID NO: 161049 - DNA, 1455 bp, Homo sapiens
  Payload ID: 11459
  Gene Symbol: NFYC
  Gene Name: nuclear transcription factor Y, gamma
  Uniprot ID: Q13952
  ENST ID: ENST00000372654
  CDS Start-End: 174-1181
ctcctgctcttcctggactcctgagcagagacgaggtctcgctctgttgccaaggctggtgtgccaggctggagtgccgtggcatgatcatgactcactgcagcctccacctcctgggctcaagcaatcctcctacttcagcctcctgagtagctgggactacagttgtcgagatgtccacagaaggaggatttggtggtactagcagcagtgatgcccagcaaagcctacagtcgttctggcctcgggtcatggaagaaatccggaatttaacagtgaaagacttccgagtgcaggaactcccactggctcgtattaagaagattatgaaactggatgaagatgtgaagatgatcagtgcagaagcgcctgtactctttgccaaggcagcccagatttttatcacagagttgactcttcgagcctggattcacacagaagataacaagcgccggactctacagagaaatgatatcgccatggcaattacaaaatttgatcagtttgattttctcatcgatattgttccaagagatgaactgaaacctccaaagcgtcaggaggaggtgcgccagtctgtaactcctgccgagccagtccagtactatttcacgctggctcagcaacccaccgctgtccaagtccagggccagcagcaaggccagcagaccaccagctccacgaccaccatccagcctgggcagatcatcatcgcacagcctcagcagggccagaccacacctgtgacaatgcaggttggagaaggtcagcaggtgcagattgtccaggctcagccacagggtcaagcccaacaggcccagagtggcactggacagaccatgcaggtgatgcagcagatcatcactaacacaggagagatccagcagatcccggtgcagctgaatgccggccagctgcagtatatccgcttagcccagcctgtatcaggcactcaagttgtgcagggacagatccagacacttgccaccaatgctcaacagattacacagacagaggtccagcaaggacagcagcagttcagccagttcacagatggacagcagctctaccagatccagcaagtcaccatgcctgcgggccaggacctcgcccagcccatgttcatccagtcagccaaccagccctccgacgggcaggccccccaggtgaccggcgactgagggcctgagctggcaaggccaaggacacccaacacaatttttgccatacagccccaggcaatgggcacagccttcctccccagaggacccggccgacctcagcgcctcctgcaggctaggacactggtgcactacaccccatgcctgggggccgagattctccagcagaaagatgcaatattttttgtttcctttttttccatttttttctctaaggaatcaatatttcaatatgttgagtgtgtgtccaatgctatgaaattaaaatattaaa

SEQ ID NO: 161050 - DNA, 1005 bp, Homo sapiens
  Payload ID: 11459
  Gene Symbol: NFYC
  Gene Name: nuclear transcription factor Y, gamma
  ENST ID: ENST00000372669
  CDS Start-End: 67-1005
gcggcgagagggcgagcctagaggctttaagggggaagagagggtgatggcctggcagttgtcgagatgtccacagaaggaggatttggtggtactagcagcagtgatgcccagcaaagcctacagtcgttctggcctcgggtcatggaagaaatccggaatttaacagtgaaagacttccgagtgcaggaactcccactggctcgtattaagaagattatgaaactggatgaagatgtgaagatgatcagtgcagaagcgcctgtactctttgccaaggcagcccagatttttatcacagagttgactcttcgagcctggattcacacagaagataacaagcgccggactctacagagaaatgatatcgccatggcaattacaaaatttgatcagtttgattttctcatcgatattgttccaagagatgaactgaaacctccaaagcgtcaggaggaggtgcgccagtctgtaactcctgccgagccagtccagtactatttcacgctggctcagcaacccaccgctgtccaagtccagggccagcagcaaggccagcagaccaccagctccacgaccaccatccagcctgggcagatcatcatcgcacagcctcagcagggccagaccacacctgtgacaatgcaggttggagaaggtcagcaggtgcagattgtccaggctcagccacagggtcaagcccaacaggcccagagtggcactggacagaccatgcaggtgatgcagcagatcatcactaacacaggagagatccagcagatcccggagacaggtcttgctgtgtcactcagactgatgaagtgcagtggcttgatctcagctcactgcagcttccgcctcccaggttcaagcgattctcctgcctcagcctcccgagtagctgggattataggtgcagctgaatgccggccagctgcagtatatccgcttagcccagcctgtatcaggcactcaagttgtgcagggacagatccagacacttgc

SEQ ID NO: 161051 - DNA, 1536 bp, Homo sapiens
  Payload ID: 11459
  Gene Symbol: NFYC
  Gene Name: nuclear transcription factor Y, gamma
  Uniprot ID: Q13952
  ENST ID: ENST00000425457
  CDS Start-End: 161-1225
gccgccatcttgcttgtgcccccgcttcgcgcgcgctccgttctccgtgacgcacacttccccctcccctccgccgcgcctgggcctctgcattgcccgactccgtaggagcgcgggggcggctcctgctcttcctggactcctgagcagagttgtcgagatgtccacagaaggaggatttggtggtactagcagcagtgatgcccagcaaagcctacagtcgttctggcctcgggtcatggaagaaatccggaatttaacagtgaaagacttccgagtgcaggaactcccactggctcgtattaagaagattatgaaactggatgaagatgtgaagatgatcagtgcagaagcgcctgtactctttgccaaggcagcccagatttttatcacagagttgactcttcgagcctggattcacacagaagataacaagcgccggactctacagagaaatgatatcgccatggcaattacaaaatttgatcagtttgattttctcatcgatattgttccaagagatgaactgaaacctccaaagcgtcaggaggaggtgcgccagtctgtaactcctgccgagccagtccagtactatttcacgctggctcagcaacccaccgctgtccaagtccagggccagcagcaaggccagcagaccaccagctccacgaccaccatccagcctgggcagatcatcatcgcacagcctcagcagggccagaccacacctgtgacaatgcaggttggagaaggtcagcaggtgcagattgtccaggctcagccacagggtcaagcccaacaggcccagagtggcactggacagaccatgcaggtgatgcagcagatcatcactaacacaggagagatccagcagatcccggtgcagctgaatgccggccagctgcagtatatccgcttagcccagcctgtatcaggcactcaagttgtgcagggacagatccagacacttgccaccaatgctcaacaggggcaaagaaatgcaagtcaggggaagcctcgaaggtgcctgaaagaaaccttacagattacacagacagaggtccagcaaggacagcagcagttcagccagttcacagatggacagcagctctaccagatccagcaagtcaccatgcctgcgggccaggacctcgcccagcccatgttcatccagtcagccaaccagccctccgacgggcaggccccccaggtgaccggcgactgagggcctgagctggcaaggccaaggacacccaacacaatttttgccatacagccccaggcaatgggcacagccttcctccccagaggacccggccgacctcagcgcctcctgcaggctaggacactggtgcactacaccccatgcctgggggccgagattctccagcagaaagatgcaatattttttgtttcctttttttccatttttttctctaaggaatcaatatttcaatatgttgagtgtgtgtccaatgctatgaaattaaaatattaaataacatatttatggcattttcttgaagagtgtggttg

SEQ ID NO: 161052 - DNA, 650 bp, Homo sapiens
  Payload ID: 11459
  Gene Symbol: NFYC
  Gene Name: nuclear transcription factor Y, gamma
  ENST ID: ENST00000453631
  CDS Start-End: 264-650
ccgccatcttgcttgtgcccccgcttcgcgcgcgctccgttctccgtgacgcacacttccccctcccctccgccgcgcctgggcctctgcattgcccgactccgtaggagcgcgggggcggctcctgctcttcctggactcctgagcagaggatcttgctctgctgttcctgctcaggctggagtgcagtggcgcaatcatggctcactgcaggcttgaccacccaggctcaagcagtcctcccgcctcagcctcttgtcgagatgtccacagaaggaggatttggtggtactagcagcagtgatgcccagcaaagcctacagtcgttctggcctcgggtcatggaagaaatccggaatttaacagtgaaagacttccgagtgcaggaactcccactggctcgtattaagaagattatgaaactggatgaagatgtgaagatgatcagtgcagaagcgcctgtactctttgccaaggcagcccagatttttatcacagagttgactcttcgagcctggattcacacagaagataacaagcgccggactctacagagaaatgatatcgccatggcaattacaaaatttgatcagtttgattttctcatcgatattgttccaagagatgaactgaaacctccaaagcgtcag

SEQ ID NO: 161053 - DNA, 1950 bp, Homo sapiens
  Payload ID: 11459
  Gene Symbol: NFYC
  Gene Name: nuclear transcription factor Y, gamma
  Uniprot ID: Q13952
  ENST ID: ENST00000447388
  CDS Start-End: 168-1175
cggcgtggccgccatcttgcttgtgcccccgcttcgcgcgcgctccgttctccgtgacgcacacttccccctcccctccgccgcgcctgggcctctgcattgcccgactccgtaggagcgcgggggcggctcctgctcttcctggactcctgagcagagttgtcgagatgtccacagaaggaggatttggtggtactagcagcagtgatgcccagcaaagcctacagtcgttctggcctcgggtcatggaagaaatccggaatttaacagtgaaagacttccgagtgcaggaactcccactggctcgtattaagaagattatgaaactggatgaagatgtgaagatgatcagtgcagaagcgcctgtactctttgccaaggcagcccagatttttatcacagagttgactcttcgagcctggattcacacagaagataacaagcgccggactctacagagaaatgatatcgccatggcaattacaaaatttgatcagtttgattttctcatcgatattgttccaagagatgaactgaaacctccaaagcgtcaggaggaggtgcgccagtctgtaactcctgccgagccagtccagtactatttcacgctggctcagcaacccaccgctgtccaagtccagggccagcagcaaggccagcagaccaccagctccacgaccaccatccagcctgggcagatcatcatcgcacagcctcagcagggccagaccacacctgtgacaatgcaggttggagaaggtcagcaggtgcagattgtccaggctcagccacagggtcaagcccaacaggcccagagtggcactggacagaccatgcaggtgatgcagcagatcatcactaacacaggagagatccagcagatcccggtgcagctgaatgccggccagctgcagtatatccgcttagcccagcctgtatcaggcactcaagttgtgcagggacagatccagacacttgccaccaatgctcaacagattacacagacagaggtccagcaaggacagcagcagttcagccagttcacagatggacagcagctctaccagatccagcaagtcaccatgcctgcgggccaggacctcgcccagcccatgttcatccagtcagccaaccagccctccgacgggcaggccccccaggtgaccggcgactgagggcctgagctggcaaggccaaggacacccaacacaatttttgccatacagccccaggcaatgggcacagccttcctccccagaggacccggccgacctcagcgcctcctgcaggctaggacactggtgcactacaccccatgcctgggggccgagattctccagcagaaagatgcaatattttttgtttcctttttttccatttttttctctaaggaatcaatatttcaatatgttgagtgtgtgtccaatgctatgaaattaaaatattaaataacatatttatggcattttcttgaagagtgtggttgaagaaatatttctccttttgtttttcttttttttttgtttgttactgccacttctttttaggagcaaatctccccaggggtgtacggtatttcttgactctgggaacagctgctacccccaagacttgccacgttgttctgccctcagatggaattaggtgaatgtgtgtagctgctttttcactcgtggtcctctccccatcccttgctctgaccccagagctctgtgtatttgcatccagaggccatggaaacattctttgcatttaagagacagatttattccctgtggagagtgggtggattcattgccacactcttttctcccagggacccaggaaactaggactttgtgtgtttgctgcccacctcccttttattttttaaatgcattaaaaactgtgctagtctcctttgcatggacttcaagctgcatgaaatgcaataaatctcattttagataa

SEQ ID NO: 161054 - DNA, 1379 bp, Homo sapiens
  Payload ID: 11459
  Gene Symbol: NFYC
  Gene Name: nuclear transcription factor Y, gamma
  Uniprot ID: Q13952
  ENST ID: ENST00000427410
  CDS Start-End: 188-1081
aaaaggggaaacggtgcaaacggcgtggccgccatcttgcttgtgcccccgcttcgcgcgcgctccgttctccgtgacgcacacttccccctcccctccgccgcgcctgggcctctgcattgcccgactccgtaggagcgcgggggcggctcctgctcttcctggactcctgagcagagttgtcgagatgtccacagaaggaggatttggtggtactagcagcagtgatgcccagcaaagcctacagtcgttctggcctcgggtcatggaagaaatccggaatttaacagtgaaagacttccgagtgcaggaactcccactggctcgtattaagaagattatgaaactggatgaagatgtgaagagaaatgatatcgccatggcaattacaaaatttgatcagtttgattttctcatcgatattgttccaagagatgaactgaaacctccaaagcgtcaggaggaggtgcgccagtctgtaactcctgccgagccagtccagtactatttcacgctggctcagcaacccaccgctgtccaagtccagggccagcagcaaggccagcagaccaccagctccacgaccaccatccagcctgggcagatcatcatcgcacagcctcagcagggccagaccacacctgtgacaatgcaggttggagaaggtcagcaggtgcagattgtccaggctcagccacagggtcaagcccaacaggcccagagtggcactggacagaccatgcaggtgatgcagcagatcatcactaacacaggagagatccagcagatcccggtgcagctgaatgccggccagctgcagtatatccgcttagcccagcctgtatcaggcactcaagttgtgcagggacagatccagacacttgccaccaatgctcaacagattacacagacagaggtccagcaaggacagcagcagttcagccagttcacagatggacagcagctctaccagatccagcaagtcaccatgcctgcgggccaggacctcgcccagcccatgttcatccagtcagccaaccagccctccgacgggcaggccccccaggtgaccggcgactgagggcctgagctggcaaggccaaggacacccaacacaatttttgccatacagccccaggcaatgggcacagccttcctccccagaggacccggccgacctcagcgcctcctgcaggctaggacactggtgcactacaccccatgcctgggggccgagattctccagcagaaagatgcaatattttttgtttcctttttttccatttttttctctaaggaatcaatatttcaatatgttgagtgtgtgtccaatgctatgaaattaaaatattaaataacatatttatggcattttcttg

SEQ ID NO: 161055 - DNA, 1911 bp, Homo sapiens
  Payload ID: 11459
  Gene Symbol: NFYC
  Gene Name: nuclear transcription factor Y, gamma
  Uniprot ID: Q13952
  ENST ID: ENST00000456393
  CDS Start-End: 134-1138
cgcgcgcgctccgttctccgtgacgcacacttccccctcccctccgccgcgcctgggcctctgcattgcccgactccgtaggagcgcgggggcggctcctgctcttcctggactcctgagcagagttgtcgagatgtccacagaaggaggatttggtggtactagcagcagtgatgcccagcaaagcctacagtcgttctggcctcgggtcatggaagaaatccggaatttaacagtgaaagacttccgagtgcaggaactcccactggctcgtattaagaagattatgaaactggatgaagatgtgaagatgatcagtgcagaagcgcctgtactctttgccaaggcagcccagatttttatcacagagttgactcttcgagcctggattcacacagaagataacaagcgccggactctacagagaaatgatatcgccatggcaattacaaaatttgatcagtttgattttctcatcgatattgttccaagagatgaactgaaacctccaaagcgtcaggaggaggtgcgccagtctgtaactcctgccgagccagtccagtactatttcacgctggctcagcaacccaccgctgtccaagtccagggccagcagcaaggccagcagaccaccagctccacgaccaccatccagcctgggcagatcatcatcgcacagcctcagcagggccagaccacacctgtgacaatgcaggttggagaaggtcagcaggtgcagattgtccaggctcagccacagggtcaagcccaacaggcccagagtggcactggacagaccatgcaggtgatgcagcagatcatcactaacacaggagagatccagcagatcccggtgcagctgaatgccggccagctgcagtatatccgcttagcccagcctgtatcaggcactcaagttgtgcagggacagatccagacacttgccaccaatgctcaacagattacacagacagaggtccagcaaggacagcagcagttcagccagttcacagatggacagctctaccagatccagcaagtcaccatgcctgcgggccaggacctcgcccagcccatgttcatccagtcagccaaccagccctccgacgggcaggccccccaggtgaccggcgactgagggcctgagctggcaaggccaaggacacccaacacaatttttgccatacagccccaggcaatgggcacagccttcctccccagaggacccggccgacctcagcgcctcctgcaggctaggacactggtgcactacaccccatgcctgggggccgagattctccagcagaaagatgcaatattttttgtttcctttttttccatttttttctctaaggaatcaatatttcaatatgttgagtgtgtgtccaatgctatgaaattaaaatattaaataacatatttatggcattttcttgaagagtgtggttgaagaaatatttctccttttgtttttcttttttttttgtttgttactgccacttctttttaggagcaaatctccccaggggtgtacggtatttcttgactctgggaacagctgctacccccaagacttgccacgttgttctgccctcagatggaattaggtgaatgtgtgtagctgctttttcactcgtggtcctctccccatcccttgctctgaccccagagctctgtgtatttgcatccagaggccatggaaacattctttgcatttaagagacagatttattccctgtggagagtgggtggattcattgccacactcttttctcccagggacccaggaaactaggactttgtgtgtttgctgcccacctcccttttattttttaaatgcattaaaaactgtgctagtctcctttgcatggacttcaagctgcatgaaatgcaataaatctcattttagat

SEQ ID NO: 161056 - DNA, 547 bp, Homo sapiens
  Payload ID: 11459
  Gene Symbol: NFYC
  Gene Name: nuclear transcription factor Y, gamma
  ENST ID: ENST00000416859
  CDS Start-End: 9-547
ttgtcgagatgtccacagaaggaggatttggtggtactagcagcagtgatgcccagcaaagcctacagtcgttctggcctcgggtcatggaagaaatccggaatttaacagtgaaagacttccgagtgcaggaactcccactggctcgtattaagaagattatgaaactggatgaagatgtgaagatgatcagtgcagaagcgcctgtactctttgccaaggcagcccagatttttatcacagagttgactcttcgagcctggattcacacagaagataacaagcgccggactctacaggaggaggtgcgccagtctgtaactcctgccgagccagtccagtactatttcacgctggctcagcaacccaccgctgtccaagtccagggccagcagcaaggccagcagaccaccagctccacgaccaccatccagcctgggcagatcatcatcgcacagcctcagcagggccagaccacacctgtgacaatgcaggttggagaaggtcagcaggtgcagattgtccaggctcagccacagggtcaagc

SEQ ID NO: 161057 - DNA, 1717 bp, Homo sapiens
  Payload ID: 11459
  Gene Symbol: NFYC
  Gene Name: nuclear transcription factor Y, gamma
  Uniprot ID: Q13952
  ENST ID: ENST00000440226
  CDS Start-End: 445-1452
ttaatacattttcagttccaaaaaaatttgataacttctgttttgtacctaacttccactactacagtatgtggctctgagccagccaaagattcatgatctgttgactacacagatgtttgcgggctgatcatgcctgcacatctgtagttgggacagttcaaaatttaaaagcagactgcacagatggttctagacgtgctttttgaattgtgtacctttgtaatgttttggggggatatcagaggacagccagaatttgttaccagacttttaaatcgtacaggtctttgtactccaactaaacctacccatccattagcaagtgtacagagatatcgtcctggcaattgtgcatctttctcctttgaccttagcagtttgcatggcagattgtgccaagatgaggcctgtccagggacccatgcaataaaagttgtcgagatgtccacagaaggaggatttggtggtactagcagcagtgatgcccagcaaagcctacagtcgttctggcctcgggtcatggaagaaatccggaatttaacagtgaaagacttccgagtgcaggaactcccactggctcgtattaagaagattatgaaactggatgaagatgtgaagatgatcagtgcagaagcgcctgtactctttgccaaggcagcccagatttttatcacagagttgactcttcgagcctggattcacacagaagataacaagcgccggactctacagagaaatgatatcgccatggcaattacaaaatttgatcagtttgattttctcatcgatattgttccaagagatgaactgaaacctccaaagcgtcaggaggaggtgcgccagtctgtaactcctgccgagccagtccagtactatttcacgctggctcagcaacccaccgctgtccaagtccagggccagcagcaaggccagcagaccaccagctccacgaccaccatccagcctgggcagatcatcatcgcacagcctcagcagggccagaccacacctgtgacaatgcaggttggagaaggtcagcaggtgcagattgtccaggctcagccacagggtcaagcccaacaggcccagagtggcactggacagaccatgcaggtgatgcagcagatcatcactaacacaggagagatccagcagatcccggtgcagctgaatgccggccagctgcagtatatccgcttagcccagcctgtatcaggcactcaagttgtgcagggacagatccagacacttgccaccaatgctcaacagattacacagacagaggtccagcaaggacagcagcagttcagccagttcacagatggacagcagctctaccagatccagcaagtcaccatgcctgcgggccaggacctcgcccagcccatgttcatccagtcagccaaccagccctccgacgggcaggccccccaggtgaccggcgactgagggcctgagctggcaaggccaaggacacccaacacaatttttgccatacagccccaggcaatgggcacagccttcctccccagaggacccggccgacctcagcgcctcctgcaggctaggacactggtgcactacaccccatgcctgggggccgagattctccagcagaaagatgcaatattttttgtttcctttttttccatttttttctctaaggaatcaatatttcaatatgttgagtgtgtgtccaatgctatgaaattaa

SEQ ID NO: 161058 - DNA, 677 bp, Homo sapiens
  Payload ID: 11459
  Gene Symbol: NFYC
  Gene Name: nuclear transcription factor Y, gamma
  ENST ID: ENST00000414185
  CDS Start-End: 1-559
tccaagagatgaactgaaacctccaaagcgtcaggaggaggtgcgccagtctgtaactcctgccgagccagtccagtactatttcacgctggctcagcaacccaccgctgtccaagtccagggccagcagcaaggccagcagaccaccagctccacgaccaccatccagcctgggcagatcatcatcgcacagcctcagcagggccagaccacacctgtgacaatgcaggttggagaaggtcagcaggtgcagattgtccaggctcagccacagggtcaagcccaacaggcccagagtggcactggacagaccatgcaggtgatgcagcagatcatcactaacacaggagagatccagcagatcccggtgcagctgaatgccggccagctgcagtatatccgcttagcccagcctgtatcaggcactcaagttgtgcagggacagatccagacacttgccatggaaacattctttgcatttaagagacagatttattccctgtggagagtgggtggattcattgccacactcttttctcccagggacccaggaaactaggactttgtgtgtttgctgcccacctcccttttattttttaaatgcattaaaaactgtgctagtctcctttgcatggacttcaagctgcatgaaatgcaataaatctcattttagataa

SEQ ID NO: 161059 - DNA, 293 bp, Homo sapiens
  Payload ID: 11459
  Gene Symbol: NFYC
  Gene Name: nuclear transcription factor Y, gamma
  ENST ID: ENST00000530965
  CDS Start-End: 9-293
ttgtcgagatgtccacagaaggaggatttggtggtactagcagcagtgatgcccagcaaagcctacagtcgttctggcctcgggtcatggaagaaatccggaatttaacagtgatgatcagtgcagaagcgcctgtactctttgccaaggcagcccagatttttatcacagagttgactcttcgagcctggattcacacagaagataacaagcgccggactctacagagaaatgatatcgccatggcaattacaaaatttgatcagtttgattttctcatcgatattgttcca

SEQ ID NO: 161060 - DNA, 574 bp, Homo sapiens
  Payload ID: 11459
  Gene Symbol: NFYC
  Gene Name: nuclear transcription factor Y, gamma
  ENST ID: ENST00000534399
  CDS Start-End: 419-574
atgttgtgctcttgcctggcccgctgctgtcgccgccgccgcgctcgtggggtccgtgtgcctcgtcggcccggcccgcgggctttctcccattggcggaaggcgacggcgggggggctcgctcgtgattggtcggtggcggggaggccgcggacctggcaccttattggacgcgccagctccggtctaggggacacacaaacacaggatactgccagaaactgggcaagaggctgtttgtgaatctcagaaggcacccggtctttgtactccaactaaacctacccatccattagcaagtgtacagagatatcgtcctggcaattgtgcatctttctcctttgaccttagcagtttgcatggcagattgtgccaagatgaggcctgtccagggacccatgcaataaaagttgtcgagatgtccacagaaggaggatttggtggtactagcagcagtgatgcccagcaaagcctacagtcgttctggcctcgggtcatggaagaaatccggaatttaacagtgaaagacttccgagtgcaggaactcccactggctcgtattaagaagattatg

SEQ ID NO: 161061 - DNA, 525 bp, Homo sapiens
  Payload ID: 11459
  Gene Symbol: NFYC
  Gene Name: nuclear transcription factor Y, gamma
  ENST ID: ENST00000531464
  CDS Start-End: 345-525
ctttttctcttttttcctggtgagaagaacttgtgtccttcaaaagaagattacctttgtctttcgaagtcaggaatttataaaaagagtttgctggatggaaaaatcataaaggccataactctaaaacctaatgtaaagaagaacagttagagctgtccaaagatgggaaagaatgtcttaccagtctttgtactccaactaaacctacccatccattagcaagtgtacagagatatcgtcctggcaattgtgcatctttctcctttgaccttagcagtttgcatggcagattgtgccaagatgaggcctgtccagggacccatgcaataaaagttgtcgagatgtccacagaaggaggatttggtggtactagcagcagtgatgcccagcaaagcctacagtcgttctggcctcgggtcatggaagaaatccggaatttaacagtgaaagacttccgagtgcaggaactcccactggctcgtattaagaagattatgaaactggatgaagatgtgaagatga

SEQ ID NO: 161062 - DNA, 433 bp, Homo sapiens
  Payload ID: 11459
  Gene Symbol: NFYC
  Gene Name: nuclear transcription factor Y, gamma
  ENST ID: ENST00000525290
  CDS Start-End: 11-433
agttgtcgagatgtccacagaaggaggatttggtggtactagcagcagtgatgcccagcaaagcctacagtcgttctggcctcgggtcatggaagaaatccggaatttaacagtgaaagacttccgagtgcaggaactcccactggctcgtattaagaagattatgaaactggatgaagatgtgaagatgatcagtgcagaagcgcctgtactctttgccaaggcagcccagatttttatcacagagttgactcttcgagcctggattcacacagaagataacaagcgccggactctacagagaaatgatatcgccatggcaattacaaaatttgatcagtttgattttctcatcgatattgttccaagagatgaactgaaacctccaaagcgtcaggaggtgcgccagtctgtaactcctgccgagccagtc

SEQ ID NO: 161063 - DNA, 1314 bp, Homo sapiens
  Payload ID: 11459
  Gene Symbol: NFYC
  Gene Name: nuclear transcription factor Y, gamma
  ENST ID: ENST00000620728
  CDS Start-End: 613-1314
agatctcattccgcctccctctgtcgtcgccccttcccaattctcgcgagacctcaaggagcacagcttctgcgcaccgcacgatactgggagtccaggcgccaagggagggggaagggaaaaggggaaacggtgcaaacggcgtggccgccatcttgcttgtgcccccgcttcgcgcgcgctccgttctccgtgacgcacacttccccctcccctccgccgcgcctgggcctctgcattgcccgactccgtaggagcgcgggggcggctcctgctcttcctggactcctgagcagagttgtcgagatgtccacagaaggaggatttggtggtactagcagcagtgatgcccagcaaagcctacagtcgttctggcctcgggtcatggaagaaatccggaatttaacagtgaaagacttccgagtgcaggaactcccactggctcgtattaagaagattatgaaactggatgaagatgtgaagatgatcagtgcagaagcgcctgtactctttgccaaggcagcccagatttttatcacagagttgactcttcgagcctggattcacacagaagataacaagcgccggactctacagagaaatgatatcgccatggcaattacaaaatttgatcagtttgattttctcatcgatattgttccaagagatgaactgaaacctccaaagcgtcaggaggaggtgcgccagtctgtaactcctgccgagccagtccagtactatttcacgctggctcagcaacccaccgctgtccaagtccagggccagcagcaaggccagcagaccaccagctccacgaccaccatccagcctgggcagatcatcatcgcacagcctcagcagggccagaccacacctgtgacaatgcaggttggagaaggtcagcaggtgcagattgtccaggctcagccacagggtcaagcccaacaggcccagagtggcactggacagaccatgcaggtgatgcagcagatcatcactaacacaggagagatccagcagatcccggtgcagctgaatgccggccagctgcagtatatccgcttagcccagcctgtatcaggcactcaagttgtgcagggacagatccagacacttgccaccaatgctcaacagattacacagacagaggtccagcaaggacagcagcagttcagccagttcacagatggacagcagctctaccagatccagcaagtcaccatgcgggccaggacctcgcccagcccatgttcatccagtcagccaaccagccctccgacgggccccccaggtgaccggcgactgagggcctga

SEQ ID NO: 161064 - DNA, 3513 bp, Homo sapiens
  Payload ID: 11460
  Gene Symbol: NFX1
  Gene Name: nuclear transcription factor, X-box binding 1
  Uniprot ID: Q12986
  ENST ID: ENST00000318524
  CDS Start-End: 29-2530
cagctcgatctaggttctgcggcacgggatggcggaggcgcctcctgtctcaggtacttttaaattcaatacagatgctgctgaattcattcctcaggagaaaaaaaattctggtctaaattgtgggactcaaaggagactagactctaataggattggtagaagaaattacagttcaccacctccctgtcacctttccaggcaggtcccttatgatgaaatctctgctgttcatcagcatagttatcatccgtcaggaagcaaacctaagagtcagcagacgtctttccagtcctctccttgtaataaatcgcccaagagccatggccttcagaatcaaccttggcagaaattgaggaatgagaagcaccatatcagagtcaagaaagcacagagtcttgctgagcagacctcagatacagctggattagagagctcgaccagatcagagagtgggacagacctcagagagcatagtccttctgagagtgagaaggaagttgtgggtgcagatcccaggggagcaaaacccaaaaaagcaacacagtttgtatacagctatggtagaggaccaaaagtcaaggggaaactcaaatgtgaatggagtaaccgaacaactccaaaaccggaggatgctggacccgaaagtaccaaacctgtgggggttttccaccctgactcttcagaggcatcctctagaaaaggagtattggatgggtatggagccagacgaaatgagcagagaagatacccacagaaaaggcctccctgggaagtggagggggccaggccacgaccaggcagaaatccaccaaaacaggagggccaccgacatacaaacgcaggacacagaaacaacatgggccccattccaaaggatgacctcaatgaaagaccagcaaaatctacctgtgacagtgagaacttggcagtcatcaacaagtcttccaggagggttgaccaagagaaatgcactgtacggaggcaggatcctcaagtagtatctcctttctcccgaggcaaacagaaccatgtgctaaagaatgtggaaacgcacacaggttctctaattgaacaactaacaacagaaaaatacgagtgcatggtgtgctgtgaattggttcgtgtcacggccccagtgtggagttgtcagagctgttaccatgtgtttcatttgaactgcataaagaaatgggcaaggtctccagcatctcaagcagatggccagagtggttggaggtgccctgcctgtcagaatgtttctgcacatgttcctaatacctacacttgtttctgtggcaaggtaaagaatcctgagtggagcagaaatgaaattccacatagctgtggtgaggtttgtagaaagaaacagcctggccaggactgcccacattcctgtaaccttctctgccatccaggaccctgcccaccctgccctgcctttatgacaaaaacatgtgaatgtggacgaaccaggcacacagttcgctgtggtcaggctgtctcagtccactgttctaacccatgtgagaatattttgaactgtggtcagcaccagtgtgctgagctgtgccatgggggtcagtgccagccttgccagatcattttgaaccaggtatgctattgcggcagcacctcccgagatgtgttatgtggaaccgatgtaggaaagtctgatggatttggggatttcagctgtttaaagatatgtggcaaggacttgaaatgcggtaaccatacatgttcgcaagtgtgccaccctcagccctgccagcaatgcccacggctcccccagctggtgcgctgttgcccctgtggccaaactcctctcagccaattgctagaacttggaagtagtagtcggaaaacatgcatggaccctgtgccttcatgtggaaaagtgtgcggcaagcctctgccttgtggttccttagatttcattcatacctgtgaaaagctctgccatgaaggagactgtggaccatgctctcgcacatcagttatttcctgcagatgctctttcagaacaaaggagcttccatgtaccagtctcaaaagtgaagatgctacatttatgtgtgacaagcggtgtaacaagaaacggttgtgtggacggcataaatgtaatgagatatgctgtgtggataaggagcacaagtgtcctttgatttgtgggaggaaactccgttgtggccttcataggtgtgaagaaccttgtcatcgtggaaactgccagacatgctggcaagccagttttgatgaattaacctgccattgtggtgcatcagtgatttaccctccagttccctgtggtactaggccccctgaatgtacccaaacctgcgctagagtccatgagtgtgaccatccagtatatcattcttgtcatagtgaggagaagtgtcccccttgcactttcctaactcagaagtggtgcatgggcaagcatgagcagtcccactactgggcgtctacccagaagaaaagaagtcattatatgaaaaagatacctgcacacgcatgtttatagcagcacaattcacaattgcaaaaatgtggaaccagcccaactgcccatcagtcaacaagtggataaagaaattgtggtgtatctatacgtaccatggaatactactcagccaggaacgaaataatggcattcacagcaacctggatggatttggagaccattattctaagtgaagtaactcaggaatggaaaaccaaacatcgtatgttctcaattataagagggagctaagctatgaggacgcaaaggcatgagaatgatacaatggactttggggactctggggaaaggacgggaggcgggtgagggataaaaaactacacactgggtccgagcacggtggctcatgcctataatcccagcactttgggaggccaaggcaggtagattatgaggtcgggagttcgaaaccagcctggccaacaaggtgagaccccccccatctctactaaaataattagccgggcctggtggcgcatccctgtaatcccagctactttacttgggaggctgaggcaggagaattgcttgaactcgggaggcggatgttgcagtgagccaatatcgcaccactgcactccagcctgggcaacagagcaagactccgtctcgaaaaaaaaaataaattttaaaaactacacattgggtacaatgtacactcctcgggtgatgggtgcaccaaaatctcaaaaatcactactaaggaacttatccatgtaaccaaacaccacctgttccccaagaactattgaaataagaaaaaagaaaaaaaaaaaatcactgattgcaggtcaccctaacagatataataatgaaaaagtctgagatgttgcgagaattaccaaaatgtgatgcagacacgaaatgagcatgtgctgttggaaaagtggaacagatagacttgctggagacagggttgccacaaagtttcaatttgtaaaaaatgtgatatctatgaaatgcaataaagtgaagtccaataa

SEQ ID NO: 161065 - DNA, 3609 bp, Homo sapiens
  Payload ID: 11460
  Gene Symbol: NFX1
  Gene Name: nuclear transcription factor, X-box binding 1
  Uniprot ID: Q12986
  ENST ID: ENST00000379521
  CDS Start-End: 62-3136
acgtgacctggtgacagtgctgacttggctgtacagctcgatctaggttctgcggcacgggatggcggaggcgcctcctgtctcaggtacttttaaattcaatacagatgctgctgaattcattcctcaggagaaaaaaaattctggtctaaattgtgggactcaaaggagactagactctaataggattggtagaagaaattacagttcaccacctccctgtcacctttccaggcaggtcccttatgatgaaatctctgctgttcatcagcatagttatcatccgtcaggaagcaaacctaagagtcagcagacgtctttccagtcctctccttgtaataaatcgcccaagagccatggccttcagaatcaaccttggcagaaattgaggaatgagaagcaccatatcagagtcaagaaagcacagagtcttgctgagcagacctcagatacagctggattagagagctcgaccagatcagagagtgggacagacctcagagagcatagtccttctgagagtgagaaggaagttgtgggtgcagatcccaggggagcaaaacccaaaaaagcaacacagtttgtatacagctatggtagaggaccaaaagtcaaggggaaactcaaatgtgaatggagtaaccgaacaactccaaaaccggaggatgctggacccgaaagtaccaaacctgtgggggttttccaccctgactcttcagaggcatcctctagaaaaggagtattggatgggtatggagccagacgaaatgagcagagaagatacccacagaaaaggcctccctgggaagtggagggggccaggccacgaccaggcagaaatccaccaaaacaggagggccaccgacatacaaacgcaggacacagaaacaacatgggccccattccaaaggatgacctcaatgaaagaccagcaaaatctacctgtgacagtgagaacttggcagtcatcaacaagtcttccaggagggttgaccaagagaaatgcactgtacggaggcaggatcctcaagtagtatctcctttctcccgaggcaaacagaaccatgtgctaaagaatgtggaaacgcacacaggttctctaattgaacaactaacaacagaaaaatacgagtgcatggtgtgctgtgaattggttcgtgtcacggccccagtgtggagttgtcagagctgttaccatgtgtttcatttgaactgcataaagaaatgggcaaggtctccagcatctcaagcagatggccagagtggttggaggtgccctgcctgtcagaatgtttctgcacatgttcctaatacctacacttgtttctgtggcaaggtaaagaatcctgagtggagcagaaatgaaattccacatagctgtggtgaggtttgtagaaagaaacagcctggccaggactgcccacattcctgtaaccttctctgccatccaggaccctgcccaccctgccctgcctttatgacaaaaacatgtgaatgtggacgaaccaggcacacagttcgctgtggtcaggctgtctcagtccactgttctaacccatgtgagaatattttgaactgtggtcagcaccagtgtgctgagctgtgccatgggggtcagtgccagccttgccagatcattttgaaccaggtatgctattgcggcagcacctcccgagatgtgttatgtggaaccgatgtaggaaagtctgatggatttggggatttcagctgtttaaagatatgtggcaaggacttgaaatgcggtaaccatacatgttcgcaagtgtgccaccctcagccctgccagcaatgcccacggctcccccagctggtgcgctgttgcccctgtggccaaactcctctcagccaattgctagaacttggaagtagtagtcggaaaacatgcatggaccctgtgccttcatgtggaaaagtgtgcggcaagcctctgccttgtggttccttagatttcattcatacctgtgaaaagctctgccatgaaggagactgtggaccatgctctcgcacatcagttatttcctgcagatgctctttcagaacaaaggagcttccatgtaccagtctcaaaagtgaagatgctacatttatgtgtgacaagcggtgtaacaagaaacggttgtgtggacggcataaatgtaatgagatatgctgtgtggataaggagcacaagtgtcctttgatttgtgggaggaaactccgttgtggccttcataggtgtgaagaaccttgtcatcgtggaaactgccagacatgctggcaagccagttttgatgaattaacctgccattgtggtgcatcagtgatttaccctccagttccctgtggtactaggccccctgaatgtacccaaacctgcgctagagtccatgagtgtgaccatccagtatatcattcttgtcatagtgaggagaagtgtcccccttgcactttcctaactcagaagtggtgcatgggcaagcatgagtttcggagcaacatcccctgtcacctggttgatatctcttgcggattaccctgcagtgccacgctaccatgtgggatgcacaaatgtcagagactctgtcacaaaggggagtgtcttgtggatgagccctgcaagcagccctgcaccacccccagagctgactgtggtcacccgtgtatggcaccctgccataccagctcaccctgccctgtgactgcttgtaaagctaaggtagagctacagtgtgaatgtggacgaagaaaagagatggtgatttgctctgaagcatctagtacttatcaaagaatagctgcaatctccatggcctctaagataacagacatgcagcttggaggttcagtggagatcagcaagttaattaccaaaaaggaagttcatcaagccaggctggagtgtgatgaggagtgttcagccttggaaaggaaaaagagattagcagaggcatttcatatcagtgaggattctgatcctttcaatatacgttcttcagggtcaaaattcagtgatagtttgaaagaagatgccaggaaggacttaaagtttgtcagtgacgttgagaaggaaatggaaaccctcgtggaggccgtgaataaggttgaagtcgaaacatcccactggacatttctctaaggccagcttgatgaaaaaaaaaaagcaatcaagtcctggaaacactttcaacctagagtagttgtaggaaaaagtcacaacttctttgaggatccttatctttctcaaaacacagccattataacatctgtggaagcctgtcctggttcaggacagttgactgcagaaaagatctacagtcggctgggcacagtgtctcatgcctgtaatgccagcactttgggaggccaaggcaggcagatcacttgaggtcaggagttctagatcagcttggccaacatgacgaaaccctgtctctactaaaaatataaaaattagctgggtgtggtggcgggcacctgttattccagctacttgcaaggcttaggcaggagaattccttgaacccgggaggcagaggttgctgtgagctgagattctgccactgcactccagcctgggcaacaagagtgaaactctgtctcaaaaagaaa

SEQ ID NO: 161066 - DNA, 4604 bp, Homo sapiens
  Payload ID: 11460
  Gene Symbol: NFX1
  Gene Name: nuclear transcription factor, X-box binding 1
  Uniprot ID: Q12986
  ENST ID: ENST00000379540
  CDS Start-End: 63-3425
cacgtgacctggtgacagtgctgacttggctgtacagctcgatctaggttctgcggcacgggatggcggaggcgcctcctgtctcaggtacttttaaattcaatacagatgctgctgaattcattcctcaggagaaaaaaaattctggtctaaattgtgggactcaaaggagactagactctaataggattggtagaagaaattacagttcaccacctccctgtcacctttccaggcaggtcccttatgatgaaatctctgctgttcatcagcatagttatcatccgtcaggaagcaaacctaagagtcagcagacgtctttccagtcctctccttgtaataaatcgcccaagagccatggccttcagaatcaaccttggcagaaattgaggaatgagaagcaccatatcagagtcaagaaagcacagagtcttgctgagcagacctcagatacagctggattagagagctcgaccagatcagagagtgggacagacctcagagagcatagtccttctgagagtgagaaggaagttgtgggtgcagatcccaggggagcaaaacccaaaaaagcaacacagtttgtatacagctatggtagaggaccaaaagtcaaggggaaactcaaatgtgaatggagtaaccgaacaactccaaaaccggaggatgctggacccgaaagtaccaaacctgtgggggttttccaccctgactcttcagaggcatcctctagaaaaggagtattggatgggtatggagccagacgaaatgagcagagaagatacccacagaaaaggcctccctgggaagtggagggggccaggccacgaccaggcagaaatccaccaaaacaggagggccaccgacatacaaacgcaggacacagaaacaacatgggccccattccaaaggatgacctcaatgaaagaccagcaaaatctacctgtgacagtgagaacttggcagtcatcaacaagtcttccaggagggttgaccaagagaaatgcactgtacggaggcaggatcctcaagtagtatctcctttctcccgaggcaaacagaaccatgtgctaaagaatgtggaaacgcacacaggttctctaattgaacaactaacaacagaaaaatacgagtgcatggtgtgctgtgaattggttcgtgtcacggccccagtgtggagttgtcagagctgttaccatgtgtttcatttgaactgcataaagaaatgggcaaggtctccagcatctcaagcagatggccagagtggttggaggtgccctgcctgtcagaatgtttctgcacatgttcctaatacctacacttgtttctgtggcaaggtaaagaatcctgagtggagcagaaatgaaattccacatagctgtggtgaggtttgtagaaagaaacagcctggccaggactgcccacattcctgtaaccttctctgccatccaggaccctgcccaccctgccctgcctttatgacaaaaacatgtgaatgtggacgaaccaggcacacagttcgctgtggtcaggctgtctcagtccactgttctaacccatgtgagaatattttgaactgtggtcagcaccagtgtgctgagctgtgccatgggggtcagtgccagccttgccagatcattttgaaccaggtatgctattgcggcagcacctcccgagatgtgttatgtggaaccgatgtaggaaagtctgatggatttggggatttcagctgtttaaagatatgtggcaaggacttgaaatgcggtaaccatacatgttcgcaagtgtgccaccctcagccctgccagcaatgcccacggctcccccagctggtgcgctgttgcccctgtggccaaactcctctcagccaattgctagaacttggaagtagtagtcggaaaacatgcatggaccctgtgccttcatgtggaaaagtgtgcggcaagcctctgccttgtggttccttagatttcattcatacctgtgaaaagctctgccatgaaggagactgtggaccatgctctcgcacatcagttatttcctgcagatgctctttcagaacaaaggagcttccatgtaccagtctcaaaagtgaagatgctacatttatgtgtgacaagcggtgtaacaagaaacggttgtgtggacggcataaatgtaatgagatatgctgtgtggataaggagcacaagtgtcctttgatttgtgggaggaaactccgttgtggccttcataggtgtgaagaaccttgtcatcgtggaaactgccagacatgctggcaagccagttttgatgaattaacctgccattgtggtgcatcagtgatttaccctccagttccctgtggtactaggccccctgaatgtacccaaacctgcgctagagtccatgagtgtgaccatccagtatatcattcttgtcatagtgaggagaagtgtcccccttgcactttcctaactcagaagtggtgcatgggcaagcatgagtttcggagcaacatcccctgtcacctggttgatatctcttgcggattaccctgcagtgccacgctaccatgtgggatgcacaaatgtcagagactctgtcacaaaggggagtgtcttgtggatgagccctgcaagcagccctgcaccacccccagagctgactgtggtcacccgtgtatggcaccctgccataccagctcaccctgccctgtgactgcttgtaaagctaaggtagagctacagtgtgaatgtggacgaagaaaagagatggtgatttgctctgaagcatctagtacttatcaaagaatagctgcaatctccatggcctctaagataacagacatgcagcttggaggttcagtggagatcagcaagttaattaccaaaaaggaagttcatcaagccaggctggagtgtgatgaggagtgttcagccttggaaaggaaaaagagattagcagaggcatttcatatcagtgaggattctgatcctttcaatatacgttcttcagggtcaaaattcagtgatagtttgaaagaagatgccaggaaggacttaaagtttgtcagtgacgttgagaaggaaatggaaaccctcgtggaggccgtgaataagggaaagaatagtaagaaaagccacagcttccctcccatgaacagagaccaccgccggatcatccatgacttggcccaagtttatggcctggagagcgtgagctatgacagtgaaccgaagcgcaatgtggtggtcactgccatcagggggaagtccgtttgtcctcctaccacgctgacaggtgtgcttgaaagggaaatgcaggcacggcctccaccaccgattcctcatcacagacatcagtcagacaagaatcctgggagcagtaatttacagaaaataaccaaggagccaataattgactattttgacgtccaggactaagaagatcatgatgcacttagataaaagaatgattaggtatagtggagacttatttgccagcagataaatcatgcccgttcccctctgcctggcagaatcacagtctcacatactgtcttgtactgacacatccaaagcatgagtgtgtcagaaatcccttgtctattcctgtctgtataaagtgtttcattatgaccagatctctgattgtatggtcactaggtatgcaatcacgcattcaaagaggctctttacaccatcactgtgattgctctgagagttgagggactattgggctttatttggacaaaccaaacttttagcctgaaaccaactttatgccactaagtcatagcctcagttgtcccagttatttgtcctcctgaaaatgcctgaaacatcagacagacattgcttgctttacccaaactgatcaaaatctttaggagcacaaatgaattttttagtctgaaataccaaataatgaattggtataccatatccggaatcacacatgttatcttaaacccagccatcatacctaagtcttttgccaaaacctctcataggtatatctagctgaacttattttggcattttcaatgtgatcagttctagacctagaagggggtcaggctgctttacagaattctatttccttaagtccctggcacttctcataccacatcactgaacctgttcagtaacaatcagtttggccgtcccccatgatggtaggaaatatagagagcaagttcttctgccagggtcacactgtggtctctgaactgaccagtatatccctaactcctctttgatagagaaagagtctcaaatggacaactgtcctgtgttgctttccctaggccttcagcagcctattggctctccctgcctctgagctctggactctgtttgaatattccaagtagtatatggacagtccagggcttatgcccagcagcccactggaggcattcttcaggctcctttaaggcaggtgcattgatagttccattagtgtgacccttgcattggcacccctccagcctggaggccaggcttccagcaacttccttctgccctagagcaagccatgagccccagagcagtagcaggagacttgagaagtagagtgacaaaaacaagcacttaattaaattataaaatttaacttta

SEQ ID NO: 161067 - DNA, 3723 bp, Homo sapiens
  Payload ID: 11461
  Gene Symbol: NFXL1
  Gene Name: nuclear transcription factor, X-box binding-like 1
  Uniprot ID: Q6ZNB6
  ENST ID: ENST00000329043
  CDS Start-End: 58-2793
ggaacgcgggcgggggcttctgggagttgtagtctgttgggggcgtgcgcagtcgggatggaagcttcctggcgccaggtggccggtggccgaggccgatcccggggacgggccactgccgccccctcaggaaatggagtccatctccgcggcgccggaggagggcgagagaaggggtcggtgggcgcagttccttctggcaccagtcccggaggagtcgcgaccacggcggctgcagggagcaggcacagccccgcaggatcccaagccctgcagactaccgcagccagcgagctaatgtctcagaaaaaatttgaagaaatcaagaaagctaaccaagctgcagccagaaaacttgttgaagaacagtttagctcttcatctgaagaaggagatgaagattttgaaggaaaacagggaaaaatacttgcaaatacgtttataacatacactactcagacagatggagatacacgtgaattagagcgaacaaaacaatatgtaaatgaagcttttcaagcaggggctatgacatgcctaatttgtattgcttcggtgaagagaaaccaagcagtttggagctgttcgggatgtttctgtatatttcacatgccctgtatccagaagtgggctaaagacagccagtttcttgtatcttctgtgactgatgatgattttggaaagaaagattgtccctggccttgtccaaaatgtaggtttgaatacaaacgatctgaaacacctagtaggtactattgctattgtggaaaagtagaagatccacctttagatccgtggcttgtgcctcattcatgtggccaagtatgtgagcgtgaatttaaacctccttgtggccataaatgtttactcctctgtcatccaggtccctgccctccttgtccaaagatggtcacaactacttgttactgtaagaaagcaaaacctatccctcgtaggtgcagtgccaaggaatggtcttgtcagctgccatgtggacagaagttgctttgtgggcaacataagtgtgaaaatccttgtcatgcaggaagctgtcagccttgtccaagagttagtagacaaaagtgtgtctgtggcaaaaaagtagctgaaagaagttgtgcaagtccactatggcactgtgatcaagtatgtggaaaaacactgccatgtggtaatcacacatgtgagcaagtttgccatgttggtgcttgtggagaatgtcctcgatctgggaaaaggttctgtccatgtcagaaatcaaagttttctttgccttgtacagaagatgtaccaacttgtggagacagttgtgacaaagtacttgaatgcggaatccatagatgttcacagcgttgtcaccgaggtccctgtgaaacatgtagacaagaagtggaaaagcattgtcgctgtggaaagcatacaaaacgaatgccttgtcataaaccttatctgtgtgaaactaagtgtgttaagatgcgtgactgtcagaagcatcaatgtagaagaaagtgttgccctggaaactgtccaccttgtgatcaaaactgtggacggactttaggatgtagaaaccataagtgtccatctgtctgtcacagaggcagttgctatccctgcccagaaaccgtagatgtgaagtgtaattgtggcaatacaaaggtgacagtgccctgtggccgagaacgtaccacaagaccacccaagtgcaaggagcaatgcagtcgaccaccaacttgtcatcatacaagtcaagaaaaacatcgctgtcactttggttcttgtccaccatgtcatcaaccttgccaaaaagttttggagaaatgtggtcacttgtgtcctgctccgtgtcatgatcaagcattaataaagcagactggcaggcaccagcctacaggcccttgggaacagccttctgagccagcatttattcagactgcattaccgtgtcctccatgtcaagttcctattcctatggaatgtcttgggaaacatgaggtgagtccactaccatgccatgctgtaggaccctactcttgtaaaagagtttgtggaagaatcttggattgtcagaatcacacatgtatgaaagaatgccacaaagtaaccaaaactgatggctgcactggaaaaaacaaggctggcccagaatgccttcattgtgaggaagggtgctccaagtcacggccactaggttgtcttcacccatgtattttgcgatgtcaccctggagaatgtccaccttgtgttcagatgcttagaataaaatgtcactgtaagatcacaagcctgtatgtggaatgtagaaaaataaccacagctgatgtaaatgaaaagaacctcctcagttgttgcaaaaatcagtgccctaaagagcttccttgtggtcatagatgcaaagagatgtgtcatcctggtgaatgtccctttaactgcaaccagaaggtaaaacttagatgtccttgtaaaagaataaaaaaggaattgcagtgcaacaaagtacgtgaaaatcaggtttcaatagaatgtgacacaacgtgcaaggaaatgaagcggaaagcatctgagataaaagaagcagaagccaaagctgctcttgaagaagaaaaacgaagacaacaggctgaactagaagcttttgaaaacagactgaagggtcgtcggaagaagaacaggaaaagagatgaagtggcagttgagctatcactatggcaaaaacataaatattatctcatttcagtgtgtggagttgtggttgtagtgtttgcctggtacatcacccatgatgtcaattaaaaaaagttttgatcttttaatgtaactcagattggatttagataagttgttaaatttgaaatattagaaaatgtatattatagaacatgatatatatttacattcatctctgtattctctcagctgttgttagaaggacagaatgttaaactttatcttaattagtatactagaaagggcagtataatactgttttaaagtgaaggcatgactgaaactaaaatatttcataaggcttagctagaggcagagtaacgtgtttttgttcattgggcttccttgtacttagttttttcatttaataattcaaaccaacacttttaaaaaaataattcagatgagactgagccatatctgcagtaagagaaatatttcttaatgttttggttacttatgatagagtacttttcttgatactgttaactttgtgctttttaaaaaaagtgattctctaacagacctcttaaattgtgacatgaaggtatgtaattagatttcagaaattggtttattagtgaggaatttttatcaataaatgtcatggggcgtgttcttcagaatatatagttattttcaacaaatgccaggctagattcctcacatgtggctatttcttatgtaagaagcttttaactgaagttggcatgtttcgtaaaacttgcgtgtcttttaaaaataataaaaggaagatgagtatttatgaagaatatgtgctgacaacagggcttatgaggtctatgtaccttaatctcgtttctccttaccacaatcttaaatagatttcagctgaaaataatcagttcttatgaaaacaaatagagaaatatcagtaagtcaaatctgtttgaattataattcctttcaaatagttttgctatttaatttatatgattaatgttttcattaaaatttttgataccaaatttgtaa

SEQ ID NO: 161068 - DNA, 3728 bp, Homo sapiens
  Payload ID: 11461
  Gene Symbol: NFXL1
  Gene Name: nuclear transcription factor, X-box binding-like 1
  Uniprot ID: Q6ZNB6
  ENST ID: ENST00000381538
  CDS Start-End: 70-2805
gtcggtaaggagacgtagctttccgtggggtgtaccactgcagttggttcccggcgggagacgcaggggatggaagcttcctggcgccaggtggccggtggccgaggccgatcccggggacgggccactgccgccccctcaggaaatggagtccatctccgcggcgccggaggagggcgagagaaggggtcggtgggcgcagttccttctggcaccagtcccggaggagtcgcgaccacggcggctgcagggagcaggcacagccccgcaggatcccaagccctgcagactaccgcagccagcgagctaatgtctcagaaaaaatttgaagaaatcaagaaagctaaccaagctgcagccagaaaacttgttgaagaacagtttagctcttcatctgaagaaggagatgaagattttgaaggaaaacagggaaaaatacttgcaaatacgtttataacatacactactcagacagatggagatacacgtgaattagagcgaacaaaacaatatgtaaatgaagcttttcaagcaggggctatgacatgcctaatttgtattgcttcggtgaagagaaaccaagcagtttggagctgttcgggatgtttctgtatatttcacatgccctgtatccagaagtgggctaaagacagccagtttcttgtatcttctgtgactgatgatgattttggaaagaaagattgtccctggccttgtccaaaatgtaggtttgaatacaaacgatctgaaacacctagtaggtactattgctattgtggaaaagtagaagatccacctttagatccgtggcttgtgcctcattcatgtggccaagtatgtgagcgtgaatttaaacctccttgtggccataaatgtttactcctctgtcatccaggtccctgccctccttgtccaaagatggtcacaactacttgttactgtaagaaagcaaaacctatccctcgtaggtgcagtgccaaggaatggtcttgtcagctgccatgtggacagaagttgctttgtgggcaacataagtgtgaaaatccttgtcatgcaggaagctgtcagccttgtccaagagttagtagacaaaagtgtgtctgtggcaaaaaagtagctgaaagaagttgtgcaagtccactatggcactgtgatcaagtatgtggaaaaacactgccatgtggtaatcacacatgtgagcaagtttgccatgttggtgcttgtggagaatgtcctcgatctgggaaaaggttctgtccatgtcagaaatcaaagttttctttgccttgtacagaagatgtaccaacttgtggagacagttgtgacaaagtacttgaatgcggaatccatagatgttcacagcgttgtcaccgaggtccctgtgaaacatgtagacaagaagtggaaaagcattgtcgctgtggaaagcatacaaaacgaatgccttgtcataaaccttatctgtgtgaaactaagtgtgttaagatgcgtgactgtcagaagcatcaatgtagaagaaagtgttgccctggaaactgtccaccttgtgatcaaaactgtggacggactttaggatgtagaaaccataagtgtccatctgtctgtcacagaggcagttgctatccctgcccagaaaccgtagatgtgaagtgtaattgtggcaatacaaaggtgacagtgccctgtggccgagaacgtaccacaagaccacccaagtgcaaggagcaatgcagtcgaccaccaacttgtcatcatacaagtcaagaaaaacatcgctgtcactttggttcttgtccaccatgtcatcaaccttgccaaaaagttttggagaaatgtggtcacttgtgtcctgctccgtgtcatgatcaagcattaataaagcagactggcaggcaccagcctacaggcccttgggaacagccttctgagccagcatttattcagactgcattaccgtgtcctccatgtcaagttcctattcctatggaatgtcttgggaaacatgaggtgagtccactaccatgccatgctgtaggaccctactcttgtaaaagagtttgtggaagaatcttggattgtcagaatcacacatgtatgaaagaatgccacaaagtaaccaaaactgatggctgcactggaaaaaacaaggctggcccagaatgccttcattgtgaggaagggtgctccaagtcacggccactaggttgtcttcacccatgtattttgcgatgtcaccctggagaatgtccaccttgtgttcagatgcttagaataaaatgtcactgtaagatcacaagcctgtatgtggaatgtagaaaaataaccacagctgatgtaaatgaaaagaacctcctcagttgttgcaaaaatcagtgccctaaagagcttccttgtggtcatagatgcaaagagatgtgtcatcctggtgaatgtccctttaactgcaaccagaaggtaaaacttagatgtccttgtaaaagaataaaaaaggaattgcagtgcaacaaagtacgtgaaaatcaggtttcaatagaatgtgacacaacgtgcaaggaaatgaagcggaaagcatctgagataaaagaagcagaagccaaagctgctcttgaagaagaaaaacgaagacaacaggctgaactagaagcttttgaaaacagactgaagggtcgtcggaagaagaacaggaaaagagatgaagtggcagttgagctatcactatggcaaaaacataaatattatctcatttcagtgtgtggagttgtggttgtagtgtttgcctggtacatcacccatgatgtcaattaaaaaaagttttgatcttttaatgtaactcagattggatttagataagttgttaaatttgaaatattagaaaatgtatattatagaacatgatatatatttacattcatctctgtattctctcagctgttgttagaaggacagaatgttaaactttatcttaattagtatactagaaagggcagtataatactgttttaaagtgaaggcatgactgaaactaaaatatttcataaggcttagctagaggcagagtaacgtgtttttgttcattgggcttccttgtacttagttttttcatttaataattcaaaccaacacttttaaaaaaataattcagatgagactgagccatatctgcagtaagagaaatatttcttaatgttttggttacttatgatagagtacttttcttgatactgttaactttgtgctttttaaaaaaagtgattctctaacagacctcttaaattgtgacatgaaggtatgtaattagatttcagaaattggtttattagtgaggaatttttatcaataaatgtcatggggcgtgttcttcagaatatatagttattttcaacaaatgccaggctagattcctcacatgtggctatttcttatgtaagaagcttttaactgaagttggcatgtttcgtaaaacttgcgtgtcttttaaaaataataaaaggaagatgagtatttatgaagaatatgtgctgacaacagggcttatgaggtctatgtaccttaatctcgtttctccttaccacaatcttaaatagatttcagctgaaaataatcagttcttatgaaaacaaatagagaaatatcagtaagtcaaatctgtttgaattataattcctttcaaatagttttgctatttaatttatatgattaatgttttcattaaaatttttgataccaaa

SEQ ID NO: 161069 - DNA, 3833 bp, Homo sapiens
  Payload ID: 11461
  Gene Symbol: NFXL1
  Gene Name: nuclear transcription factor, X-box binding-like 1
  Uniprot ID: Q6ZNB6
  ENST ID: ENST00000507489
  CDS Start-End: 178-2913
gactcttcccctaccacgctcccgcagaggctgaggaggcggtttcgacttctcctccggctttctgtcttcggcactgtgtgcttcttgctccgcggtttatttctgtacctagtcctccctcccctcttcggtccatctccaaagcccgggcttggcggggactcgccctccgggatggaagcttcctggcgccaggtggccggtggccgaggccgatcccggggacgggccactgccgccccctcaggaaatggagtccatctccgcggcgccggaggagggcgagagaaggggtcggtgggcgcagttccttctggcaccagtcccggaggagtcgcgaccacggcggctgcagggagcaggcacagccccgcaggatcccaagccctgcagactaccgcagccagcgagctaatgtctcagaaaaaatttgaagaaatcaagaaagctaaccaagctgcagccagaaaacttgttgaagaacagtttagctcttcatctgaagaaggagatgaagattttgaaggaaaacagggaaaaatacttgcaaatacgtttataacatacactactcagacagatggagatacacgtgaattagagcgaacaaaacaatatgtaaatgaagcttttcaagcaggggctatgacatgcctaatttgtattgcttcggtgaagagaaaccaagcagtttggagctgttcgggatgtttctgtatatttcacatgccctgtatccagaagtgggctaaagacagccagtttcttgtatcttctgtgactgatgatgattttggaaagaaagattgtccctggccttgtccaaaatgtaggtttgaatacaaacgatctgaaacacctagtaggtactattgctattgtggaaaagtagaagatccacctttagatccgtggcttgtgcctcattcatgtggccaagtatgtgagcgtgaatttaaacctccttgtggccataaatgtttactcctctgtcatccaggtccctgccctccttgtccaaagatggtcacaactacttgttactgtaagaaagcaaaacctatccctcgtaggtgcagtgccaaggaatggtcttgtcagctgccatgtggacagaagttgctttgtgggcaacataagtgtgaaaatccttgtcatgcaggaagctgtcagccttgtccaagagttagtagacaaaagtgtgtctgtggcaaaaaagtagctgaaagaagttgtgcaagtccactatggcactgtgatcaagtatgtggaaaaacactgccatgtggtaatcacacatgtgagcaagtttgccatgttggtgcttgtggagaatgtcctcgatctgggaaaaggttctgtccatgtcagaaatcaaagttttctttgccttgtacagaagatgtaccaacttgtggagacagttgtgacaaagtacttgaatgcggaatccatagatgttcacagcgttgtcaccgaggtccctgtgaaacatgtagacaagaagtggaaaagcattgtcgctgtggaaagcatacaaaacgaatgccttgtcataaaccttatctgtgtgaaactaagtgtgttaagatgcgtgactgtcagaagcatcaatgtagaagaaagtgttgccctggaaactgtccaccttgtgatcaaaactgtggacggactttaggatgtagaaaccataagtgtccatctgtctgtcacagaggcagttgctatccctgcccagaaaccgtagatgtgaagtgtaattgtggcaatacaaaggtgacagtgccctgtggccgagaacgtaccacaagaccacccaagtgcaaggagcaatgcagtcgaccaccaacttgtcatcatacaagtcaagaaaaacatcgctgtcactttggttcttgtccaccatgtcatcaaccttgccaaaaagttttggagaaatgtggtcacttgtgtcctgctccgtgtcatgatcaagcattaataaagcagactggcaggcaccagcctacaggcccttgggaacagccttctgagccagcatttattcagactgcattaccgtgtcctccatgtcaagttcctattcctatggaatgtcttgggaaacatgaggtgagtccactaccatgccatgctgtaggaccctactcttgtaaaagagtttgtggaagaatcttggattgtcagaatcacacatgtatgaaagaatgccacaaagtaaccaaaactgatggctgcactggaaaaaacaaggctggcccagaatgccttcattgtgaggaagggtgctccaagtcacggccactaggttgtcttcacccatgtattttgcgatgtcaccctggagaatgtccaccttgtgttcagatgcttagaataaaatgtcactgtaagatcacaagcctgtatgtggaatgtagaaaaataaccacagctgatgtaaatgaaaagaacctcctcagttgttgcaaaaatcagtgccctaaagagcttccttgtggtcatagatgcaaagagatgtgtcatcctggtgaatgtccctttaactgcaaccagaaggtaaaacttagatgtccttgtaaaagaataaaaaaggaattgcagtgcaacaaagtacgtgaaaatcaggtttcaatagaatgtgacacaacgtgcaaggaaatgaagcggaaagcatctgagataaaagaagcagaagccaaagctgctcttgaagaagaaaaacgaagacaacaggctgaactagaagcttttgaaaacagactgaagggtcgtcggaagaagaacaggaaaagagatgaagtggcagttgagctatcactatggcaaaaacataaatattatctcatttcagtgtgtggagttgtggttgtagtgtttgcctggtacatcacccatgatgtcaattaaaaaaagttttgatcttttaatgtaactcagattggatttagataagttgttaaatttgaaatattagaaaatgtatattatagaacatgatatatatttacattcatctctgtattctctcagctgttgttagaaggacagaatgttaaactttatcttaattagtatactagaaagggcagtataatactgttttaaagtgaaggcatgactgaaactaaaatatttcataaggcttagctagaggcagagtaacgtgtttttgttcattgggcttccttgtacttagttttttcatttaataattcaaaccaacacttttaaaaaaataattcagatgagactgagccatatctgcagtaagagaaatatttcttaatgttttggttacttatgatagagtacttttcttgatactgttaactttgtgctttttaaaaaaagtgattctctaacagacctcttaaattgtgacatgaaggtatgtaattagatttcagaaattggtttattagtgaggaatttttatcaataaatgtcatggggcgtgttcttcagaatatatagttattttcaacaaatgccaggctagattcctcacatgtggctatttcttatgtaagaagcttttaactgaagttggcatgtttcgtaaaacttgcgtgtcttttaaaaataataaaaggaagatgagtatttatgaagaatatgtgctgacaacagggcttatgaggtctatgtaccttaatctcgtttctccttaccacaatcttaaatagatttcagctgaaaataatcagttcttatgaaaacaaatagagaaatatcagtaagtcaaatctgtttgaattataattcctttcaaatagttttgctatttaatttatatgattaatgttttcattaaaatttttgatacc

SEQ ID NO: 161070 - DNA, 3865 bp, Homo sapiens
  Payload ID: 11461
  Gene Symbol: NFXL1
  Gene Name: nuclear transcription factor, X-box binding-like 1
  Uniprot ID: Q6ZNB6
  ENST ID: ENST00000464756
  CDS Start-End: 27-2228
gtctgttgggggcgtgcgcagtcgggatggaagcttcctggcgccaggtggccggtggccgaggccgatcccggggacgggccactgccgccccctcaggaaatggagtccatctccgcggcgccggaggagggcgagagaaggggtcggtgggcgcagttccttctggcaccagtcccggaggagtcgcgaccacggcggctgcagggagcaggcacagccccgcaggatcccaagccctgcagactaccgcagccagcgagctaatgtctcagaaaaaatttgaagaaatcaagaaagctaaccaagctgcagccagaaaacttgttgaagaacagtttagctcttcatctgaagaaggagatgaagattttgaaggaaaacagggaaaaatacttgcaaatacgtttataacatacactactcagacagatggagatacacgtgaattagagcgaacaaaacaatatgtaaatgaagcttttcaagcaggggctatgacatgcctaatttgtattgcttcggtgaagagaaaccaagcagtttggagctgttcgggatgtttctgtatatttcacatgccctgtatccagaagtgggctaaagacagccagtttcttgtatcttctgtgactgatgatgattttggaaagaaagattgtccctggccttgtccaaaatgtaggtttgaatacaaacgatctgaaacacctagtaggtactattgctattgtggaaaagtagaagatccacctttagatccgtggcttgtgcctcattcatgtggccaagtatgtgagcgtgaatttaaacctccttgtggccataaatgtttactcctctgtcatccaggtccctgccctccttgtccaaagatggtcacaactacttgttactgtaagaaagcaaaacctatccctcgtaggtgcagtgccaaggaatggtcttgtcagctgccatgtggacagaagttgctttgtgggcaacataagtgtgaaaatccttgtcatgcaggaagctgtcagccttgtccaagagttagtagacaaaagtgtgtctgtggcaaaaaagtagctgaaagaagttgtgcaagtccactatggcactgtgatcaagtatgtggaaaaacactgccatgtggtaatcacacatgtgagcaagtttgccatgttggtgcttgtggagaatgtcctcgatctgggaaaaggttctgtccatgtcagaaatcaaagttttctttgccttgtacagaagatgtaccaacttgtggagacagttgtgacaaagtacttgaatgcggaatccatagatgttcacagcgttgtcaccgaggtccctgtgaaacatgtagacaagaagtggaaaagcattgtcgctgtggaaagcatacaaaacgaatgccttgtcataaaccttatctgtgtgaaactaagtgtgttaagatgcgtgactgtcagaagcatcaatgtagaagaaagtgttgccctggaaactgtccaccttgtgatcaaaactgtggacggactttaggatgtagaaaccataagtgtccatctgtctgtcacagaggcagttgctatccctgcccagaaaccgtagatgtgaagtgtaattgtggcaatacaaaggtgacagtgccctgtggccgagaacgtaccacaagaccacccaagtgcaaggagcaatgcagtcgaccaccaacttgtcatcatacaagtcaagaaaaacatcgctgtcactttggttcttgtccaccatgtcatcaaccttgccaaaaagttttggagaaatgtggtcacttgtgtcctgctccgtgtcatgatcaagcattaataaagcagactggcaggcaccagcctacaggcccttgggaacagccttctgagccagcatttattcagactgcattaccgtgtcctccatgtcaagttcctattcctatggaatgtcttgggaaacatgaggtgagtccactaccatgccatgctgtaggaccctactcttgtaaaagagtttgtggaagaatcttggattgtcagaatcacacatgtatgaaagaatgccacaaagtaaccaaaactgatggctgcactggaaaaaacaagatagggaaactgaagctctgtgatttgtccatgattctgcaacaggagagtagcaaatcagaaagtactgtgcctgatcttttaactcccagcccaatgtgctcttctactcatgttatttaaatagaagatttttgtaggtgtaccacataggaagagcaaatgaaataaactctttaggctggcccagaatgccttcattgtgaggaagggtgctccaagtcacggccactaggttgtcttcacccatgtattttgcgatgtcaccctggagaatgtccaccttgtgttcagatgcttagaataaaatgtcactgtaagatcacaagcctgtatgtggaatgtagaaaaataaccacagctgatgtaaatgaaaagaacctcctcagttgttgcaaaaatcagtgccctaaagagcttccttgtggtcatagatgcaaagagatgtgtcatcctggtgaatgtccctttaactgcaaccagaaggtaaaacttagatgtccttgtaaaagaataaaaaaggaattgcagtgcaacaaagtacgtgaaaatcaggtttcaatagaatgtgacacaacgtgcaaggaaatgaagcggaaagcatctgagataaaagaagcagaagccaaagctgctcttgaagaagaaaaacgaagacaacaggctgaactagaagcttttgaaaacagactgaagggtcgtcggaagaagaacaggaaaagagatgaagtggcagttgagctatcactatggcaaaaacataaatattatctcatttcagtgtgtggagttgtggttgtagtgtttgcctggtacatcacccatgatgtcaattaaaaaaagttttgatcttttaatgtaactcagattggatttagataagttgttaaatttgaaatattagaaaatgtatattatagaacatgatatatatttacattcatctctgtattctctcagctgttgttagaaggacagaatgttaaactttatcttaattagtatactagaaagggcagtataatactgttttaaagtgaaggcatgactgaaactaaaatatttcataaggcttagctagaggcagagtaacgtgtttttgttcattgggcttccttgtacttagttttttcatttaataattcaaaccaacacttttaaaaaaataattcagatgagactgagccatatctgcagtaagagaaatatttcttaatgttttggttacttatgatagagtacttttcttgatactgttaactttgtgctttttaaaaaaagtgattctctaacagacctcttaaattgtgacatgaaggtatgtaattagatttcagaaattggtttattagtgaggaatttttatcaataaatgtcatggggcgtgttcttcagaatatatagttattttcaacaaatgccaggctagattcctcacatgtggctatttcttatgtaagaagcttttaactgaagttggcatgtttcgtaaaacttgcgtgtcttttaaaaataataaaaggaagatgagtatttatgaagaatatgtgctgacaacagggcttatgaggtctatgtaccttaatctcgtttctccttaccacaatcttaaatagatttcagctgaaaataatcagttcttatgaaaacaaatagagaaatatcagtaagtcaaatctgtttgaattataattcctttcaaatagttttgctatttaatttatatgattaatgttttcattaaaatttttgataccaaa

SEQ ID NO: 161071 - DNA, 2321 bp, Homo sapiens
  Payload ID: 11462
  Gene Symbol: NUTF2
  Gene Name: nuclear transport factor 2
  Uniprot ID: P61970
  ENST ID: ENST00000219169
  CDS Start-End: 284-667
gggcttgccccggcagcctccctccctggcttagcctcacctcccgcgctgcgggccgtgtctgggcctccgcgcatagcacgccgggaattgtagttttctctcggcgcgctcatgccggaaagggggggcggtgggactgcgtctcccagagtgcagcggggcgggcgaaggaaggcaggggggaagggacagtcggccgcagaccgcgctgggttgccgctgccgctgccgccatcgtgccagcccctcgggtctccgtgaggccgggtgacgctccagaatgggagacaagccaatttgggagcagattggatccagcttcattcaacattactaccagttatttgataatgatagaacccaactaggcgcaatttacattgacgcgtcatgccttacgtgggaaggacaacagttccaggggaaagctgccattgtggagaagttgtctagccttccgttccagaaaattcagcacagcatcaccgcgcaggaccatcagcccactccagatagctgcatcatcagcatggttgtgggccagcttaaggcggatgaagaccccatcatggggttccaccagatgttcctattaaagaacatcaacgatgcttgggtttgcaccaatgacatgttcaggctcgccctgcacaactttggctgacctcctctcagctaggcactcacgctgtttcctcctccctcctcttcccaatactattcccactcctccagatgctccaaatatcatgcacaaatgagcagggccgcggtgggagtgggcgcagtgcgctgctgccactgaggtgttgtgcatgatgtttggatgctagactagttgcatctgacgggagaagtttgtgttgtaccagcgcatgccttggaaagacttaagtaatgcaaaaggttgtccttttttttttttttttttttttaatctactgacaagttgctctagtaacccaaagaagtgaaggagaaagcagctgcctcaccgcccagacattgatttgttcagatgtttcaatgcctcatgatacaataaaaccacaaaaattttcttaacagtttaaattgttttaattagtttactagttggctgggcatcagaagctacccagacccgttgtctctctcatgtttcaccctcccacttctgccccaactctgaatacctgttgcagggagaaactgctgaagcagcactcccagctagcctctcagaagccgtgtagggcagttctctcccactccacagggcgactggtctttggaaagcaggcaggaagagctcaggtctggcctgaagcttctctcactgaagcctgtgcagtcagttctgatacctcctgtgacttctgctctgggtaggttcagggccctagtagcaggagagatgatcctgaatcctgttgaagctggagaggccttggcaaaatggctcatcacgttcaggccctccgggctgagttgtcagcagtatcaagggaggggcctgctctatccccagaaggatcaggatcatatccaggatgccccacatacaccaagccaggcagagggcagctcagctcctgtcccatctgctttggatatctttacccaaaggcaggtaacccgaagagccagcctccactgcccacagagccaggcccagttgtgttggagtataggtcaggagctgtggaaggaggcagtctgtgagggactcatgctttaggagtcctcacccctcagactgctgcaggacattgccaggcctctctccacttccttcctcagcatacagacttcatgctatcttccaattccggggagtcttagctattagggcagtttctgcttctccattttggggacaaaggccttgcccagtacaaatctagccccttgtcccacagacttctggatggtataaacctagtggcaatgtagcaaccataggctagaaccaaacccaagatttgggtcagtgccctgttaagggttttaggattggtaaggacaccacagctaaatctgacatgtaaaaggatacccttcccctgtcccactacgggtggaggctaaggacctcctcagatcccacagattgcctggtgacattgggcacagggctggatggtgtgctgtttgagaggacagcatgctcaggagatttcagtgggaatgatctctaggctgatgtgtatttggggaagtgggggtggggaagaggtaggtgcctgctgcctcaaaccaccttgtgtaaaatctgcaatacggcttcttccatgtacctgtgcctgaactgtctgcaataaagaagaatttgtaaa

SEQ ID NO: 161072 - DNA, 582 bp, Homo sapiens
  Payload ID: 11462
  Gene Symbol: NUTF2
  Gene Name: nuclear transport factor 2
  ENST ID: ENST00000567105
  CDS Start-End: 260-582
agaccgcgctgggttgccgctgccgctgccgccatcgtgccagcccctcggtcaggaccgtccggatggggccttagggccccgccccgtctagcctggcccggcctgcgcgagccccgcaagctctgcaggctggctagcgggcagaccccagccccacgtcctgctacccacctacgaaggatccggggatgggcagcgccacccggcccgctccagagtcagcatgggtctccgtgaggccgggtgacgctccagaatgggagacaagccaatttgggagcagattggatccagcttcattcaacattactaccagttatttgataatgatagaacccaactaggcgcaatttacattgacgcgtcatgccttacgtgggaaggacaacagttccaggggaaagctgccattgtggagaagttgtctagccttccgttccagaaaattcagcacagcatcaccgcgcaggaccatcagcccactccagatagctgcatcatcagcatggttgtgggccagcttaaggcggatgaagaccccatcatggggttccaccagatgttcctattaaagaacat

SEQ ID NO: 161073 - DNA, 1179 bp, Homo sapiens
  Payload ID: 11462
  Gene Symbol: NUTF2
  Gene Name: nuclear transport factor 2
  Uniprot ID: P61970
  ENST ID: ENST00000568396
  CDS Start-End: 386-769
tatctgggccgtaccgtgctggtggctggtgcaccggcctgcgccatggccaggcctttttctctagtcaggaccgtccggatggggccttagggccccgccccgtctagcctggcccggcctgcgcgagccccgcaagctctgcaggctggctagcgggcagaccccagccccacgtcctgctacccacctacgaaggatccggggatgggcagcgccacccggcccgctccagagtcagcatgggtaagggcgcccgcctgccgcagccggggcttgggcccctcaccctgttcccgaccatagcccggccggggtgtaggtgaacgccccctccttgtctgcccctcggaagtgtctccgtgaggccgggtgacgctccagaatgggagacaagccaatttgggagcagattggatccagcttcattcaacattactaccagttatttgataatgatagaacccaactaggcgcaatttacattgacgcgtcatgccttacgtgggaaggacaacagttccaggggaaagctgccattgtggagaagttgtctagccttccgttccagaaaattcagcacagcatcaccgcgcaggaccatcagcccactccagatagctgcatcatcagcatggttgtgggccagcttaaggcggatgaagaccccatcatggggttccaccagatgttcctattaaagaacatcaacgatgcttgggtttgcaccaatgacatgttcaggctcgccctgcacaactttggctgacctcctctcagctaggcactcacgctgtttcctcctccctcctcttcccaatactattcccactcctccagatgctccaaatatcatgcacaaatgagcagggccgcggtgggagtgggcgcagtgcgctgctgccactgaggtgttgtgcatgatgtttggatgctagactagttgcatctgacgggagaagtttgtgttgtaccagcgcatgccttggaaagacttaagtaatgcaaaaggttgtccttttttttttttttttttttttaatctactgacaagttgctctagtaacccaaagaagtgaaggagaaagcagctgcctcaccgcccagacattgatttgttcagatgtttcaatgcctcatgatacaataaaaccacaaaaattttcttaacagtttaaa

SEQ ID NO: 161074 - DNA, 1119 bp, Homo sapiens
  Payload ID: 11462
  Gene Symbol: NUTF2
  Gene Name: nuclear transport factor 2
  Uniprot ID: P61970
  ENST ID: ENST00000569436
  CDS Start-End: 326-709
tcctgtgaggcggcggccgggggtaacgcacagagagccagccgggcgcctatctgggccgtaccgtgctggtggctggtgcaccggcctgcgccatggccaggcctttttctctagtcaggaccgtccggatggggccttagggccccgccccgtctagcctggcccggcctgcgcgagccccgcaagctctgcaggctggctagcgggcagaccccagccccacgtcctgctacccacctacgaaggatccggggatgggcagcgccacccggcccgctccagagtcagcatgggtctccgtgaggccgggtgacgctccagaatgggagacaagccaatttgggagcagattggatccagcttcattcaacattactaccagttatttgataatgatagaacccaactaggcgcaatttacattgacgcgtcatgccttacgtgggaaggacaacagttccaggggaaagctgccattgtggagaagttgtctagccttccgttccagaaaattcagcacagcatcaccgcgcaggaccatcagcccactccagatagctgcatcatcagcatggttgtgggccagcttaaggcggatgaagaccccatcatggggttccaccagatgttcctattaaagaacatcaacgatgcttgggtttgcaccaatgacatgttcaggctcgccctgcacaactttggctgacctcctctcagctaggcactcacgctgtttcctcctccctcctcttcccaatactattcccactcctccagatgctccaaatatcatgcacaaatgagcagggccgcggtgggagtgggcgcagtgcgctgctgccactgaggtgttgtgcatgatgtttggatgctagactagttgcatctgacgggagaagtttgtgttgtaccagcgcatgccttggaaagacttaagtaatgcaaaaggttgtccttttttttttttttttttttttaatctactgacaagttgctctagtaacccaaagaagtgaaggagaaagcagctgcctcaccgcccagacattgatttgttcagatgtttcaatgcctcatgatacaataaaaccacaaaaattttcttaacagtttaaa

SEQ ID NO: 161075 - DNA, 1123 bp, Homo sapiens
  Payload ID: 11463
  Gene Symbol: NXT1
  Gene Name: nuclear transport factor 2-like export factor 1
  Uniprot ID: Q9UKK6
  ENST ID: ENST00000254998
  CDS Start-End: 388-810
ggctgacttcgctgcccgtcacgggaatgcgggagagggcggcgccggggcgctcgcgtctgcgtggagaccggctggccgcgcgcgggaagccgcggaactgcgccggaaagtcccccggctctggggccccggtgacccagagtaagcctccaagaaggaggaggaggagagaaaggcggctcttcccgtgcccctaccagaggcttcggtgggcccaccttgtgacctccgcggccggcccctcagtggaactgcgtcccacgcggggggcgtcccgaccgtgggggccgcggcccgcgctgaccctggacgtcgccgcgcagcccctggttccccaaggcagaggaaataccctggtggagccctccttccatagaaccagagatggcatctgtggatttcaagacctatgtggatcaggcctgcagagctgctgaggagtttgtcaatgtctactacaccaccatggataagcggcggcgtttgctgtcccgcctgtacatgggcacagccaccctggtctggaatggcaatgctgtttcaggacaagaatccttgagtgagttttttgaaatgttgccttccagcgagttccaaatcagcgtggtagactgccagcctgttcatgatgaagccacaccaagccagaccacggtccttgttgtcatctgtggatcagtgaagtttgaggggaacaaacaacgggacttcaaccagaacttcatcctgaccgcccaggcctcacccagcaacacagtgtggaagatcgcaagtgactgcttccgcttccaggactgggccagctagtgggggtggcagaggtctctttgcttcattcagccctagctctgtagagaaatgcaaacctcgactctcaaggatgtgaggaacacaagttcatttctgttgttgcggagacactgcagactccactgtgccgaggttgaactcttttttgttgctcaagttctaggagtccctttcctgaatatatacttgtttgtcatagtttccttttcaaagtagtaaacttttctatttttctacttgcccagtagagactctgattctggaaattctgacaaataatttaataatacacatgttgcttctttccctg

SEQ ID NO: 161076 - DNA, 2692 bp, Homo sapiens
  Payload ID: 11464
  Gene Symbol: NXT2
  Gene Name: nuclear transport factor 2-like export factor 2
  Uniprot ID: Q9NPJ8
  ENST ID: ENST00000218004
  CDS Start-End: 103-696
agtcagaggttaacggaaaacggaagctggctggctgagaagaagcttccgttagtcctaccttgaagagaaaagagccagataaagagaaagattaaaagtatgagaaaatacagaagccactggtctcagggagacagagaaggataccaaagaagaagtaactattatgaggggccacacaccagccactcaagccctgcggaccggacacgtgaggaggtagtgacgccgacactgccagaacacactgctacaaggtcccagatggccacgtctctggattttaaaacttatgtagatcaggcatgtagagctgctgaggagtttgtcaatatttactatgagacaatggataaaagaagacgggcactaaccaggctgtatctggacaaggccaccttaatatggaatggaaatgctgtttcagggctggatgccctaaataatttttttgacacattgccttctagtgagttccaggtcaatatgttagattgccaaccagttcatgagcaagcaactcagtcccaaactacagttcttgttgtgaccagtggaactgtgaagtttgatggaaacaaacaacatttcttcaaccagaacttcctgctgactgctcagtccactcccaacaatactgtgtggaagattgcaagtgattgcttccgttttcaagattggtctagtagttaaaggggcaaaagtccattctcatttggtccattagttccagcaattgaaatttatgtgaattattttgattgtagaagcactataatatgtgctgaaactaaatttctttaatattttctattcctgtcagcaccttttctagcagctgccagtttggagcattgccctctaagagctttaaaactatttttttacatgccttatatacattccactaatgacattcttataataatattaaacacatgatcttggtactaacatactcactgtgaacccagcctattgcaaaaataaaatctttttataatattatctatgggatgtcagcacaatataacactctgggaagaagtggagttttttggttattaggttaattttctagtaaaacacgttgcctgttttcagttaacactggtaatgccattttaatatatggctttttcaaatcagttcagtgaaaatagtacagatttaggtttacataactactctgacatactggaattgcatatagagatgttcagtggtcgtttttcattttaagtaatttttgttttggcatttttttgtgtgaagtaaattaatcaactagagaggtgcaaaacgttctcagttgatatctgagtattgggtgcatttggtggcttaaaagcaaagcttcctaaaaagatttttcttggcagctccaggtctatacatttaggtaatgaatggtagtagaactaatagctttaacaggagaatagggaatgagaaatagaaatccaaggctgaagccaaaagtaaggagggtggccaaatggtaaactattggtacttgttttctacctcctaaaaatgtagcttatttttaggatttaaatcactaagtaaataagtatccttgccaagtgatcatgagtgtcatttttgttctaagactaatatttttagatctttttacttcacctcatacttatcaccaatgtatatctccatttattcaataacttactggggtaaaataacagcaataaacctaaccttttaacagggtctaacatgagagttggagtcaaagccattgttatcttttggtgacacccttaaattttaagtcttccagtcttccatgtgaactttaggcccaaagtttcttatgtatcacacatcccccaaataagtgattttttcccagtgctttgtactgtcaactgcattatctttaattatttaaaggtagaattatttaattttgtgatttgttcttccatatgacattgagcaaatagatctgtttcaaaatatgttcccgctatgtggataactcttctttttaaaaagaaaatagagaatagcaaatcttcatgataatcctcaaaagaacaaaatgcttaactttatctcttaatttctaaaggtaaataacctaggttcagcttttgcttaaacattaaatatcttttccattttttaatgtttgtaagctagatatgccagctttgtttctacattgcaaccaaaaactgtttcttttcacttaattataaaaccagtaattcatttactcttgcccaaaactatacactgtatttctgttatagtaacaaaatagagttatgtagaattgtatggaactcaaatttaaaccatgctttcttgtagtactgattgaaacttacacgttttattctactcatagtgagcttattcttattttggattgattttccaaaaccacagcttcagcagcaacaatcagaatgtccaaatgctgtcctttcccttacagagaagaacaatggtaactaaaagctgcatataactagcaataactacattgaacggtgtgcattgttcatgattgttgtgttttaagacttgtatataaactgctttttccaaactctgtataacttttaaatggctggaactactcgtataaggactagactgtatttttgacatgctcctatttttgtaacttgaaaaaataaaattttgccttgtg

SEQ ID NO: 161077 - DNA, 1085 bp, Homo sapiens
  Payload ID: 11464
  Gene Symbol: NXT2
  Gene Name: nuclear transport factor 2-like export factor 2
  Uniprot ID: Q9NPJ8
  ENST ID: ENST00000372103
  CDS Start-End: 223-567
gtgacgaatcacgtcccggctctctgcactgcggggcggggcccacgctttgctgcccgccctgccggccccacccccagcctggttagcagtcgctttctgatcccggaaaggaccctgagctgggaaatagcgagaggcggggatgttggggattttaaaacttatgtagatcaggcatgtagagctgctgaggagtttgtcaatatttactatgagacaatggataaaagaagacgggcactaaccaggctgtatctggacaaggccaccttaatatggaatggaaatgctgtttcagggctggatgccctaaataatttttttgacacattgccttctagtgagttccaggtcaatatgttagattgccaaccagttcatgagcaagcaactcagtcccaaactacagttcttgttgtgaccagtggaactgtgaagtttgatggaaacaaacaacatttcttcaaccagaacttcctgctgactgctcagtccactcccaacaatactgtgtggaagattgcaagtgattgcttccgttttcaagattggtctagtagttaaaggggcaaaagtccattctcatttggtccattagttccagcaattgaaatttatgtgaattattttgattgtagaagcactataatatgtgctgaaactaaatttctttaatattttctattcctgtcagcaccttttctagcagctgccagtttggagcattgccctctaagagctttaaaactatttttttacatgccttatatacattccactaatgacattcttataataatattaaacacatgatcttggtactaacatactcactgtgaacccagcctattgcaaaaataaaatctttttataatattatctatgggatgtcagcacaatataacactctgggaagaagtggagttttttggttattaggttaattttctagtaaaacacgttgcctgttttcagttaacactggtaatgccattttaatatatggctttttcaaatcagttcagtgaaaatagtacagatttaggtttacataactactctgacatactggaattgcatat

SEQ ID NO: 161078 - DNA, 2562 bp, Homo sapiens
  Payload ID: 11464
  Gene Symbol: NXT2
  Gene Name: nuclear transport factor 2-like export factor 2
  Uniprot ID: Q9NPJ8
  ENST ID: ENST00000372106
  CDS Start-End: 132-560
gtggaaaattttgtgcgtttggcgggtttcgctctcttcataagtattgatcattccgcagccctgcggaccggacacgtgaggaggtagtgacgccgacactgccagaacacactgctacaaggtcccagatggccacgtctctggattttaaaacttatgtagatcaggcatgtagagctgctgaggagtttgtcaatatttactatgagacaatggataaaagaagacgggcactaaccaggctgtatctggacaaggccaccttaatatggaatggaaatgctgtttcagggctggatgccctaaataatttttttgacacattgccttctagtgagttccaggtcaatatgttagattgccaaccagttcatgagcaagcaactcagtcccaaactacagttcttgttgtgaccagtggaactgtgaagtttgatggaaacaaacaacatttcttcaaccagaacttcctgctgactgctcagtccactcccaacaatactgtgtggaagattgcaagtgattgcttccgttttcaagattggtctagtagttaaaggggcaaaagtccattctcatttggtccattagttccagcaattgaaatttatgtgaattattttgattgtagaagcactataatatgtgctgaaactaaatttctttaatattttctattcctgtcagcaccttttctagcagctgccagtttggagcattgccctctaagagctttaaaactatttttttacatgccttatatacattccactaatgacattcttataataatattaaacacatgatcttggtactaacatactcactgtgaacccagcctattgcaaaaataaaatctttttataatattatctatgggatgtcagcacaatataacactctgggaagaagtggagttttttggttattaggttaattttctagtaaaacacgttgcctgttttcagttaacactggtaatgccattttaatatatggctttttcaaatcagttcagtgaaaatagtacagatttaggtttacataactactctgacatactggaattgcatatagagatgttcagtggtcgtttttcattttaagtaatttttgttttggcatttttttgtgtgaagtaaattaatcaactagagaggtgcaaaacgttctcagttgatatctgagtattgggtgcatttggtggcttaaaagcaaagcttcctaaaaagatttttcttggcagctccaggtctatacatttaggtaatgaatggtagtagaactaatagctttaacaggagaatagggaatgagaaatagaaatccaaggctgaagccaaaagtaaggagggtggccaaatggtaaactattggtacttgttttctacctcctaaaaatgtagcttatttttaggatttaaatcactaagtaaataagtatccttgccaagtgatcatgagtgtcatttttgttctaagactaatatttttagatctttttacttcacctcatacttatcaccaatgtatatctccatttattcaataacttactggggtaaaataacagcaataaacctaaccttttaacagggtctaacatgagagttggagtcaaagccattgttatcttttggtgacacccttaaattttaagtcttccagtcttccatgtgaactttaggcccaaagtttcttatgtatcacacatcccccaaataagtgattttttcccagtgctttgtactgtcaactgcattatctttaattatttaaaggtagaattatttaattttgtgatttgttcttccatatgacattgagcaaatagatctgtttcaaaatatgttcccgctatgtggataactcttctttttaaaaagaaaatagagaatagcaaatcttcatgataatcctcaaaagaacaaaatgcttaactttatctcttaatttctaaaggtaaataacctaggttcagcttttgcttaaacattaaatatcttttccattttttaatgtttgtaagctagatatgccagctttgtttctacattgcaaccaaaaactgtttcttttcacttaattataaaaccagtaattcatttactcttgcccaaaactatacactgtatttctgttatagtaacaaaatagagttatgtagaattgtatggaactcaaatttaaaccatgctttcttgtagtactgattgaaacttacacgttttattctactcatagtgagcttattcttattttggattgattttccaaaaccacagcttcagcagcaacaatcagaatgtccaaatgctgtcctttcccttacagagaagaacaatggtaactaaaagctgcatataactagcaataactacattgaacggtgtgcattgttcatgattgttgtgttttaagacttgtatataaactgctttttccaaactctgtataacttttaaatggctggaactactcgtataaggactagactgtatttttgacatgctcctatttttgtaacttgaaaaaataaaattttgccttgtgacagat

SEQ ID NO: 161079 - DNA, 937 bp, Homo sapiens
  Payload ID: 11464
  Gene Symbol: NXT2
  Gene Name: nuclear transport factor 2-like export factor 2
  Uniprot ID: Q9NPJ8
  ENST ID: ENST00000372107
  CDS Start-End: 307-651
cccaggcttgtcgttagaaaagtaggggactttcctgttgagtatcatgtttacaaaagcaaagtggcttttaaattttaaactaagtatcaaacaagtagataaggtggatgggagggatcttcaggaactgaagggaagtggaacttaagccctgcggaccggacacgtgaggaggtagtgacgccgacactgccagaacacactgctacaaggtcccagatggccacgtctctggattttaaaacttatgtagatcaggcatgtagagctgctgaggagtttgtcaatatttactatgagacaatggataaaagaagacgggcactaaccaggctgtatctggacaaggccaccttaatatggaatggaaatgctgtttcagggctggatgccctaaataatttttttgacacattgccttctagtgagttccaggtcaatatgttagattgccaaccagttcatgagcaagcaactcagtcccaaactacagttcttgttgtgaccagtggaactgtgaagtttgatggaaacaaacaacatttcttcaaccagaacttcctgctgactgctcagtccactcccaacaatactgtgtggaagattgcaagtgattgcttccgttttcaagattggtctagtagttaaaggggcaaaagtccattctcatttggtccattagttccagcaattgaaatttatgtgaattattttgattgtagaagcactataatatgtgctgaaactaaatttctttaatattttctattcctgtcagcaccttttctagcagctgccagtttggagcattgccctctaagagctttaaaactatttttttacatgccttatatacattccactaatgacattcttataataatattaaacacatgatcttggtactaacatactcactgtgaacccagcctat

SEQ ID NO: 161080 - DNA, 3123 bp, Homo sapiens
  Payload ID: 11465
  Gene Symbol: NVL
  Gene Name: nuclear VCP-like
  Uniprot ID: O15381
  ENST ID: ENST00000281701
  CDS Start-End: 261-2831
aatcttccagggtccactgggcaggcctgcaaaataaggcccctagaaactccctgaggttttcaagtcttctccctctcctcggaattttttccccttcattcgcattacttttattctgacggaaacggcgcgggctaggccccaggaggggcgcatttcaggtgcaactggcccggcgatcgcggcgggcaacccctacgaggcccccggttgactaggagctggcggtccgagctgtggcttggaagaccgacgcgatgaagcccagacctgcagggttcgtggataataaactcaagcagcgagtcatccagtaccttaccagtaacaaatgtggcaaatatgtggacattggagtcttagcgtctgatttacaaagagtgtacagtatagactatggtcgaagaaaaagaaatgcttttaggattcaggtagaaaaagtatttagcataattagtagtgagaaggaacttaagaatttaacagaattagaagatgaacatttggcaaaaagggcaagacaaggtgaagaggataatgagtatactgaaagctattctgatgatgattcaagtatggaagactacccagatccacagtcagcaaatcacatgaacagttccctgctgtctttatatcggaaaggaaatcctgattctgtttcaaatactcctgagatggagcaaagagaaaccacctcttcaacaccacggataagttccaaaacaggctccattcccttgaagacccctgccaaagattctgaaggaggatggtttattgacaaaaccccaagtgtaaagaaagacagttttttcttggacctgtcatgtgagaaaagtaatcctaagaagccaataactgagatacaggattcaaaagattcttctcttttggagagtgatatgaaacggaaaggcaagctaaagaataaaggaagcaaaaggaagaaagaagatcttcaggaagtagatggagaaattgaagctgtcctgcaaaagaaagctaaagccagggggttagaattccagatctccaacgtgaagtttgaagatgtgggaggcaatgatatgacattaaaagaggtctgcaagatgctcatacacatgcgtcacccggaggtgtaccaccacctgggcgtcgtgccccctcgtggagttctccttcatggaccaccaggctgtgggaagacattacttgcacatgcaattgctggggaacttgacctgccaattttgaaagtggctgctccagagattgtgtctggagtatccggagagtctgagcagaagctgagagaactatttgagcaagctgtgtcaaatgcaccatgtatcattttcattgatgaaattgatgctattacccccaaaagagaagtggcttcaaaagatatggaacgaagaattgtagcccaactcctaacctgcatggatgatctgaataatgtggctgctacagcccgggtcctagttattggagctactaatcgaccagactcgttagaccctgctttgagacgtgcgggaaggttcgaccgagaaatatgcctaggtatcccagatgaagcatccagggaaagaatacttcaaacattgtgcagaaaactgaggcttcctcaagcttttgatttctgtcacttagcacacctaactccaggctttgttggtgctgatctcatggcactgtgccgagaggcagcaatgtgtgcagtcaatagagtcttaatgaagctacaggaacagcagaagaaaaatcctgaaatggaagatttgccatctaaaggagtccaggaggaaaggctgggaactgagcccacttctgaaacacaggatgaattacaaaggctgctggggttgctaagagaccaagatcccctctcagaggagcagatgcaaggactgtgcattgaactgaatgatttcattgttgctctatcctcagtccaaccctctgccaaaagggaaggctttgtcactgtccctaatgtgacatgggcagatattggtgccctggaagacattagagaggagctcaccatggcaatattggcaccagtacgcaacccagaccagttcaaagctcttggattggtgactccagctggggtcctccttgctggtcctcctggctgtgggaagactctgctggcgaaggctgttgcaaatgagtccggactaaattttatatctgtcaagggccccgaattactaaacatgtatgttggtgagagtgaacgtgctgtgcgacaagtttttcaacgagccaagaactcagcaccctgtgtgatattctttgatgaagtggatgctttatgtcctcgaagatcagaccgagagacaggggcaagtgtccgagtggtgaatcagctacttacagagatggatggtctggaagcacgccagcaggtttttattatggcagccactaacaggccagatataattgaccctgcaatcctgcgcccgggccgcctggacaaaacactgtttgtgggtttaccgccccctgcagatcgccttgccatcttaaaaactatcacaaaaaatggtaccaaaccaccactggatgcagatgtaaatttggaagcaattgctggtgaccttcgctgtgattgctatacgggcgcagatctctctgctttggtacgagaagcttctatctgtgccctgagacaggaaatggcaagacagaagagtggaaatgaaaaaggtgaactcaaggttagtcataagcattttgaagaagctttcaagaaagtaagatcatctatatcaaaaaaggatcaaatcatgtatgaacgtttgcaggagtccctcagccggtgatgtctccagcagccggcttagaggagctagcccatcaagccggcagagaatcccccacacgctctgaaggacccactttcagctggacacaggcgcggcctcatgtaaacattttattttcaaatgaatgaggccaagctgaagctgaagctgaagattcttcccatctggccagccttgtgtgaaaatgccttcttcctctttaagaaaaaggacaatttttaaactgctgaaataaaatgactgttacatttttcaaataaaacttttactttgaactattttgactata

SEQ ID NO: 161081 - DNA, 2431 bp, Homo sapiens
  Payload ID: 11465
  Gene Symbol: NVL
  Gene Name: nuclear VCP-like
  Uniprot ID: O15381
  ENST ID: ENST00000340871
  CDS Start-End: 256-2259
aagaccgacgcgatgaagcccagacctgcagggttcgtggataataaactcaagcagcgagtcatccagtatagactatggtcgaagaaaaagaaatgcttttaggattcaggtagaaaaagtatttagcataattagtagtgagaaggaacttaagaatttaacagaattagaagatgaacatttggcaaaaagggcaagacaaggtgaagaggataatgagattcaaaagattcttctcttttggagagtgatatgaaacggaaaggcaagctaaagaataaaggaagcaaaaggaagaaagaagatcttcaggaagtagatggagaaattgaagctgtcctgcaaaagaaagctaaagccagggggttagaattccagatctccaacgtgaagtttgaagatgtgggaggcaatgatatgacattaaaagaggtctgcaagatgctcatacacatgcgtcacccggaggtgtaccaccacctgggcgtcgtgccccctcgtggagttctccttcatggaccaccaggctgtgggaagacattacttgcacatgcaattgctggggctgagtgcagtggcatgatcacagctcactgcagctttgacttctcaggctcaaatgatcctcctgcctcagcctcacaggaacttgacctgccaattttgaaagtggctgctccagagattgtgtctggagtatccggagagtctgagcagaagctgagagaactatttgagcaagctgtgtcaaatgcaccatgtatcattttcattgatgaaattgatgctattacccccaaaagagaagtggcttcaaaagatatggaacgaagaattgtagcccaactcctaacctgcatggatgatctgaataatgtggctgctacagcccgggtcctagttattggagctactaatcgaccagactcgttagaccctgctttgagacgtgcgggaaggttcgaccgagaaatatgcctaggtatcccagatgaagcatccagggaaagaatacttcaaacattgtgcagaaaactgaggcttcctcaagcttttgatttctgtcacttagcacacctaactccaggctttgttggtgctgatctcatggcactgtgccgagaggcagcaatgtgtgcagtcaatagagtcttaatgaagctacaggaacagcagaagaaaaatcctgaaatggaagatttgccatctaaaggagtccaggaggaaaggctgggaactgagcccacttctgaaacacaggatgaattacaaaggctgctggggttgctaagagaccaagatcccctctcagaggagcagatgcaaggactgtgcattgaactgaatgatttcattgttgctctatcctcagtccaaccctctgccaaaagggaaggctttgtcactgtccctaatgtgacatgggcagatattggtgccctggaagacattagagaggagctcaccatggcaatattggcaccagtacgcaacccagaccagttcaaagctcttggattggtgactccagctggggtcctccttgctggtcctcctggctgtgggaagactctgctggcgaaggctgttgcaaatgagtccggactaaattttatatctgtcaagggccccgaattactaaacatgtatgttggtgagagtgaacgtgctgtgcgacaagtttttcaacgagccaagaactcagcaccctgtgtgatattctttgatgaagtggatgctttatgtcctcgaagatcagaccgagagacaggggcaagtgtccgagtggtgaatcagctacttacagagatggatggtctggaagcacgccagcaggtttttattatggcagccactaacaggccagatataattgaccctgcaatcctgcgcccgggccgcctggacaaaacactgtttgtgggtttaccgccccctgcagatcgccttgccatcttaaaaactatcacaaaaaatggtaccaaaccaccactggatgcagatgtaaatttggaagcaattgctggtgaccttcgctgtgattgctatacgggcgcagatctctctgctttggtacgagaagcttctatctgtgccctgagacaggaaatggcaagacagaagagtggaaatgaaaaaggtgaactcaaggttagtcataagcattttgaagaagctttcaagaaagtaagatcatctatatcaaaaaaggatcaaatcatgtatgaacgtttgcaggagtccctcagccggtgatgtctccagcagccggcttagaggagctagcccatcaagccggcagagaatcccccacacgctctgaaggacccactttcagctggacacaggcgcggcctcatgtaaacattttattttcaaatgaatgaggccaagctgaagctgaagctgaagattcttcccatctggc

SEQ ID NO: 161082 - DNA, 2832 bp, Homo sapiens
  Payload ID: 11465
  Gene Symbol: NVL
  Gene Name: nuclear VCP-like
  Uniprot ID: O15381
  ENST ID: ENST00000391875
  CDS Start-End: 288-2540
ctaggagctggcggtccgagctgtggcttggaagaccgacgcgatgaagcccagacctgcagggttcgtggataataaactcaagcagcgagtcatccagtatagactatggtcgaagaaaaagaaatgcttttaggattcaggtagaaaaagtatttagcataattagtagtgagaaggaacttaagaatttaacagaattagaagatgaacatttggcaaaaagggcaagacaaggtgaagaggataatgagtatactgaaagctattctgatgatgattcaagtatggaagactacccagatccacagtcagcaaatcacatgaacagttccctgctgtctttatatcggaaaggaaatcctgattctgtttcaaatactcctgagatggagcaaagagaaaccacctcttcaacaccacggataagttccaaaacaggctccattcccttgaagacccctgccaaagattctgaaggaggatggtttattgacaaaaccccaagtgtaaagaaagacagttttttcttggacctgtcatgtgagaaaagtaatcctaagaagccaataactgagatacaggattcaaaagattcttctcttttggagagtgatatgaaacggaaaggcaagctaaagaataaaggaagcaaaaggaagaaagaagatcttcaggaagtagatggagaaattgaagctgtcctgcaaaagaaagctaaagccagggggttagaattccagatctccaacgtgaagtttgaagatgtgggaggcaatgatatgacattaaaagaggtctgcaagatgctcatacacatgcgtcacccggaggtgtaccaccacctgggcgtcgtgccccctcgtggagttctccttcatggaccaccaggctgtgggaagacattacttgcacatgcaattgctggggaacttgacctgccaattttgaaagtggctgctccagagattgtgtctggagtatccggagagtctgagcagaagctgagagaactatttgagcaagctgtgtcaaatgcaccatgtatcattttcattgatgaaattgatgctattacccccaaaagagaagtggcttcaaaagatatggaacgaagaattgtagcccaactcctaacctgcatggatgatctgaataatgtggctgctacagcccgggtcctagttattggagctactaatcgaccagactcgttagaccctgctttgagacgtgcgggaaggttcgaccgagaaatatgcctaggtatcccagatgaagcatccagggaaagaatacttcaaacattgtgcagaaaactgaggcttcctcaagcttttgatttctgtcacttagcacacctaactccaggctttgttggtgctgatctcatggcactgtgccgagaggcagcaatgtgtgcagtcaatagagtcttaatgaagctacaggaacagcagaagaaaaatcctgaaatggaagatttgccatctaaaggagtccaggaggaaaggctgggaactgagcccacttctgaaacacaggatgaattacaaaggctgctggggttgctaagagaccaagatcccctctcagaggagcagatgcaaggactgtgcattgaactgaatgatttcattgttgctctatcctcagtccaaccctctgccaaaagggaaggctttgtcactgtccctaatgtgacatgggcagatattggtgccctggaagacattagagaggagctcaccatggcaatattggcaccagtacgcaacccagaccagttcaaagctcttggattggtgactccagctggggtcctccttgctggtcctcctggctgtgggaagactctgctggcgaaggctgttgcaaatgagtccggactaaattttatatctgtcaagggccccgaattactaaacatgtatgttggtgagagtgaacgtgctgtgcgacaagtttttcaacgagccaagaactcagcaccctgtgtgatattctttgatgaagtggatgctttatgtcctcgaagatcagaccgagagacaggggcaagtgtccgagtggtgaatcagctacttacagagatggatggtctggaagcacgccagcaggtttttattatggcagccactaacaggccagatataattgaccctgcaatcctgcgcccgggccgcctggacaaaacactgtttgtgggtttaccgccccctgcagatcgccttgccatcttaaaaactatcacaaaaaatggtaccaaaccaccactggatgcagatgtaaatttggaagcaattgctggtgaccttcgctgtgattgctatacgggcgcagatctctctgctttggtacgagaagcttctatctgtgccctgagacaggaaatggcaagacagaagagtggaaatgaaaaaggtgaactcaaggttagtcataagcattttgaagaagctttcaagaaagtaagatcatctatatcaaaaaaggatcaaatcatgtatgaacgtttgcaggagtccctcagccggtgatgtctccagcagccggcttagaggagctagcccatcaagccggcagagaatcccccacacgctctgaaggacccactttcagctggacacaggcgcggcctcatgtaaacattttattttcaaatgaatgaggccaagctgaagctgaagctgaagattcttcccatctggccagccttgtgtgaaaatgccttcttcctctttaagaaaaaggacaatttttaaactgctgaaataaaatgactgttacatttttcaaataaaacttttactttgaactattttgactata

SEQ ID NO: 161083 - DNA, 766 bp, Homo sapiens
  Payload ID: 11465
  Gene Symbol: NVL
  Gene Name: nuclear VCP-like
  ENST ID: ENST00000436927
  CDS Start-End: 254-766
gatgaagcccagacctgcagggttcgtggataataaactcaagcagcgagtcatccagtatagactatggtcgaagaaaaagaaatgcttttaggattcaggtagaaaaagtatttagcataattagtagtgagaaggaacttaagaatttaacagaattagaagatgaacatttggcaaaaagggcaagacaaggtgaagaggataatgacgtctcgctctgtcacccaggcttcagtgcactggcacaatcatggcttaccgcagtcttgacgtcccaggcccaagcgatcctcccaccgcagcctcacaggtagctgggattacaggaaatcctgattctgtttcaaatactcctgagatggagcaaagagaaaccacctcttcaacaccacggataagttccaaaacaggctccattcccttgaagacccctgccaaagattctgaaggaggatggtttattgacaaaaccccaagtgtaaagaaagacagttttttcttggacctgtcatgtgagaaaagtaatcctaagaagccaataactgagatacaggattcaaaagattcttctcttttggagagtgatatgaaacggaaaggcaagctaaagaataaaggaagcaaaaggaagaaagaagatcttcaggaagtagatggagaaattgaagctgtcctgcaaaagaaagctaaagccagggggttagaattccagatctccaacgtgaagtttgaagatgtgggaggcaatgatatgacattaaaa

SEQ ID NO: 161084 - DNA, 3003 bp, Homo sapiens
  Payload ID: 11465
  Gene Symbol: NVL
  Gene Name: nuclear VCP-like
  Uniprot ID: O15381
  ENST ID: ENST00000482491
  CDS Start-End: 711-2714
ctacgaggcccccggttgactaggagctggcggtccgagctgtggcttggaagaccgacgcgatgaagcccagacctgcagggttcgtggataataaactcaagcagcgagtcatccagtaccttaccagtaacaaatgtggcaaatatgtggacattggagtcttagcgtctgatttacaaagagtgtacagtatagactatggtcgaagaaaaagaaatgcttttaggattcaggtagaaaaagtatttagcataattagtagtgagaaggaacttaagaatttaacagaattagaagatgaacatttggcaaaaagggcaagacaaggtgaagaggataatgagtatactgaaagctattctgatgatgattcaagtatggaagactacccagatccacagtcagcaaatcacatgaacagttccctgctgtctttatatcggaaaggaaatcctgattctgtttcaaatactcctgagatggagcaaagagaaaccacctcttcaacaccacggataagttccaaaacaggctccattcccttgaagacccctgccaaagattctgaaggaggatggtttattgacaaaaccccaagtgtaaagaaagacagttttttcttggacctgtcatgtgagaaaagtaatcctaagaagccaataactgagatacaggattcaaaagattcttctcttttggagagtgatatgaaacggaaaggcaagctaaagaataaaggaagcaaaaggaagaaagaagatcttcaggaagtagatggagaaattgaagctgtcctgcaaaagaaagctaaagccagggggttagaattccagatctccaacgtgaagtttgaagatgtgggaggcaatgatatgacattaaaagaggtctgcaagatgctcatacacatgcgtcacccggaggtgtaccaccacctgggcgtcgtgccccctcgtggagttctccttcatggaccaccaggctgtgggaagacattacttgcacatgcaattgctggggctgagtgcagtggcatgatcacagctcactgcagctttgacttctcaggctcaaatgatcctcctgcctcagcctcacaggaacttgacctgccaattttgaaagtggctgctccagagattgtgtctggagtatccggagagtctgagcagaagctgagagaactatttgagcaagctgtgtcaaatgcaccatgtatcattttcattgatgaaattgatgctattacccccaaaagagaagtggcttcaaaagatatggaacgaagaattgtagcccaactcctaacctgcatggatgatctgaataatgtggctgctacagcccgggtcctagttattggagctactaatcgaccagactcgttagaccctgctttgagacgtgcgggaaggttcgaccgagaaatatgcctaggtatcccagatgaagcatccagggaaagaatacttcaaacattgtgcagaaaactgaggcttcctcaagcttttgatttctgtcacttagcacacctaactccaggctttgttggtgctgatctcatggcactgtgccgagaggcagcaatgtgtgcagtcaatagagtcttaatgaagctacaggaacagcagaagaaaaatcctgaaatggaagatttgccatctaaaggagtccaggaggaaaggctgggaactgagcccacttctgaaacacaggatgaattacaaaggctgctggggttgctaagagaccaagatcccctctcagaggagcagatgcaaggactgtgcattgaactgaatgatttcattgttgctctatcctcagtccaaccctctgccaaaagggaaggctttgtcactgtccctaatgtgacatgggcagatattggtgccctggaagacattagagaggagctcaccatggcaatattggcaccagtacgcaacccagaccagttcaaagctcttggattggtgactccagctggggtcctccttgctggtcctcctggctgtgggaagactctgctggcgaaggctgttgcaaatgagtccggactaaattttatatctgtcaagggccccgaattactaaacatgtatgttggtgagagtgaacgtgctgtgcgacaagtttttcaacgagccaagaactcagcaccctgtgtgatattctttgatgaagtggatgctttatgtcctcgaagatcagaccgagagacaggggcaagtgtccgagtggtgaatcagctacttacagagatggatggtctggaagcacgccagcaggtttttattatggcagccactaacaggccagatataattgaccctgcaatcctgcgcccgggccgcctggacaaaacactgtttgtgggtttaccgccccctgcagatcgccttgccatcttaaaaactatcacaaaaaatggtaccaaaccaccactggatgcagatgtaaatttggaagcaattgctggtgaccttcgctgtgattgctatacgggcgcagatctctctgctttggtacgagaagcttctatctgtgccctgagacaggaaatggcaagacagaagagtggaaatgaaaaaggtgaactcaaggttagtcataagcattttgaagaagctttcaagaaagtaagatcatctatatcaaaaaaggatcaaatcatgtatgaacgtttgcaggagtccctcagccggtgatgtctccagcagccggcttagaggagctagcccatcaagccggcagagaatcccccacacgctctgaaggacccactttcagctggacacaggcgcggcctcatgtaaacattttattttcaaatgaatgaggccaagctgaagctgaagctgaagattcttcccatctggccagccttgtgtgaaaatgccttcttcctctttaagaaaaaggacaatttttaaactgctgaaataaaatgactgttacatttttcaaataaaacttttactttgaactattttgact

SEQ ID NO: 161085 - DNA, 2566 bp, Homo sapiens
  Payload ID: 11465
  Gene Symbol: NVL
  Gene Name: nuclear VCP-like
  Uniprot ID: O15381
  ENST ID: ENST00000469075
  CDS Start-End: 12-2309
agaccgacgcgatgaagcccagacctgcagggttcgtggataataaactcaagcagcgagtcatccagtaccttaccagtaacaaatgtggcaaatatgtggacattggagtcttagcgtctgatttacaaagagtgtacagtatagactatggtcgaagaaaaagaaatgcttttaggattcaggtagaaaaagtatttagcataattagtagtgagaaggaacttaagaatttaacagaattagaagatgaacatttggcaaaaagggcaagacaaggtgaagaggataatgagtatactgaaagctattctgatgatgattcaagtatggaagactacccagatccacaggattcaaaagattcttctcttttggagagtgatatgaaacggaaaggcaagctaaagaataaaggaagcaaaaggaagaaagaagatcttcaggaagtagatggagaaattgaagctgtcctgcaaaagaaagctaaagccagggggttagaattccagatctccaacgtgaagtttgaagatgtgggaggcaatgatatgacattaaaagaggtctgcaagatgctcatacacatgcgtcacccggaggtgtaccaccacctgggcgtcgtgccccctcgtggagttctccttcatggaccaccaggctgtgggaagacattacttgcacatgcaattgctggggaacttgacctgccaattttgaaagtggctgctccagagattgtgtctggagtatccggagagtctgagcagaagctgagagaactatttgagcaagctgtgtcaaatgcaccatgtatcattttcattgatgaaattgatgctattacccccaaaagagaagtggcttcaaaagatatggaacgaagaattgtagcccaactcctaacctgcatggatgatctgaataatgtggctgctacagcccgggtcctagttattggagctactaatcgaccagactcgttagaccctgctttgagacgtgcgggaaggttcgaccgagaaatatgcctaggtatcccagatgaagcatccagggaaagaatacttcaaacattgtgcagaaaactgaggcttcctcaagcttttgatttctgtcacttagcacacctaactccaggctttgttggtgctgatctcatggcactgtgccgagaggcagcaatgtgtgcagtcaatagagtcttaatgaagctacaggaacagcagaagaaaaatcctgaaatggaagatttgccatctaaaggagtccaggaggaaaggctgggaactgagcccacttctgaaacacaggatgaattacaaaggctgctggggttgctaagagaccaagatcccctctcagaggagcagatgcaaggactgtgcattgaactgaatgatttcattgttgctctatcctcagtccaaccctctgccaaaagggaaggctttgtcactgtccctaatgtgacatgggcagatattggtgccctggaagacattagagaggagctcaccatggcaatattggcaccagtacgcaacccagaccagttcaaagctcttggattggtgactccagctggggtcctccttgctggtcctcctggctgtgggaagactctgctggcgaaggctgttgcaaatgagtccggactaaattttatatctgtcaagggccccgaattactaaacatgtatgttggtgagagtgaacgtgctgtgcgacaagtttttcaacgagccaagaactcagcaccctgtgtgatattctttgatgaagtggatgctttatgtcctcgaagatcagaccgagagacaggggcaagtgtccgagtggtgaatcagctacttacagagatggatggtctggaagcacgccagcaggtttttattatggcagccactaacaggccagatataattgaccctgcaatcctgcgcccgggccgcctggacaaaacactgtttgtgggtttaccgccccctgcagatcgccttgccatcttaaaaactatcacaaaaaatggtaccaaaccaccactggatgcagatgtaaatttggaagcaattgctggtgaccttcgctgtgattgctatacgggcgcagatctctctgctttggtacgagaagcttctatctgtgccctgagacaggaaatggcaagacagaagagtggaaatgaaaaaggtgaactcaaggttagtcataagcattttgaagaagctttcaagaaagtaagatcatctatatcaaaaaaggatcaaatcatgtatgaacgtttgcaggagtccctcagccggtgatgtctccagcagccggcttagaggagctagcccatcaagccggcagagaatcccccacacgctctgaaggacccactttcagctggacacaggcgcggcctcatgtaaacattttattttcaaatgaatgaggccaagctgaagctgaagctgaagattcttcccatctggccagccttgtgtgaaaatgccttcttcctctttaagaaaaaggacaatttttaaactgctgaaataaaatgactgttacatttttc

SEQ ID NO: 161086 - DNA, 577 bp, Homo sapiens
  Payload ID: 11465
  Gene Symbol: NVL
  Gene Name: nuclear VCP-like
  ENST ID: ENST00000461546
  CDS Start-End: 53-577
cccggttgactaggagctggcggtccgagctgtggcttggaagaccgacgcgatgaagcccagacctgcagggttcgtggataataaactcaagcagcgagtcatccagtaccttaccagtaacaaatgtggcaaatatgtggacattggagtcttagcgtctgatttacaaagagtgtacagtatagactatggtcgaagaaaaagaaatgcttttaggattcaggtagaaaaagtatttagcataattagtagtgagaaggaacttaagaatttaacagaattagaagatgaacatttggcaaaaagggcaagacaaggtgaagaggataatgacgtctcgctctgtcacccaggcttcagtgcactggcacaatcatggcttaccgcagtcttgacgtcccaggcccaagcgatcctcccaccgcagcctcacaggtatactgaaagctattctgatgatgattcaagtatggaagactacccagatccacagtcagcaaatcacatgaacagttccctgctgtctttatatcggaaaggaaatcctgattctgtttcaaatactcctgagatg

SEQ ID NO: 161087 - DNA, 553 bp, Homo sapiens
  Payload ID: 11465
  Gene Symbol: NVL
  Gene Name: nuclear VCP-like
  ENST ID: ENST00000492281
  CDS Start-End: 13-553
aagaccgacgcgatgaagcccagacctgcagggttcgtggataataaactcaagcagcgagtcatccagtcagcaaatcacatgaacagttccctgctgtctttatatcggaaaggaaatcctgattctgtttcaaatactcctgagatggagcaaagagaaaccacctcttcaacaccacggataagttccaaaacaggctccattcccttgaagacccctgccaaagattctgaaggaggatggtttattgacaaaaccccaagtgtaaagaaagacagttttttcttggacctgtcatgtgagaaaagtaatcctaagaagccaataactgagatacaggattcaaaagattcttctcttttggagagtgatatgaaacggaaaggcaagctaaagaataaaggaagcaaaaggaagaaagaagatcttcaggaagtagatggagaaattgaagctgtcctgcaaaagaaagctaaagccagggggttagaattccagatctccaacgtgaagtttgaagatgtgggaggcaatgatatgacattaaaag

SEQ ID NO: 161088 - DNA, 2510 bp, Homo sapiens
  Payload ID: 11465
  Gene Symbol: NVL
  Gene Name: nuclear VCP-like
  Uniprot ID: O15381
  ENST ID: ENST00000469968
  CDS Start-End: 239-2218
cccagacctgcagggttcgtggataataaactcaagcagcgagtcatccagtatagactatggtcgaagaaaaagaaatgcttttaggattcaggtagaaaaagtatttagcataattagtagtgagaaggaacttaagaatttaacagaattagaagatgaacatttggcaaaaagggcaagacaaggtgaagaggataatgagtatactgaaagctattctgatgatgattcaagtatggaagactacccagatccacaggattcaaaagattcttctcttttggagagtgatatgaaacggaaaggcaagctaaagaataaaggaagcaaaaggaagaaagaagatcttcaggaagtagatggagaaattgaagctgtcctgcaaaagaaagctaaagccagggggttagaattccagatctccaacgtgaagtttgaagatgtgggaggcaatgatatgacattaaaagaggtctgcaagatgctcatacacatgcgtcacccggaggtgtaccaccacctgggcgtcgtgccccctcgtggagttctccttcatggaccaccaggctgtgggaagacattacttgcacatgcaattgctggggaacttgacctgccaattttgaaagtggctgctccagagattgtgtctggagtatccggagagtctgagcagaagctgagagaactatttgagcaagctgtgtcaaatgcaccatgtatcattttcattgatgaaattgatgctattacccccaaaagagaagtggcttcaaaagatatggaacgaagaattgtagcccaactcctaacctgcatggatgatctgaataatgtggctgctacagcccgggtcctagttattggagctactaatcgaccagactcgttagaccctgctttgagacgtgcgggaaggttcgaccgagaaatatgcctaggtatcccagatgaagcatccagggaaagaatacttcaaacattgtgcagaaaactgaggcttcctcaagcttttgatttctgtcacttagcacacctaactccaggctttgttggtgctgatctcatggcactgtgccgagaggcagcaatgtgtgcagtcaatagagtcttaatgaagctacaggaacagcagaagaaaaatcctgaaatggaagatttgccatctaaaggagtccaggaggaaaggctgggaactgagcccacttctgaaacacaggatgaattacaaaggctgctggggttgctaagagaccaagatcccctctcagaggagcagatgcaaggactgtgcattgaactgaatgatttcattgttgctctatcctcagtccaaccctctgccaaaagggaaggctttgtcactgtccctaatgtgacatgggcagatattggtgccctggaagacattagagaggagctcaccatggcaatattggcaccagtacgcaacccagaccagttcaaagctcttggattggtgactccagctggggtcctccttgctggtcctcctggctgtgggaagactctgctggcgaaggctgttgcaaatgagtccggactaaattttatatctgtcaagggccccgaattactaaacatgtatgttggtgagagtgaacgtgctgtgcgacaagtttttcaacgagccaagaactcagcaccctgtgtgatattctttgatgaagtggatgctttatgtcctcgaagatcagaccgagagacaggggcaagtgtccgagtggtgaatcagctacttacagagatggatggtctggaagcacgccagcaggtttttattatggcagccactaacaggccagatataattgaccctgcaatcctgcgcccgggccgcctggacaaaacactgtttgtgggtttaccgccccctgcagatcgccttgccatcttaaaaactatcacaaaaaatggtaccaaaccaccactggatgcagatgtaaatttggaagcaattgctggtgaccttcgctgtgattgctatacgggcgcagatctctctgctttggtacgagaagcttctatctgtgccctgagacaggaaatggcaagacagaagagtggaaatgaaaaaggtgaactcaaggttagtcataagcattttgaagaagctttcaagaaagtaagatcatctatatcaaaaaaggatcaaatcatgtatgaacgtttgcaggagtccctcagccggtgatgtctccagcagccggcttagaggagctagcccatcaagccggcagagaatcccccacacgctctgaaggacccactttcagctggacacaggcgcggcctcatgtaaacattttattttcaaatgaatgaggccaagctgaagctgaagctgaagattcttcccatctggccagccttgtgtgaaaatgccttcttcctctttaagaaaaaggacaatttttaaactgctgaaataaaatgactgttacatttttcaaataaaacttttactttgaactattttgactata

SEQ ID NO: 161089 - DNA, 567 bp, Homo sapiens
  Payload ID: 11465
  Gene Symbol: NVL
  Gene Name: nuclear VCP-like
  ENST ID: ENST00000470989
  CDS Start-End: 42-203
aggagctggcggtccgagctgtggcttggaagaccgacgcgatgaagcccagacctgcagggttcgtggataataaactcaagcagcgagtcatccagtaccttaccagtaacaaatgtggcaaatatgtggacattggagtcttagcgtctgatttacaaagagtgtacagactatggtcgaagaaaaagaaatgcttttaggattcaggtagaaaaagtatttagcataattagtagtgagaaggaacttaagaatttaacagaattagaagatgaacatttggcaaaaagggcaagacaaggtgaagaggataatgaacagcgtctcgctctgtcacccaggcttcagtgcactggcacaatcatggcttaccgcagtcttgacgtcccaggcccaagcgatcctcccaccgcagcctcacaggtatactgaaagctattctgatgatgattcaagtatggaagactacccagatccacaggattcaaaagattcttctcttttggagagtgatatgaaacggaaaggcaagctaaagaataaaggaagcaaaaggaagaaaga

SEQ ID NO: 161090 - DNA, 564 bp, Homo sapiens
  Payload ID: 11465
  Gene Symbol: NVL
  Gene Name: nuclear VCP-like
  ENST ID: ENST00000488718
  CDS Start-End: 12-564
agaccgacgcgatgaagcccagacctgcagggttcgtggataataaactcaagcagcgagtcatccagtaccttaccagtaacaaatgtggcaaatatgtggacattggagtcttagcgtctgatttacaaagagtgtacagtatagactatggtcgaagaaaaagaaatgcttttaggattcaggtagaaaaagtatttagcataattagtagtgagaaggaacttaagaatttaacagaattagaagatgaacatttggcaaaaagggcaagacaaggtgaagaggataatgagtatactgaaagctattctgatgatgattcaagtatggaagactacccagatccacaggattcaaaagattcttctcttttggagagtgatatgaaacggaaaggcaagctaaagaataaaggaagcaaaaggaagaaagaagatcttcaggaagtagatggagaaattgaagctgtcctgcaaaagaaagctaaagccagggggttagaattccagatctccaacgtgaagtttgaagatgtgggaggcaatgatatgacattaaaag

SEQ ID NO: 161091 - DNA, 1310 bp, Homo sapiens
  Payload ID: 11465
  Gene Symbol: NVL
  Gene Name: nuclear VCP-like
  ENST ID: ENST00000467882
  CDS Start-End: 11-901
gaccgacgcgatgaagcccagacctgcagggttcgtggataataaactcaagcagcgagtcatccagtaccttaccagtaacaaatgtggcaaatatgtggacattggagtcttagcgtctgatttacaaagagtgtacagtatagactatggtcgaagaaaaagaaatgcttttaggattcaggtagaaaaagtatttagcataattagtagtgagaaggaacttaagaatttaacagaattagaagatgaacatttggcaaaaagggcaagacaaggtgaagaggataatgagtatactgaaagctattctgatgatgattcaagtatggaagactacccagatccacagtcagcaaatcacatgaacagttccctgctgtctttatatcggaaaggaaatcctgattctgtttcaaatactcctgagatggagcaaagagaaaccacctcttcaacaccacggataagttccaaaacaggctccattcccttgaagacccctgccaaagattctgaaggaggatggtttattgacaaaaccccaagtgtaaagaaagacagttttttcttggacctgtcatgtgagaaaagtaatcctaagaagccaataactgagatacaggattcaaaagattcttctcttttggagagtgatatgaaacggaaaggcaagctaaagaataaaggaagcaaaaggaagaaagaagatcttcaggaagtagatggagaaattgaagctgtcctgcaaaagaaaggaggtctgcaagatgctcatacacatgcgtcacccggaggtgtaccaccacctgggcgtcgtgccccctcgtggagttctccttcatggaccaccaggctgtgggaagacattacttgcacatgcaattgctggggaacttgacctgccaattttgaaagtggctgctccagagattgtgtctggagtatccggagagtctgagcagaagctgagagaactatttgagcaagctgtgtcaaatgcaccatgtatcattttcattgatgaaattgatgctattacccccaaaagagaagtggcttcaaaagatatggaacgaagaattgtagcccaactcctaacctgcatggatgatctgaataatgtggctgctacagcccgggtcctagttattggagctactaatcgaccagactcgttagaccctgctttgagacgtgcgggaaggttcgaccgagaaatatgcctaggtatcccagatgaagcatccagggaaagaatacttcaaacattgtgcagaaaactgaggcttcctcaagcttttgatttc

SEQ ID NO: 161092 - DNA, 591 bp, Homo sapiens
  Payload ID: 11465
  Gene Symbol: NVL
  Gene Name: nuclear VCP-like
  ENST ID: ENST00000481213
  CDS Start-End: 1-145
gggcgcagatctctctgctttggtacgagaagcttctatctgtgccctgagacaggaaatggcaagacagaagagtggaaatgaaaaagtagagacggggtttcaccatgttagccaggatggtctcgatctcctgacttcgtgatccgcctgcctcggcctcccaaagtgctgggattacaggtgaactcaaggttagtcataagcattttgaagaagctttcaagaaagtaagatcatctatatcaaaaaaggatcaaatcatgtatgaacgtttgcaggagtccctcagccggtgatgtctccagcagccggcttagaggagctagcccatcaagccggcagagaatcccccacacgctctgaaggacccactttcagctggacacaggcgcggcctcatgtaaacattttattttcaaatgaatgaggccaagctgaagctgaagctgaagattcttcccatctggccagccttgtgtgaaaatgccttcttcctctttaagaaaaaggacaatttttaaactgctgaaataaaatgactgttacatttttcaaataaaacttttactttgaactattttgactata

SEQ ID NO: 161093 - DNA, 3002 bp, Homo sapiens
  Payload ID: 11466
  Gene Symbol: NABP1
  Gene Name: nucleic acid binding protein 1
  Uniprot ID: Q96AH0
  ENST ID: ENST00000307849
  CDS Start-End: 480-884
agtcgctgtttgggacgctgggtgtgcggtgttctgtctccgctcccgtttcgctgtcacagcccgttccttcccggagcccgggacaggctgggcgcgcgcccgtgtgagtgagcgggactcagggcagaagtgtcccctcactgcgtttttttttccttttatccaaagaacggggcagttagtacgcttgccttcctgtcgcccggttgggagcggggttggtgtgcggagtggttcgcctttttttctttagaacttgtgagccttttttttttttttttttttttttctttttttaggctcagtgctgtccgggctggtttgcccggtccctgactaacggctttctgccccttctctcgccacccctgcccaaggtcgcccctctgccttcgcccctgtcccgggagggtgggaagctttgaccccgccctgcccactcgcgtctccgcagccgtagccgcgcctgtcccaatatgaatagggtcaacgacccacttatttttataagagatattaagcccggactgaaaaacttaaatgtcgtctttattgtcctggagataggacgcgtgaccaaaaccaaagacggccatgaagtgagatcgtgcaaagtagcagataaaacgggcagcatcactatttccgtgtgggatgagatcggaggtcttatacagccaggggatattattcggttgaccagagggtatgcatccatgtggaaaggatgtctgacactttatactggaaggggtggtgaacttcaaaaaattggggatctaggtgcggtgcaggcagccgcaatgcgagattccatacactactaccctggtaatgatctccaccctgacctggaggagccatcctctctaggggtgtaagattttgtatggtttattcagaagtgccaaatttcagtgaacccaacccagattatcgaggacagcagaacaaaggggcacagagtgaacagaagaataattccatgaatagtaatatgggtacaggtacatttggaccagtgggaaatggtgttcacactggccctgaatcaagggaacaccagttttcacatgctggcagaagcaatggccggggacttataaatccacaactacaaggaacagctagtaatcaaacagtgatgaccacaataagtaatggcagggaccctcggagagcctttaaaagatgacctatgctaaatactcatgtgtagtttttatactacatgccctacttgaacacttattgcacttttatttattgttaactgtgaaaagtacgtcctttattgggtttccttttatattcttggtttgttaagaagaatggtttgtttttatagcaaaactgttaagctgctcgagtctcctgttgaagaatgggaacactgaaaagtaggggcatttatttttagagtaaaaagattattggatagcctttaaaaaacctgcacccatttcatgggtgagttacttaagacatcagctttatagcctctatgagtctatcttctgtataagttttgtaatatttaacataaggcttaatgggagatgttcttttgtcttgtattcagatattgccaactaaagcaataaccatcaaaaaacacaagaacttgtcaatgctagcagtaatttttgagtgtttgtggctctcggaatgattgacttcgttcagtgactactattaagattttccaaggactgactcatcccaaatttttgttgtattaccaaaaaaacagattccttatcagaatttggaatagaatgtgatctctattgcaacaagtaattttaaaagaaagctacatttattttagagtagtgctcctaacatgtattatcaactttgtggattacattggaggaaaatttaaaactggggccttgaatatttattttttgaaactaccatgttaaatactgaagtataatttgggggagttataaagttatgataaacattcatctgattattttaaacaatagttgtggtagataaacatactggaggtgagtcaaattgaattcatatagtaacatgcagtctgaagtcctagttacttaataggtactcagcctggagtgaaaatcctgggtactgactttgagaggagtgagtgtgcatgttgtcaaagtttctgaacacagttcacatagccttattagcaaaagttttaagaaatggctctatcaaagaagcaattgcagctttattcagaaatataaaagtggaatttatgtacatgtcataagtggtacccacttcccctttttactgtagggtggataactcttaggatttaactctttgaatattatctcttgaataaagcatgtgttaatgttaacaaacctacgtaatttttgccctttcaatgacttacagtggagagccagtacatcttaactactgttgtagtgatggtatcaacctcatggttacttagctctgcatttgttgctttgttttttttccacttcaaatcacaaaataagtagattttgttttctgaaaactccatagcatttgaatacaaaaagttgtgccagattgtttgccctaattcactgtgtttaacaaatatttcagtacacactatgtattaggcactgtgtggaaagtgttaaggggtagacaaaataccgaataatctccacaagtttatttgtggtctatagtacttttgtaactggggttacaaaaattatagaaatttttttcctttgttcatatgcatattcatgattataatttggctttgtttgtgattaatgttttcttaagattttcacattatagaatacctcaaaagaagttgtctaaggactgggatagagagtatgtttcataaaattgtagatgtttagaatttttaaaaaccctacaaattagtatatgattgttttatataagtaagataggagcaacactttaaattatttgtgggagaatacagcattaaaggtgattttaaaagaaaaaaa

SEQ ID NO: 161094 - DNA, 1914 bp, Homo sapiens
  Payload ID: 11466
  Gene Symbol: NABP1
  Gene Name: nucleic acid binding protein 1
  ENST ID: ENST00000307834
  CDS Start-End: 265-429
gtgttcatcagtcgctgtttgggacgctgggtgtgcggtgttctgtctccgctcccgtttcgctgtcacagcccgttccttcccggagcccgggacaggctgggcgcgcgcccgtgacgcgtgaccaaaaccaaagacggccatgaagtgagatcgtgcaaagtagcagataaaacgggcagcatcactatttccgtgtgggatgagatcggaggtcttatacagccaggggatattattcggttgaccagagggtatgcatccatgtggaaaggatgtctgacactttatactggaaggggtggtgaacttcaaaaaattggggatctaggtgcggtgcaggcagccgcaatgcgagattccatacactactaccctggtaatgatctccaccctgacctggaggagccatcctctctaggggtgtaagattttgtatggtttattcagaagtgccaaatttcagtgaacccaacccagattatcgaggacagcagaacaaaggggcacagagtgaacagaagaataattccatgaatagtaatatgggtacaggtacatttggaccagtgggaaatggtgttcacactggccctgaatcaagggaacaccagttttcacatgctggcagaagcaatggccggggacttataaatccacaactacaaggaacagctagtaatcaaacagtgatgaccacaataagtaatggcagggaccctcggagagcctttaaaagatgacctatgctaaatactcatgtgtagtttttatactacatgccctacttgaacacttattgcacttttatttattgttaactgtgaaaagtacgtcctttattgggtttccttttatattcttggtttgttaagaagaatggtttgtttttatagcaaaactgttaagctgctcgagtctcctgttgaagaatgggaacactgaaaagtaggggcatttatttttagagtaaaaagattattggatagcctttaaaaaacctgcacccatttcatgggtgagttacttaagacatcagctttatagcctctatgagtctatcttctgtataagttttgtaatatttaacataaggcttaatgggagatgttcttttgtcttgtattcagatattgccaactaaagcaataaccatcaaaaaacacaagaacttgtcaatgctagcagtaatttttgagtgtttgtggctctcggaatgattgacttcgttcagtgactactattaagattttccaaggactgactcatcccaaatttttgttgtattaccaaaaaaacagattccttatcagaatttggaatagaatgtgatctctattgcaacaagtaattttaaaagaaagctacatttattttagagtagtgctcctaacatgtattatcaactttgtggattacattggaggaaaatttaaaactggggccttgaatatttattttttgaaactaccatgttaaatactgaagtataatttgggggagttataaagttatgataaacattcatctgattattttaaacaatagttgtggtagataaacatactggaggtgagtcaaattgaattcatatagtaacatgcagtctgaagtcctagttacttaataggtactcagcctggagtgaaaatcctgggtactgactttgagaggagtgagtgtgcatgttgtcaaagtttctgaacacagttcacatagccttattagcaaaagttttaagaaatggctctatcaaagaagcaattgcagctttattcagaaatataaaagtggaatttatgtacatgtcataagtggtacccacttcccctttttactgtagggtggataactcttaggatttaactctttgaatattatctcttgaataaagcatgtgttaatgttaacaaa

SEQ ID NO: 161095 - DNA, 843 bp, Homo sapiens
  Payload ID: 11466
  Gene Symbol: NABP1
  Gene Name: nucleic acid binding protein 1
  Uniprot ID: Q96AH0
  ENST ID: ENST00000409510
  CDS Start-End: 343-717
ccttcccggagcccgggacaggctgggcgcgcgcccgtgtgagtgagcgggactcagggcagaagtgtcccctcactgcgtttttttttccttttatccaaagaacggggcagttagtacgcttgccttcctgtcgcccggttgggagcggggttggtgtgcggagtggttcgcctttttttctttagaacttgacgcgtgaccaaaaccaaagacggccatgaagtgagatcgtgcaaagtagcagataaaacgggcagcatcactatttccgtgtgggatgagatcggaggtcttatacagccaggggatattattcggttgaccagagggtatgcatccatgtggaaaggatgtctgacactttatactggaaggggtggtgaacttcaaaaaattggggaattttgtatggtttattcagaagtgccaaatttcagtgaacccaacccagattatcgaggacagcagaacaaaggggcacagagtgaacagaagaataattccatgaatagtaatatgggtacaggtacatttggaccagtgggaaatggtgttcacactggccctgaatcaagggaacaccagttttcacatgctggcagaagcaatggccggggacttataaatccacaactacaaggaacagctagtaatcaaacagtgatgaccacaataagtaatggcagggaccctcggagagcctttaaaagatgacctatgctaaatactcatgtgtagtttttatactacatgccctacttgaacacttattgcacttttatttattgttaactgtgaaaagtacgtcctttattgggtttccttttatattcttggttt

SEQ ID NO: 161096 - DNA, 11521 bp, Homo sapiens
  Payload ID: 11466
  Gene Symbol: NABP1
  Gene Name: nucleic acid binding protein 1
  Uniprot ID: Q96AH0
  ENST ID: ENST00000410026
  CDS Start-End: 256-630
agtcgctgtttgggacgctgggtgtgcggtgttctgtctccgctcccgtttcgctgtcacagcccgttccttcccggagcccgggacaggctgggcgcgcgcccgtgacgcgtgaccaaaaccaaagacggccatgaagtgagatcgtgcaaagtagcagataaaacgggcagcatcactatttccgtgtgggatgagatcggaggtcttatacagccaggggatattattcggttgaccagagggtatgcatccatgtggaaaggatgtctgacactttatactggaaggggtggtgaacttcaaaaaattggggaattttgtatggtttattcagaagtgccaaatttcagtgaacccaacccagattatcgaggacagcagaacaaaggggcacagagtgaacagaagaataattccatgaatagtaatatgggtacaggtacatttggaccagtgggaaatggtgttcacactggccctgaatcaagggaacaccagttttcacatgctggcagaagcaatggccggggacttataaatccacaactacaaggaacagctagtaatcaaacagtgatgaccacaataagtaatggcagggaccctcggagagcctttaaaagatgacctatgctaaatactcatgtgtagtttttatactacatgccctacttgaacacttattgcacttttatttattgttaactgtgaaaagtacgtcctttattgggtttccttttatattcttggtttgttaagaagaatggtttgtttttatagcaaaactgttaagctgctcgagtctcctgttgaagaatgggaacactgaaaagtaggggcatttatttttagagtaaaaagattattggatagcctttaaaaaacctgcacccatttcatgggtgagttacttaagacatcagctttatagcctctatgagtctatcttctgtataagttttgtaatatttaacataaggcttaatgggagatgttcttttgtcttgtattcagatattgccaactaaagcaataaccatcaaaaaacacaagaacttgtcaatgctagcagtaatttttgagtgtttgtggctctcggaatgattgacttcgttcagtgactactattaagattttccaaggactgactcatcccaaatttttgttgtattaccaaaaaaacagattccttatcagaatttggaatagaatgtgatctctattgcaacaagtaattttaaaagaaagctacatttattttagagtagtgctcctaacatgtattatcaactttgtggattacattggaggaaaatttaaaactggggccttgaatatttattttttgaaactaccatgttaaatactgaagtataatttgggggagttataaagttatgataaacattcatctgattattttaaacaatagttgtggtagataaacatactggaggtgagtcaaattgaattcatatagtaacatgcagtctgaagtcctagttacttaataggtactcagcctggagtgaaaatcctgggtactgactttgagaggagtgagtgtgcatgttgtcaaagtttctgaacacagttcacatagccttattagcaaaagttttaagaaatggctctatcaaagaagcaattgcagctttattcagaaatataaaagtggaatttatgtacatgtcataagtggtacccacttcccctttttactgtagggtggataactcttaggatttaactctttgaatattatctcttgaataaagcatgtgttaatgttaacaaacctacgtaatttttgccctttcaatgacttacagtggagagccagtacatcttaactactgttgtagtgatggtatcaacctcatggttacttagctctgcatttgttgctttgttttttttccacttcaaatcacaaaataagtagattttgttttctgaaaactccatagcatttgaatacaaaaagttgtgccagattgtttgccctaattcactgtgtttaacaaatatttcagtacacactatgtattaggcactgtgtggaaagtgttaaggggtagacaaaataccgaataatctccacaagtttatttgtggtctatagtacttttgtaactggggttacaaaaattatagaaatttttttcctttgttcatatgcatattcatgattataatttggctttgtttgtgattaatgttttcttaagattttcacattatagaatacctcaaaagaagttgtctaaggactgggatagagagtatgtttcataaaattgtagatgtttagaatttttaaaaaccctacaaattagtatatgattgttttatataagtaagataggagcaacactttaaattatttgtgggagaatacagcattaaaggtgattttaaaagaaaaaaatttggaattttagaaaatttaaatgctgtcaggtatggaatgctgggcttccaatcctggcctcattgtctcctcacctgtgatgttggatgagttattacacttgaaatgtctttaagccttaggttccacaagtatgaaaacaagtaagtaacagtatcctttctagacttgtttaagatttccatgtaagtaattataatgacttctgacacataataatgtcgtcttataccccaacagtaggaaaaaaatgcagaattcagtatgaaagtattgttaccctttaacacagtggtccccaacctttttggcaccagagaccagtctcctggaagacagtttttccgtgggatcgggggatggttttgggatgaaactgttccacctcaggtcatcagtcattagttagattctcataaggagcgtgcaacctcaatcccttgcatactcatttcacaatagggttcatgctcctatgagaatctaatgccaccactcatctgacaggaggtggagctcaggcagtaagtctccctcgcccgccactcacctgctgggcgttcctgttcctagcaggccagaattgatactgatctaggggttggggacccctgcttaacatgttgagattaaatggagaaagacttaagcttttacttttgtgattgacacttgcttcaataatgtaaccttgttctgtgtttttatcatttattaacaaatttcttttttcttaagggaagcctccaaaatcaaagaaaagtgagttacaatccataatgaatatttgccttaccagcctactggaacacattcatcaagaacttaagaggaagaaagttttctgccttcctccttcctagtgctctcagctatcaactttgaaataagtttaaacaacacctactgaaaacaaaaaccacttagtataaaaatatcccccaccagaattgggtcccccatatcatttctacaaaacagttctggagtggatcaaagtctcatcagatcagcttgccccttcttgtttgggcaggttctaggagaagctgctgtaatacaaaaactgaaagatgaaatcgtaaagctagataatgataatgatatttagtggggaaggctacagtatgttttcccataggcatttaaacactcactttttccaacgctttatactttgtccctatagcctttgtaattttaactttgatgacagtttaacttaggataacctgaatatgggtattactgttagtcatttgtatttttatcatttaacattttaaatgaatgtttaatttgctgggttgagtaatgccaagggaatgatgctaaaaacaaatagatgtgaggttagtaaaagattaaagttacaatttatgatacgagaacttcttaactataggaaagtaggtaaatgaccctaaaaggttttctcagaaggtaaaagttttacatcagtctgaagacatataactctaacatttcagtttagttactgaaatgactttttctggtgtcattgagatactggctgtttgttccaagccattttaggctgagaatgactcttaaggtcttctaatgcatttcagagggttctagaaacaacaaactgaacatgatatgaaactaacaacatagaatgccccccaaacaaattcctctaacctcactgagtttacttgccctattactattttttttttttaagatcttctgtctcttgtttttgttttatcccttacctgatgaaagtgaacatttctagtggagaaagaagatcacagttctctaatatgggcattaagagaggggtacagctagaggggaggtgaaaacctgcctccactggggtgaaaaacagtgtgctgaggtttcagccagtgattacactgggtaatcaaccagtcccatgtttcacaaaggagttgtaatgattaacagttcaggtatgcttctgaggaaatctaattgagacctttggaaaatagcattgttatgaatggtgtggtgttacgccctgagggaaaagctagaaaaacattttacttttcaagtgtatttaaattacatccaaatgtttcagtgtgctttactggagactgcctgagtttggaattcaaatattgtaaccaaattactccaggtttctgaactaaaatgatctattgatgtttctcaaagtatagatcacagagtaagaaaagaggaaatcaagtctggtttatgacaaacttttttccatgttaacattggacccaaagatgttactaagagctttttactactgtgagagaaccagcgtgatgtgaagacaacgaacattttaagaagtttgactagtagacatttcgtttaagtcttttggagggtcttggttgacaacccacaattttattgtggctccccaggctttgagaacgtgtgggcttggatgatcattgttgacctataaaagagcacaggtctcttgagagtttattgacacactactgatcagacccccacaatatgtctcaacctctgttgaagggctagtgatgtttaaaaaaacctgttatttccaatcagaaattgaagttatgtctcttactccatcaaaatttatgcttttcagcattgggtaagtctagtttcttggtttgtatattaaatgcatattgagtaaaattcttagtgatttagaaaccatctacatgaggcttcccaggaacttgttaaaagtacaggttgcacctctgcattactagaataacatcagtgtacatttgggagatctgcatttgaaaccctgaggttgtctgcctcctgcccttgagatcttcccttgtattgaaattatatatatatatatatatatattttttttttttcccctcagtttcttttacctttgtgaggctaatatatgctgacgtgttggattgtaaaacaaaaaattgtgcttaaaagaatgtccctccagagggcagaattgttgggtaaagcatatagcgcagagcagaataagaggttcagtatggcctctggatgagggtattgcaaattttgaattaggctcaaataaaatgatttaaattatatatcaattcgaggatcagatattaattgggaggtcacatgactttccttgagcctatctagataaaagtaaaatgctttttttcctacgtttttgaaaatttagagtttattgttgctcatctcagcaaattaatgttaccagcatcttctgccttcctcctgtccctcaattccctactttactaaaagaaggctggccaaattgaaaagtagttgagttggagacttgataaatacttttgaaaatacttagagaaaccacccttcatcttccacgtaaagatctcagttctgtacagagaggcaactacaatgagtattttctgcaagtaacatggaaatcatgatttgattgccatgtgtttctaatgttcagtattaaatgtttatagccctcgtaggaaacaaacttctgacctaagttgctggactacttgaatagaaaggtagtcagcacaactagtgccatctactgggtcattgctgcatagtttctgtctgtttagaaatctggcttagtttaacacgtgggggaaatggttctgttccaatgaatagcgatttttgcctgatagtggtgttaagtatgatatggaaaatccttaaggggcagttgggccatttgtttagtttatgaacaatcaacactgacattaaatttcagttaagtagatgaaaccctgaactgcccctaaagctatagaaaatatgggaaaggttgccaagttttgtattctcatcacatttgtcaatattgttggtgagaagtgtaaactgttaaaaatgccttttggtgagtggtggtttggtaaaaacaattgaagtagaacacgacactgcccttagaaatttcattcctttacccaatggtatttggtaaaatcctggccaaatgactgctgctgttgtaattatgtgagctttgcagaacataacctattttaaatgccagaatgtgcttccatgaagaagaacatggttttgggctgaggagatcttggtttgagtcctggatctatttactggctccaggaccatgaacctcgttataaaatgatagtggggctatgtactcatagtgttaggaggactatgtgagctaatgtatgcaaaacatctgctccatatctaagggtcaacaaatgttaagccctttctccatcagcattggaaataagttaaaatactgttcatttctccatgccattattagaaaacaatcttctataatttaaaatctgaaatattaagcaatttatgtgaattattacaattatgttcttttttaaacagtcaaaccaagtttttcctgtcttgtctgggcacagacaagcacttatgctgacggtttaccgtgacagcatgtagggttgggtcttcattacaaagatctgcccactagctgagtacactggtgtttttccattcacctctgcccagcaggacaagatgatgaaagtacagagaacttgtgggtccaggtttgtgtcagaaaggaggttagtggcttgcttagggccaggcagagggcacattggaaggaattctctgttcccggtgacagcccttggaattgctgtgcacccagagttgcggagtaatttattggcttctgataactatagtattggataacttcccaacattttattaaaaattttaaacatataggcatgttgaaagaatttatactcaccacctagattttgccactatcacatatctgtgcatcctattaatacatttttaattattatttttttgagacagagtttcttttactcaggctggattgcaatggtgcaatctcagctcactgcaacctctgcctccaagattgaggcgattctcccacctcaggctcctgaatagctgggactacagaggggagccaccatgcccggttaatttttgtatttttggtaaagaaggggtttcatcatgttgccccaggctggccttgaactcctgggctcaagtgatcctctggcctcagcctcccaaagtgctaggattacaggcatgagtcaccgtgcccagccagccattaatgcatttttaatatatttttagtcaattgcagacatcgtacaattttccctaaacgttgcaacatgcctattcattacagttcagtatttttcaggattttttttttttgtaaaatttacaaagaaatgtggaaatcttagttgtgcattagttgagttttaacaaatacctaggctttatcgcaacctctatcaagatacagaacattgctgtcattctagaagcctctgtaatgtgccttccccagtcaatctctttttccatggccccagcagccatcattctttcaatactttaaaaaacattcttatctgaagggaaatttcatatgtgccaaagtcatctctagatttctccaagtcttaaccatgccagagtacagccaaacctagcccttcatgcatctcaaataaagttctaagatcttggtattttattcttccctgtttcaacttagctccaactctttttttcttttttccatcaagatttaaacctgtcatccttgacatttggggcagaaactgctgaaatgaaggaggacttgccatcaaagaactggctgaaaggagttagcacaccactcctctgccctgaacagttctaagcaagaggaggagcctgtggcagggcgtgatatgaagtcctcagagatagagtgccaagagtagagggagtatcctggaacttcagtgtttgcaggtcagttgctcagttcttcagaagatattgattcttaggctctaattttcttaaggtatgagctgaactgaagtgctctctcctccttaggattttgtactccaaggttggcattcagaatccgcatagccagagagtgtaagttacttgtcaagtaaagacaccccgccccccgctacaaccccccaccctgagtctacagggaaatattcctgagtgaaacagactaaaaaaatatagtcatgtgttctttcccagtccatgtgcacgtgcacgtatatacacgaacacatgacacattatcactgccatcagaggtgtttctgcattgaactccacatatctgagtcacatgcatatcaggtctttgcttttctttctcatcaattgtttaaggattctctccttccacttctttaatgggctgcctatactttgttgagcactaactatatgccaagtactatgctagtgagttacctatgaaagaccctgagagggaggttttgttatccccatgggaaggattgagtagtttgcatgagatcacacaactaggcggtgactgagtccaacacaccaaagcctatactattacagttgagcaatagtgaaacattgaggctgctgctgacagtggatggtgcttcatagaggatatagaattggagttagttttgaaagggagtgtatgcagaggggaagatggagaacaaaatatggaatttgactaatttacatttttacctgagattagtcatactttaaatgtcaacttattacaaacccaattagtcaaatttaagtctacagaagtggtatcagatcaacagggaaattatggactcttgggtattgggataactggatactctccctaaccaccacacaaacagtaaaaaaccatgggtgaattctattaagaatggagaaaattttccaaaaatggctcaaagtccagaagcattaaaggaaagattgatcaatttgactacatttacatgttaaaaaataaaatgacaactgggaaaaacatttgtaacatcacaaagggctaatattcctaacataaaaagaacttgtataaatagagaagacaaaacacactatggaaaagtgggcaaaagatatggacagttcacagaaaaaaagttcaaatggcccttaagtatataaaaagatgctcaacttcactcataatgaaagatgtaaattaaaataccaccaagataacattcttcacttttagattggaaaaaatatgaaagtttggccgggcgcggtggctcacgcctgtaatcccagcactttgggaggccgaggcgggcggatcacgaggtcaggagatcgagaccatcccggctaaaacggtgaaaccccgtctctactaaaaatacaaaaaattagccgggcgtagtggcgggcgcctgtagtcccagctacttgggaggctgaggcaggagaatggcgtgaacccgggaggcggagcttgcagtgagccgagatcccgccactgcactccagcctgggcgacagagcgagactccgtctcaaaaaaaaaaaaaaaaaaaaaaaaaaaaaaaaaaaaaatgaaagtttgaaaacacacttgcttggccaggtgtggtggctcatgcctgtaatcccagcgctttgagaggccaaggtgggtggatcacctgaggtcaggcattcaagaccagcctggccaacatggtgaaaccccgtctctactaaaaatacaaaaatttactgggcataatggtgcgcacctgtaatcccagctacttgggaggctgaggcaggagaattgcttgaacctgggaggtggaggttgcagtgagccgagattgcacctctgcactccaacctgggcgacgagagtgtaactctgtctcaaaaaagaaaatattctcttggtaacactattggaataggaacattcactgatggaggaaatgcaaaactgtataatctctgttataggggaatttggcaattttacatttaaatttgccttgtgacccagcaatcctgctatattattcctttcatattgctataaaaaaatctgaggctgggtaatttataaagaaaggaggtattttttttcatggttcttcaggctgtatacaagcagggctgttagcatctgctcagcttctgatgaggcccaggaagcttttggtcttggtggaagagaagaggagccagcatattacatgacgagaggaagcaagagagataccaggctcttttaagcaaccagttctcatgtgaacgcattgctactgagaaagtgccaaaccattcacgagggatccactacctagacccaaacacctccccctaggccccgtctccaacagcggggatcatatttcaacatgagacttcgaggagacaaatatccaaaccatatcgcccacgtttaggaatgtctctccatggtagatgatttgcaaatagacggtggtatacccattccatggaagcagggaaatatgtttgcacgtctttggttagtcctcttcttttctactgacagtgggcttgtccatgtgtcctgcatgatcaaaatgacaatagcaaacttgatggccacagaagattgaaaagtgcttgggcattgagcttgctctctcttgaagtgcttggagccctgagactgccatgagaccacataaatgatcactagctagcctgctggaggatgagaggtcacttgagaaaccttggctcacagcctgcttacaccagacacatggatgagtctgtcttagactatccagctccagctgagttgccagctgacttcagtcacatgagtgagaacaacagaaggacagcactgagctctgccaaaattgctgacctacagaatcttgagctaatgaatgattgtagctttatgccattaagttctgaggcagtgtgctatacatagcaaaagctaactgatacaaaactaaagatacaatggcacaaacatgaaaagacatgttcaccgaagcattgcctataatagttaaagactggaaacgactcagatgtccaccaactcaggagtggttgaacctactacagtgcattcaccccgtggaatactaagcagctccaacaggggtaggaaatttgtatactttcataaaatgatctttaggatatattgttaagtgaaaaaaacaaggtgtagaatagttaatagagtatgctacctcttatttaataaagggagaatat

SEQ ID NO: 161097 - DNA, 2015 bp, Homo sapiens
  Payload ID: 11466
  Gene Symbol: NABP1
  Gene Name: nucleic acid binding protein 1
  Uniprot ID: Q96AH0
  ENST ID: ENST00000451500
  CDS Start-End: 469-873
gggacgctgggtgtgcggtgttctgtctccgctcccgtttcgctgtcacagcccgttccttcccggagcccgggacaggctgggcgcgcgcccgtgtgagtgagcgggactcagggcagaagtgtcccctcactgcgtttttttttccttttatccaaagaacggggcagttagtacgcttgccttcctgtcgcccggttgggagcggggttggtgtgcggagtggttcgcctttttttctttagaacttgtgagccttttttttttttttttttttttttctttttttaggctcagtgctgtccgggctggtttgcccggtccctgactaacggctttctgccccttctctcgccacccctgcccaaggtcgcccctctgccttcgcccctgtcccgggagggtgggaagctttgaccccgccctgcccactcgcgtctccgcagccgtagccgcgcctgtcccaatatgaatagggtcaacgacccacttatttttataagagatattaagcccggactgaaaaacttaaatgtcgtctttattgtcctggagataggacgcgtgaccaaaaccaaagacggccatgaagtgagatcgtgcaaagtagcagataaaacgggcagcatcactatttccgtgtgggatgagatcggaggtcttatacagccaggggatattattcggttgaccagagggtatgcatccatgtggaaaggatgtctgacactttatactggaaggggtggtgaacttcaaaaaattggggatctaggtgcggtgcaggcagccgcaatgcgagattccatacactactaccctggtaatgatctccaccctgacctggaggagccatcctctctaggggtgtaagatccacagtgatcgatcaaaagagggactgaatgggagtgggtgaatggatcggtgcaaatccattaccactgctggagaaaccaccctggaaccctaaacatggttcactctcatgttatttttcctttgatcagcttttgtggaaaaacaggacagagatgtttttgtgtccttgatttttgatgtgatttttttttcagcactaaagaagaatttaaatacaaaatagaatgttatatatcttgtagacagtcaaatatttgatgttttatgggacataatcatttgggaagtttttgttgtaaatgaagagttagtttgttgctattaatttgtttgacacataagttcattcctaaaagttagagatgttacataaagaagggttgaggactttatttcagaagtcatttaattttttctttattttctttcagattttgtatggtttattcagaagtgccaaatttcagtgaacccaacccagattatcgaggacagcagaacaaaggggcacagagtgaacagaagaataattccatgaatagtaatatgggtacaggtacatttggaccagtgggaaatggtgttcacactggccctgaatcaagggaacaccagttttcacatgctggcagaagcaatggccggggacttataaatccacaactacaaggaacagctagtaatcaaacagtgatgaccacaataagtaatggcagggaccctcggagagcctttaaaagatgacctatgctaaatactcatgtgtagtttttatactacatgccctacttgaacacttattgcacttttatttattgttaactgtgaaaagtacgtcctttattgggtttccttttatattcttggtttgttaagaagaatggtttgtttttatagcaaaactgttaagctgctcgagtctcctgttgaagaatgggaacactgaaaagtaggggcatttatttttagagtaaaaagattattggatagcctttaaaaaacctgcacccatttcatgggtgagttacttaagacatcagctttatagcctctatgagtctatcttctgtataagttttgtaatatttaacataaggcttaatgggagatgttcttttgtcttgtattcagat

SEQ ID NO: 161098 - DNA, 915 bp, Homo sapiens
  Payload ID: 11466
  Gene Symbol: NABP1
  Gene Name: nucleic acid binding protein 1
  ENST ID: ENST00000435931
  CDS Start-End: 1-506
gacgcgtgaccaaaaccaaagacggccatgaagtgagatcgtgcaaagtagcagataaaacgggcagcatcactatttccgtgtgggatgagatcggaggtcttatacagccaggggatattattcggttgaccagagggtatgcatccatgtggaaaggatgtctgacactttatactggaaggggtggtgaacttcaaaaaattggggaattttgtatggtttattcagaagtgccaaatttcagtgaacccaacccagattatcgaggacagcagaacaaaggggcacagagtgaacagaagaataattccatgaatagtaatatgggtacaggaaatggtgttcacactggccctgaatcaagggaacaccagttttcacatgctggcagaagcaatggccggggacttataaatccacaactacaaggaacagctagtaatcaaacagtgatgaccacaataagtaatggcagggaccctcggagagcctttaaaagatgacctatgctaaatactcatgtgtagtttttatactacatgccctacttgaacacttattgcacttttatttattgttaactgtgaaaagtacgtcctttattgggtttccttttatattcttggtttgttaagaagaatggtttgtttttatagcaaaactgttaagctgctcgagtctcctgttgaagaatgggaacactgaaaagtaggggcatttatttttagagtaaaaagattattggatagcctttaaaaaacctgcacccatttcatgggtgagttacttaagacatcagctttatagcctctatgagtctatcttctgtataagttttgtaatatttaacataaggcttaatgggagatgttcttttgtcttgtattcagatattgccaactaaagcaataa

SEQ ID NO: 161099 - DNA, 1878 bp, Homo sapiens
  Payload ID: 11466
  Gene Symbol: NABP1
  Gene Name: nucleic acid binding protein 1
  Uniprot ID: Q96AH0
  ENST ID: ENST00000425611
  CDS Start-End: 84-698
cgcccctgtcccgggagggtgggaagctttgaccccgccctgcccactcgcgtctccgcagccgtagccgcgcctgtcccaatatgaatagggtcaacgacccacttatttttataagagatattaagcccggactgaaaaacttaaatgtcgtctttattgtcctggagataggacgcgtgaccaaaaccaaagacggccatgaagtgagatcgtgcaaagtagcagataaaacgggcagcatcactatttccgtgtgggatgagatcggaggtcttatacagccaggggatattattcggttgaccagagggtatgcatccatgtggaaaggatgtctgacactttatactggaaggggtggtgaacttcaaaaaattggggaattttgtatggtttattcagaagtgccaaatttcagtgaacccaacccagattatcgaggacagcagaacaaaggggcacagagtgaacagaagaataattccatgaatagtaatatgggtacaggtacatttggaccagtgggaaatggtgttcacactggccctgaatcaagggaacaccagttttcacatgctggcagaagcaatggccggggacttataaatccacaactacaaggaacagctagtaatcaaacagtgatgaccacaataagtaatggcagggaccctcggagagcctttaaaagatgacctatgctaaatactcatgtgtagtttttatactacatgccctacttgaacacttattgcacttttatttattgttaactgtgaaaagtacgtcctttattgggtttccttttatattcttggtttgttaagaagaatggtttgtttttatagcaaaactgttaagctgctcgagtctcctgttgaagaatgggaacactgaaaagtaggggcatttatttttagagtaaaaagattattggatagcctttaaaaaacctgcacccatttcatgggtgagttacttaagacatcagctttatagcctctatgagtctatcttctgtataagttttgtaatatttaacataaggcttaatgggagatgttcttttgtcttgtattcagatattgccaactaaagcaataaccatcaaaaaacacaagaacttgtcaatgctagcagtaatttttgagtgtttgtggctctcggaatgattgacttcgttcagtgactactattaagattttccaaggactgactcatcccaaatttttgttgtattaccaaaaaaacagattccttatcagaatttggaatagaatgtgatctctattgcaacaagtaattttaaaagaaagctacatttattttagagtagtgctcctaacatgtattatcaactttgtggattacattggaggaaaatttaaaactggggccttgaatatttattttttgaaactaccatgttaaatactgaagtataatttgggggagttataaagttatgataaacattcatctgattattttaaacaatagttgtggtagataaacatactggaggtgagtcaaattgaattcatatagtaacatgcagtctgaagtcctagttacttaataggtactcagcctggagtgaaaatcctgggtactgactttgagaggagtgagtgtgcatgttgtcaaagtttctgaacacagttcacatagccttattagcaaaagttttaagaaatggctctatcaaagaagcaattgcagctttattcagaaatataaaagtggaatttatgtacatgtcataagtggtacccacttcccctttttactgtagggtggataactcttaggatttaactctttgaatattatctcttgaataaagcatgtgttaatgttaacaaacctacgtaa

SEQ ID NO: 161100 - DNA, 1417 bp, Homo sapiens
  Payload ID: 11467
  Gene Symbol: NABP2
  Gene Name: nucleic acid binding protein 2
  Uniprot ID: Q9BQ15
  ENST ID: ENST00000267023
  CDS Start-End: 141-776
aacttccgggaatgtccgcactcccgcgttccacggggcagcatccggcggcagcggagcctgtggctccccctgcgggctgctcagcggcgtgcacagtcctgccggctggcttggtggggtgccgaggctcaggcagcatgacgacggagacctttgtgaaggatatcaagcctgggctcaagaatctgaaccttatcttcattgtgctggagacaggccgagtgaccaagacaaaggacgggcatgaggttcggacctgcaaagtggcggacaaaacaggcagcatcaatatctctgtctgggacgatgttggcaatctgatccagcctggggacattatccggctcaccaaagggtacgcttcagttttcaaaggttgtctgacactatatactggccgtgggggtgatctgcagaagattggagaattctgtatggtttattctgaggttcctaacttcagtgagccaaacccagagtacagcacccagcaggcacccaacaaggcggtgcagaacgacagcaacccttcagcttcccagcctaccactggaccctctgctgcctctccagcctctgagaaccagaatgggaatggactgagtgccccaccaggtcccggtggtggcccacatccccctcatactccctcccacccacccagcacccgaatcactcgaagccagcccaaccacacacctgcaggcccgcctggcccttccagcaaccctgttagtaacggcaaagaaacccggaggagcagcaagagatagcatgacattctttcttcctgccaccaaccacatcccaagtgtcccctggagagcaagatagccttccactgattggctggtgtagcagtattttagccactgaacttcagtggagggtggtgagcagtgtccttatccaccctaatctcatactccctcattgtccagctgaactacctgtcccctgggagtcaggaccctctgcctgctctctttcctctttagaaatggcagttactggctgggcgcagtggctcacgcttgtaatcccagcactttgggaagccgaggtgggcggatcacctgaggtcgggagttcaagaccagcctgaccaacatggagaaaccccgtgtctactaaaaatacagaattagccaggcatggtggcgtatgcctgtaatcccagctacttaggaggctgaggcaggagaatctcttgaaaccgggaggcggaggttgaggtgagccgaaattgcaccattgcactccagcctgggcaataagagcgaaactccatctcaaaaaaaaaagaaagaaagaaagaaagaaagaaagaaatggcagttaccatctgtttcttctgtgtgagacatgggagtctaactgaagtctctccttcctaataaatgttaccactcta

SEQ ID NO: 161101 - DNA, 1411 bp, Homo sapiens
  Payload ID: 11467
  Gene Symbol: NABP2
  Gene Name: nucleic acid binding protein 2
  Uniprot ID: Q9BQ15
  ENST ID: ENST00000341463
  CDS Start-End: 145-780
gggctgctcagcggcgtgcacagtcctgccggctggcttgggtgggtggtgggctgcgggtaggggaggggatggaccgagtcccggcttgtcgggatgagggttccggaagatctggccatggggtgccgaggctcaggcagcatgacgacggagacctttgtgaaggatatcaagcctgggctcaagaatctgaaccttatcttcattgtgctggagacaggccgagtgaccaagacaaaggacgggcatgaggttcggacctgcaaagtggcggacaaaacaggcagcatcaatatctctgtctgggacgatgttggcaatctgatccagcctggggacattatccggctcaccaaagggtacgcttcagttttcaaaggttgtctgacactatatactggccgtgggggtgatctgcagaagattggagaattctgtatggtttattctgaggttcctaacttcagtgagccaaacccagagtacagcacccagcaggcacccaacaaggcggtgcagaacgacagcaacccttcagcttcccagcctaccactggaccctctgctgcctctccagcctctgagaaccagaatgggaatggactgagtgccccaccaggtcccggtggtggcccacatccccctcatactccctcccacccacccagcacccgaatcactcgaagccagcccaaccacacacctgcaggcccgcctggcccttccagcaaccctgttagtaacggcaaagaaacccggaggagcagcaagagatagcatgacattctttcttcctgccaccaaccacatcccaagtgtcccctggagagcaagatagccttccactgattggctggtgtagcagtattttagccactgaacttcagtggagggtggtgagcagtgtccttatccaccctaatctcatactccctcattgtccagctgaactacctgtcccctgggagtcaggaccctctgcctgctctctttcctctttagaaatggcagttactggctgggcgcagtggctcacgcttgtaatcccagcactttgggaagccgaggtgggcggatcacctgaggtcgggagttcaagaccagcctgaccaacatggagaaaccccgtgtctactaaaaatacagaattagccaggcatggtggcgtatgcctgtaatcccagctacttaggaggctgaggcaggagaatctcttgaaaccgggaggcggaggttgaggtgagccgaaattgcaccattgcactccagcctgggcaataagagcgaaactccatctcaaaaaaaaaagaaagaaagaaagaaagaaagaaagaaatggcagttaccatctgtttcttctgtgtgagacatgggagtctaactgaagtctctccttcctaataaatgt

SEQ ID NO: 161102 - DNA, 1775 bp, Homo sapiens
  Payload ID: 11467
  Gene Symbol: NABP2
  Gene Name: nucleic acid binding protein 2
  Uniprot ID: Q9BQ15
  ENST ID: ENST00000380198
  CDS Start-End: 499-1134
ggggcagcatccggcggcagcggagcctgtggctccccctgcgggctgctcagcggcgtgcacagtcctgccggctggcttgggtgggtggtgggctgcgggtaggggaggggatggaccgagtcccggcttgtcgggatgagggttccggaagatctggccagtaagattctactccctggctgtgcaccgggttccctacccctgtctacgtcggctccgccacttcgcggcttgagactaaaagagcatcccggcagggggccttccagccccaaagcagcctgtccagagacccccaaattctgatcctgaagttggaggcctccggggatgttcttttttaatcttttagaagggttagaggggttgaggctgcctgaccccagcctaatggggtaggtaggccttgggaagtggagcatgggggcaaaggatccaagcattgagccttcatcctctattccccatccagtggggtgccgaggctcaggcagcatgacgacggagacctttgtgaaggatatcaagcctgggctcaagaatctgaaccttatcttcattgtgctggagacaggccgagtgaccaagacaaaggacgggcatgaggttcggacctgcaaagtggcggacaaaacaggcagcatcaatatctctgtctgggacgatgttggcaatctgatccagcctggggacattatccggctcaccaaagggtacgcttcagttttcaaaggttgtctgacactatatactggccgtgggggtgatctgcagaagattggagaattctgtatggtttattctgaggttcctaacttcagtgagccaaacccagagtacagcacccagcaggcacccaacaaggcggtgcagaacgacagcaacccttcagcttcccagcctaccactggaccctctgctgcctctccagcctctgagaaccagaatgggaatggactgagtgccccaccaggtcccggtggtggcccacatccccctcatactccctcccacccacccagcacccgaatcactcgaagccagcccaaccacacacctgcaggcccgcctggcccttccagcaaccctgttagtaacggcaaagaaacccggaggagcagcaagagatagcatgacattctttcttcctgccaccaaccacatcccaagtgtcccctggagagcaagatagccttccactgattggctggtgtagcagtattttagccactgaacttcagtggagggtggtgagcagtgtccttatccaccctaatctcatactccctcattgtccagctgaactacctgtcccctgggagtcaggaccctctgcctgctctctttcctctttagaaatggcagttactggctgggcgcagtggctcacgcttgtaatcccagcactttgggaagccgaggtgggcggatcacctgaggtcgggagttcaagaccagcctgaccaacatggagaaaccccgtgtctactaaaaatacagaattagccaggcatggtggcgtatgcctgtaatcccagctacttaggaggctgaggcaggagaatctcttgaaaccgggaggcggaggttgaggtgagccgaaattgcaccattgcactccagcctgggcaataagagcgaaactccatctcaaaaaaaaaagaaagaaagaaagaaagaaagaaagaaatggcagttaccatctgtttcttctgtgtgagacatgggagtctaactgaagtctctccttcctaataaatgttaccactcta

SEQ ID NO: 161103 - DNA, 663 bp, Homo sapiens
  Payload ID: 11467
  Gene Symbol: NABP2
  Gene Name: nucleic acid binding protein 2
  ENST ID: ENST00000399713
  CDS Start-End: 209-663
agccaggagctgcctacgaggagggacgaaggctggccaggcctccactctagacaggaagtctagtctagagtctatatggtcccagccaggactatgtagccatttaggagggagaactctatgttcttcccggcaaaaacgtgtgggcctggccggccacgcttcgctttggaggggtgcagtggggtgccgaggctcaggcagcatgacgacggagacctttgtgaaggatatcaagcctgggctcaagaatctgaaccttatcttcattgtgctggagacaggccgagtgaccaagacaaaggacgggcatgaggttcggacctgcaaagtggcggacaaaacaggcagcatcaatatctctgtctgggacgatgttggcaatctgatccagcctggggacattatccggctcaccaaagggtacgcttcagttttcaaaggttgtctgacactatatactggccgtgggggtgatctgcagaagattggagaattctgtatggtttattctgaggttcctaacttcagtgagccaaacccagagtacagcacccagcaggcacccaacaaggcggtgcagaacgacagcaacccttcagcttcccagcctaccactggaccctctgctgcctctccagcctctgagaaccagaatgg

SEQ ID NO: 161104 - DNA, 770 bp, Homo sapiens
  Payload ID: 11467
  Gene Symbol: NABP2
  Gene Name: nucleic acid binding protein 2
  ENST ID: ENST00000447747
  CDS Start-End: 338-770
agccaggagctgcctacgaggagggacgaaggctggccaggcctccactctagacaggaagtctagtctagagtctatatggtcccagccaggactatgtagccatttaggagggagaactctatgttcttcccggcaaaaacgtgtgggcctggccggccacgcttcgctttggaggggtgcaggttccatttcttccaagaagggtgagcctgccttttgtctctggtgtaaatgccacttttcccagagaccttgaccaagctgggtagtgcattaaagatgagaaccccaaatcaggaacaaagataacgtggggtgccgaggctcaggcagcatgacgacggagacctttgtgaaggatatcaagcctgggctcaagaatctgaaccttatcttcattgtgctggagacaggccgagtgaccaagacaaaggacgggcatgaggttcggacctgcaaagtggcggacaaaacaggcagcatcaatatctctgtctgggacgatgttggcaatctgatccagcctggggacattatccggctcaccaaagggtacgcttcagttttcaaaggttgtctgacactatatactggccgtgggggtgatctgcagaagattggagaattctgtatggtttattctgaggttcctaacttcagtgagccaaacccagagtacagcacccagcaggcacccaacaaggcggtgcagaacgacagcaacccttcagcttcccagcctaccactggaccctctgctgcctctc

SEQ ID NO: 161105 - DNA, 2158 bp, Homo sapiens
  Payload ID: 11468
  Gene Symbol: NUCB1
  Gene Name: nucleobindin 1
  Uniprot ID: Q02818
  ENST ID: ENST00000407032
  CDS Start-End: 65-1450
cgcaccggaggtccttgcccgccctggaaaacgccctctgcggtgaaggagagaccacactgccatgcctccctctgggccccgaggaaccctccttctgttgccgctgctgctgctgctcctgcttcgcgccgtgctggctgtccccctggagcgaggggcgcccaacaaggaggagacccctgcgactgagagtcccgacacaggcctgtactaccaccggtacctccaggaggtcatcgatgtactggagacggatgggcatttccgagagaagctgcaggctgccaatgcggaggacatcaagagcgggaagctgagccgagagctggactttgtcagccaccacgtccgcaccaagctggatgagctcaagcgacaggaggtgtcacggctgcggatgctgctcaaggccaagatggacgccgagcaggatcccaatgtacaggtggatcatctgaatctcctgaaacagtttgaacacctggaccctcagaaccagcatacattcgaggcccgcgacctggagctgctgatccagacggccacccgggaccttgcccagtacgacgcagcccatcatgaagagttcaagcgctacgagatgcttaaggaacacgagagacggcgttatctggagtcactgggagaggagcagagaaaggaggcggagaggaagctggaagagcaacagcgccggcaccgcgagcaccctaaagtcaacgtgcctggcagccaagcccagttgaaggaggtgtgggaggagctggatggactggaccccaacaggtttaaccccaagaccttcttcatactgcatgatatcaacagtgatggtgtcctggatgagcaggagctggaggcactcttcaccaaggagctggagaaagtgtacgacccaaagaatgaggaggacgacatgcgggagatggaggaggagcgactgcgcatgcgggagcatgtgatgaagaatgtggacaccaaccaggaccgcctcgtgaccctggaggagttcctcgcatccactcagaggaaggagtttggggacaccggggagggctgggagacagtggagatgcaccctgcctacaccgaggaagagctgaggcgctttgaagaggagctggctgcccgggaggcagagctgaatgccaaggcccagcgcctcagccaggagacagaggctctagggcggtcccagggccgcctggaggcccagaagagagagctgcagcaggctgtgctgcacatggagcagcggaagcagcagcagcagcagcagcaaggccacaaggccccggctgcccaccctgaggggcagctcaagttccacccagacacagacgatgtacctgtcccagctccagccggtgaccagaaggaggtggacacttcagaaaagaaacttctcgagcggctccctgaggttgaggtgccccagcatctgtgatcctccgggaccccagccctcaggattcctgatgctccaagcctccaagtctgtggctcttcccttctgtcctccgaggggcttgccttctctcgtgtccagtgaggtgctcagtgatcggcttaacttagagaagcccgccccctccccttctccgtctgtcccaagagggtctgctctgagcctgcgttcctaggtggctcggcctcagctgcctgggttgtggccgccctagcatcctgtatgcccacagctactggaatccccgctgctgctccgggccaagcttctggttgattaatgagggcatggggtggtccctcaagaccttcccctaccttttgtggaaccagtgatgcctcaaagacagtgtcccctccacagctgggtgccaggggcaggggatcctcagtatagccggtgaaccctgataccaggagcctgggcctccctgaacccctggcttccagccatctcatcgccagcctcctcctggacctcttggcccccagccccttccccacacagccccagaagggtcccagagctgaccccactccaggacctaggcccagcccctcagcctcatctggagcccctgaagaccagtcccacccacctttctggcctcatctgacactgctccgcatcctgctgtgtgtcctgttccatgttccggttccatccaaatacactttctggaacaaa

SEQ ID NO: 161106 - DNA, 2668 bp, Homo sapiens
  Payload ID: 11468
  Gene Symbol: NUCB1
  Gene Name: nucleobindin 1
  Uniprot ID: Q02818
  ENST ID: ENST00000405315
  CDS Start-End: 335-1720
gcggaagttatttttcccccggccggcagggagttgtagttatctttgaaagccttctctctcttttggcataggcgggaaatgtggcgtcaagaggctgggattccgagaaagaagcgaggctttcacgaaaatgcgagcggcttcggcaaggggcggggccgctggacgtggatgaaagctacagagccagcgtggaccaatcagacctctttggggcggggcctctgtggataagtgggcgtggtctaggggggaagtcaccaagaacgcaccggaggtccttgcccgccctggaaaacgccctctgcggtgaaggagagaccacactgccatgcctccctctgggccccgaggaaccctccttctgttgccgctgctgctgctgctcctgcttcgcgccgtgctggctgtccccctggagcgaggggcgcccaacaaggaggagacccctgcgactgagagtcccgacacaggcctgtactaccaccggtacctccaggaggtcatcgatgtactggagacggatgggcatttccgagagaagctgcaggctgccaatgcggaggacatcaagagcgggaagctgagccgagagctggactttgtcagccaccacgtccgcaccaagctggatgagctcaagcgacaggaggtgtcacggctgcggatgctgctcaaggccaagatggacgccgagcaggatcccaatgtacaggtggatcatctgaatctcctgaaacagtttgaacacctggaccctcagaaccagcatacattcgaggcccgcgacctggagctgctgatccagacggccacccgggaccttgcccagtacgacgcagcccatcatgaagagttcaagcgctacgagatgcttaaggaacacgagagacggcgttatctggagtcactgggagaggagcagagaaaggaggcggagaggaagctggaagagcaacagcgccggcaccgcgagcaccctaaagtcaacgtgcctggcagccaagcccagttgaaggaggtgtgggaggagctggatggactggaccccaacaggtttaaccccaagaccttcttcatactgcatgatatcaacagtgatggtgtcctggatgagcaggagctggaggcactcttcaccaaggagctggagaaagtgtacgacccaaagaatgaggaggacgacatgcgggagatggaggaggagcgactgcgcatgcgggagcatgtgatgaagaatgtggacaccaaccaggaccgcctcgtgaccctggaggagttcctcgcatccactcagaggaaggagtttggggacaccggggagggctgggagacagtggagatgcaccctgcctacaccgaggaagagctgaggcgctttgaagaggagctggctgcccgggaggcagagctgaatgccaaggcccagcgcctcagccaggagacagaggctctagggcggtcccagggccgcctggaggcccagaagagagagctgcagcaggctgtgctgcacatggagcagcggaagcagcagcagcagcagcagcaaggccacaaggccccggctgcccaccctgaggggcagctcaagttccacccagacacagacgatgtacctgtcccagctccagccggtgaccagaaggaggtggacacttcagaaaagaaacttctcgagcggctccctgaggttgaggtgccccagcatctgtgatcctccgggaccccagccctcaggattcctgatgctccaaggcgactgatgggcgctggatgaagtggcacagtcagcttccctgggggctggtgtcatgttgggctcctggggcgggggcacggcctggcatttcacgcattgctgccaccccaggtccacctgtctccactttcacagcctccaagtctgtggctcttcccttctgtcctccgaggggcttgccttctctcgtgtccagtgaggtgctcagtgatcggcttaacttagagaagcccgccccctccccttctccgtctgtcccaagagggtctgctctgagcctgcgttcctaggtggctcggcctcagctgcctgggttgtggccgccctagcatcctgtatgcccacagctactggaatccccgctgctgctccgggccaagcttctggttgattaatgagggcatggggtggtccctcaagaccttcccctaccttttgtggaaccagtgatgcctcaaagacagtgtcccctccacagctgggtgccaggggcaggggatcctcagtatagccggtgaaccctgataccaggagcctgggcctccctgaacccctggcttccagccatctcatcgccagcctcctcctggacctcttggcccccagccccttccccacacagccccagaagggtcccagagctgaccccactccaggacctaggcccagcccctcagcctcatctggagcccctgaagaccagtcccacccacctttctggcctcatctgacactgctccgcatcctgctgtgtgtcctgttccatgttccggttccatccaaatacactttctggaacaaatgcatggctccatgcctgtgtatctggactggtccctccaaaacgctattgccacgtcacctgccggagtcctcatctttgaagactggattcaagcatca

SEQ ID NO: 161107 - DNA, 864 bp, Homo sapiens
  Payload ID: 11468
  Gene Symbol: NUCB1
  Gene Name: nucleobindin 1
  ENST ID: ENST00000452087
  CDS Start-End: 62-864
accggaggtccttgcccgccctggaaaacgccctctgcggtgaaggagagaccacactgccatgcctccctctgggccccgaggaaccctccttctgttgccgctgctgctgctgctcctgcttcgcgccgtgctggctgtccccctggagcgaggggcgcccaacaaggaggagacccctgcgactgagagtcccgacacaggcctgtactaccaccggtacctccaggaggtcatcgatgtactggagacggatgggcatttccgagagaagctgcaggctgccaatgcggaggacatcaagagcgggaagctgagccgagagctggactttgtcagccaccacgtccgcaccaagctggatgagctcaagcgacaggaggtgtcacggctgcggatgctgctcaaggccaagatggacgccgagcaggatcccaatgtacaggtggatcatctgaatctcctgaaacagtttgaacacctggaccctcagaaccagcatacattcgaggcccgcgacctggagctgctgatccagacggccacccgggaccttgcccagtacgacgcagcccatcatgaagagttcaagcgctacgagatgcttaaggaacacgagagacggcgttatctggagtcactgggagaggagcagagaaaggaggcggagaggaagctggaagagcaacagcgccggcaccgcgagcaccctaaagtcaacgtgcctggcagccaagcccagttgaaggaggtgtgggaggagctggatggactggaccccaacagggaccttacacatcccgtcctcggtcccctgagataccttgctatcctcttcccttcagatatcaacagtgatggtgt

SEQ ID NO: 161108 - DNA, 884 bp, Homo sapiens
  Payload ID: 11468
  Gene Symbol: NUCB1
  Gene Name: nucleobindin 1
  ENST ID: ENST00000424608
  CDS Start-End: 1-884
tgcctccctctgggccccgaggaaccctccttctgttgccgctgctgctgctgctcctgcttcgcgccgtgctggctgtccccctggagcgaggggcgcccaacaaggaggagacccctgcgactgagagtcccgacacaggcctgtactaccaccggtacctccaggaggtcatcgatgtactggagacggatgggcatttccgagagaagctgcaggctgccaatgcggaggacatcaagagcgggaagctgagccgagagctggactttgtcagccaccacgtccgcaccaagctggatgagctcaagcgacaggagtttgaacacctggaccctcagaaccagcatacattcgaggcccgcgacctggagctgctgatccagacggccacccgggaccttgcccagtacgacgcagcccatcatgaagagttcaagcgctacgagatgcttaaggaacacgagagacggcgttatctggagtcactgggagaggagcagagaaaggaggcggagaggaagctggaagagcaacagcgccggcaccgcgagcaccctaaagtcaacgtgcctggcagccaagcccagttgaaggaggtgtgggaggagctggatggactggaccccaacaggtttaaccccaagaccttcttcatactgcatgatatcaacagtgatggtgtcctggatgagcaggagctggaggcactcttcaccaaggagctggagaaagtgtacgacccaaagaatgaggaggacgacatgcgggagatggaggaggagcgactgcgcatgcgggagcatgtgatgaagaatgtggacaccaaccaggaccgcctcgtgaccctggaggagttcctcgcatccactcagaggaaggag

SEQ ID NO: 161109 - DNA, 563 bp, Homo sapiens
  Payload ID: 11468
  Gene Symbol: NUCB1
  Gene Name: nucleobindin 1
  ENST ID: ENST00000451312
  CDS Start-End: 232-563
gagcgtgttgggagccaggacccctgggtctgagggcccagactcctgtgtcggaggaagggaaggccggaggcctggaatcctggggcctgggtaacaaaatgcttgtgtcttgattcttggaagtgggggcggcgctgggggcccgaactcctggttccaggggaggaagaggcttgggacagacattatgcattatccagccctccatcccccacagaccacactgccatgcctccctctgggccccgaggaaccctccttctgttgccgctgctgctgctgctcctgcttcgcgccgtgctggctgtccccctggagcgaggggcgcccaacaaggaggagacccctgcgactgagagtcccgacacaggcctgtactaccaccggtacctccaggaggtcatcgatgtactggagacggatgggcatttccgagagaagctgcaggctgccaatgcggaggacatcaagagcgggaagctgagccgagagctggactttgtcagccaccacgtccgcaccaagctggatgagctcaagcgacaggaggtgtcacggct

SEQ ID NO: 161110 - DNA, 551 bp, Homo sapiens
  Payload ID: 11468
  Gene Symbol: NUCB1
  Gene Name: nucleobindin 1
  ENST ID: ENST00000443560
  CDS Start-End: 30-257
ctctgcggtgaaggagagaccacactgccatgcctccctctgggccccgaggaaccctccttctgttgccgctgctgctgctgctcctgcttcgcgccgtgctggctgtccccctggagcgaggggcgcccaacaaggaggagacccctgcgactgagagtcccgtgagtggccctgccctgctatccagccaggtgtttgcagtggtactacagctcctgcagaccccggtgcccgtagggcggatgctccagtgacttcctggccctacagttgtagcttgttttttgcccaccattcctcccagcagcaggggtttgacttggtgaaaaactggaggtccctgactctgaggacacaggcctgtactaccaccggtacctccaggaggtcatcgatgtactggagacggatgggcatttccgagagaagctgcaggctgccaatgcggaggacatcaagagcgggaagctgagccgagagctggactttgtcagccaccacgtccgcaccaagctggatgagctcaagcgacaggaggtgtcacggct

SEQ ID NO: 161111 - DNA, 673 bp, Homo sapiens
  Payload ID: 11468
  Gene Symbol: NUCB1
  Gene Name: nucleobindin 1
  ENST ID: ENST00000411700
  CDS Start-End: 301-673
gaggtgagaggccagggttcccatactcttgggtcctagggaggatgggggccagagggctggaaaactgggtcccggaggaggatgcactgggtgccagtactttaggtcctgggaaaagaggaggctgggaccctggactcttgggtctgggggaggaggcggccgagatcccggattcctgagtgtgagagaggagcgtgttgggagccaggacccctgggtctgagggcccagactcctgtgtcggaggaagggaaggccggaggcctggaatcctggggcctggaccacactgccatgcctccctctgggccccgaggaaccctccttctgttgccgctgctgctgctgctcctgcttcgcgccgtgctggctgtccccctggagcgaggggcgcccaacaaggaggagacccctgcgactgagagtcccgacacaggcctgtactaccaccggtacctccaggaggtcatcgatgtactggagacggatgggcatttccgagagaagctgcaggctgccaatgcggaggacatcaagagcgggaagctgagccgagagctggactttgtcagccaccacgtccgcaccaagctggatgagctcaagcgacaggaggtgtcacggctgcggatgctgctcaaggccaagatggacgccgagcaggatc

SEQ ID NO: 161112 - DNA, 1905 bp, Homo sapiens
  Payload ID: 11469
  Gene Symbol: NUCB2
  Gene Name: nucleobindin 2
  ENST ID: ENST00000323688
  CDS Start-End: 244-1506
agcggagcggtgggccgggggctggaggacaggtttgtgcgctggacgcaagcaccaggcgcagcctcgctcgccgagacccggccagaacgtgttacgagtcagtttttagtgaaaaaacattgagctaggagccaagacccatctcttcactattttggtattgtgcaagtcatcttacctctctggatctcagttgtctcatctgtaaaaaggagataaaaattatttacctgcctgaacatgaggtggaggaccatcctgctacagtattgctttctcttgattacatgtttacttactgctcttgaagctgtgcctattgacatagacaagacaaaagtacaaaatattcaccctgtggaaagtgcgaagatagaaccaccagatactggactttattatgatgaatatctcaagcaagtgattgatgtgctggaaacagataaacacttcagagaaaagctccagaaagcagacatagaggaaataaagagtgggaggctaagcaaagaactggatttagtaagtcaccatgtgaggacaaaacttgatgaactgaaaaggcaagaagtaggaaggttaagaatgttaattaaagctaagttggattcccttcaagatataggcatggaccaccaagctcttctaaaacaatttgatcacctaaaccacctgaatcctgacaagtttgaatccacagatttagatatgctaatcaaagcggcaacaagtgatctggaacactatgacaagactcgtcatgaagaatttaaaaaatatgaaatgatgaaggaacatgaaaggagagaatatttaaaaacattgaatgaagaaaagagaaaagaagaagagtctaaatttgaagaaatgaagaaaaagcatgaaaatcaccctaaagttaatcacccaggaagcaaagatcaactaaaagaggtatgggaagagactgatggattggatcctaatgactttgaccccaagacatttttcaaattacatgatgtcaatagtgatggattcctggatgaacaagaattagaagccctatttactaaagagttggagaaagtatatgaccctaaaaatgaagaggatgatatggtagaaatggaagaagaaaggcttagaatgagggaacatgtaatgaatgaggttgatactaacaaagacagattggtgactctggaggagtttttgaaagccacagaaaaaaaagaattcttggagccagatagctgggagacattagatcagcaacagttcttcacagaggaagaactaaaagaatatgaaaatattattgctttacaagaaaatgaacttaagaagaaggcagatgagcttcagaaacaaaaagaagagctacaacgtcagcatgatcaactggaggctcagaagctggaatatcatcaggtcatacagcagatggaacaaaaaaaattacaacaaggaattcctccatcagggccagctggagaattgaagtttgagccacgtgtgtaattttgtttgattatttatttaggaaaataaattattttatcaattgaaatccacatttattacaaatataatttcaaatcattaagatgttatgttattttttgtgtattttttgtggtattagagcaatttagattatagaaaaatgaaaatgcctccaaaagttttatgtagcagcaaattttaagtgctgtatcatttgtataatttgataaccatatttatggtaaaatgatttatttcaactttatttgtaattctttctaattatattaatcttaccagagaatatgttttttaaaattgtgatctatgattagctaagcatattttttaaaacaagtatatttgtatatgaaggaacatttagaataaaggaagatacttttaaaataagaa

SEQ ID NO: 161113 - DNA, 1279 bp, Homo sapiens
  Payload ID: 11469
  Gene Symbol: NUCB2
  Gene Name: nucleobindin 2
  ENST ID: ENST00000458064
  CDS Start-End: 3-1175
agatgaggtggaggaccatcctgctacagtattgctttctcttgattacatgtttacttactgctcttgaagctgtgcctattgacatagacaagacaaaagtacaaaatattcaccctgtggaaagtgcgaagatagaaccaccagatactggactttattatgatgaatatctcaagcaagtgattgatgtgctggaaacagataaacacttcagagaaaagctccagaaagcagacatagaggaaataaagagtgggaggctaagcaaagaactggatttagtaagtcaccatgtgaggacaaaacttgatgaactgaaaaggcaagaagtaggaaggttaagaatgttaattaaagctaagttggattcccttcaagatataggcatggaccaccaagctcttctaaaacaatttgatcacctaaaccacctgaatcctgacaagtttgaatccacagatttagatatgctaatcaaagcggcaacaagtgatctggaacactatgacaagactcgtcatgaagaatttaaaaaatatgaaatgatgaaggaacatgaaaggagagaatatttaaaaacattgaatgaagaaaagagaaaagaagaagagtctaaatttgaagaaatgaagaaaaagcatgaaaatcaccctaaagttaatcacccaggaagcaaagatcaactaaaagaggtatgggaagagactgatggattggatcctaatgactttgaccccaagacatttttcaaattacatgatgtcaatagtgatggattcctggatgaacaagaattagaagccctatttactaaagagttggagaaagtatatgaccctaaaaatgaagaggatgatatggtagaaatggaagaagaaaggcttagaatgagggaacatgtaatgaatgagacattagatcagcaacagttcttcacagaggaagaactaaaagaatatgaaaatattattgctttacaagaaaatgaacttaagaagaaggcagatgagcttcagaaacaaaaagaagagctacaacgtcagcatgatcaactggaggctcagaagctggaatatcatcaggtcatacagcagatggaacaaaaaaaattacaacaaggaattcctccatcagggccagctggagaattgaagtttgagccacacatttaaagtctgaagtccaccagaacttggaagaaagctgttaactcaacatctatttcatctttttagctcccttcctttttctctgctcaataaatattttaaaagca

SEQ ID NO: 161114 - DNA, 530 bp, Homo sapiens
  Payload ID: 11469
  Gene Symbol: NUCB2
  Gene Name: nucleobindin 2
  ENST ID: ENST00000528644
  CDS Start-End: 430-530
ctctcccgaggaatgctgagcaggctctggacgcctctccgtgcacaccccagacctggggaggggagctctccggacaccccagctggccgcccctcgggccctgagtccgaagacccgctaaacagggcccgggcactgaagtaccctattgttctcatcccctctcccgggaccccgcaccctcctccatctaggctgaggttcccagatttgtgtcttggcccctggcggcgccgagattactttgtgattggaagactgaaaggaacagaacgtgttacgagtcagtttttagtgaaaaaacattgagctaggagccaagacccatctcttcactattttggtattgtgcaagtcatcttacctctctggatctcagttgtctcatctgtaaaaaggagataaaaattatttacctgcctgaacatgaggtggaggaccatcctgctacagtattgctttctcttgattacatgtttacttactgctcttgaagctgtgcctattgacatagacaagacaaaagt

SEQ ID NO: 161115 - DNA, 463 bp, Homo sapiens
  Payload ID: 11469
  Gene Symbol: NUCB2
  Gene Name: nucleobindin 2
  ENST ID: ENST00000530964
  CDS Start-End: 362-463
aaggccggtggccgcgcgaacgtgttacgagtcagtttttagtgaaaaaacattgagctaggagccaagacccatctcttcactattttggtattgtgcaagtcatcttacctctctggatctcagttgtctcatctgtaaaaaggagataaaaattatttacctgcctgaacctctgaaatctgtaagctgtgataaccactcatagaagcttctataatttgccatggcagagatataagtctgactattaactacagaaggaaataatcttcatgtccgtatctctcttatgaaagaagagggtgataaaggaaaggagaaggccattcttactgacctgatagtggaagaaaagtagatgaggtggaggaccatcctgctacagtattgctttctcttgattacatgtttacttactgctcttgaagctgtgcctattgacatagacaagacaaaagta

SEQ ID NO: 161116 - DNA, 937 bp, Homo sapiens
  Payload ID: 11469
  Gene Symbol: NUCB2
  Gene Name: nucleobindin 2
  ENST ID: ENST00000529313
  CDS Start-End: 352-937
tcccagcgcgagccggaggcgctgggttccctctgctccactcgcagctgggcacccgagctttcttcggggtcgaggagggtggctggctcttggcggggagcaggagaggaacgtgttacgagtcagtttttagtgaaaaaacattgagctaggagccaagacccatctcttcactattttggtattgtgcaagtcatcttacctctctggatctcagttgtctcatctgtaaaaaggagataaaaattatttacctgcctgaacgtccgtatctctcttatgaaagaagagggtgataaaggaaaggagaaggccattcttactgacctgatagtggaagaaaagtagatgaggtggaggaccatcctgctacagtattgctttctcttgattacatgtttacttactgctcttgaagctgtgcctattgacatagacaagacaaaagtacaaaatattcaccctgtggaaagtgcgaagatagaaccaccagatactggactttattatgatgaatatctcaagcaagtgattgatgtgctggaaacagataaacacttcagagaaaagctccagaaagcagacatagaggaaataaagagtgggaggctaagcaaagaactggatttagtaagtcaccatgtgaggacaaaacttgatgaactgaaaaggcaagaagtaggaaggttaagaatgttaattaaagctaagttggattcccttcaagatataggcatggaccaccaagctcttctaaaacaatttgatcacctaaaccacctgaatcctgacaagtttgaatccacagatttagatatgctaatcaaagcggcaacaagtgatctggaacactatgacaagactcgtcatgaagaatttaaaaaatatgaaatgatgaaggaacatgaaaggagagaatatttaaaaacattga

SEQ ID NO: 161117 - DNA, 317 bp, Homo sapiens
  Payload ID: 11469
  Gene Symbol: NUCB2
  Gene Name: nucleobindin 2
  ENST ID: ENST00000527735
  CDS Start-End: 1-220
agaagaaaggcttagaatgagggaacatgtaatgaatgaggttgatactaacaaagacagattggtgactctggaggagtttttgaaagccacagaaaaaaaagaattcttggagccagatagctgggaggtcatacagcagatggaacaaaaaaaattacaacaaggaattcctccatcagggccagctggagaattgaagtttgagccacacatttaaagtctgaagtccaccagaacttggaagaaagctgttaactcaacatctatttcatctttttagctcccttcctttttctctgctcaataaatatttt

SEQ ID NO: 161118 - DNA, 498 bp, Homo sapiens
  Payload ID: 11469
  Gene Symbol: NUCB2
  Gene Name: nucleobindin 2
  ENST ID: ENST00000533926
  CDS Start-End: 229-498
actcgcagctgggcacccgagctttcttcggggtcgaggagggtggctggctcttggcggggagcaggagaggaacgtgttacgagtcagtttttagtgaaaaaacattgagctaggagccaagacccatctcttcactattttggtattgtgcaagtcatcttacctctctggatctcagttgtctcatctgtaaaaaggagataaaaattatttacctgcctgaacatgaggtggaggaccatcctgctacagtattgctttctcttgattacatgtttacttactgctcttgaagctgtgcctattgacatagacaagacaaaagtacaaaatattcaccctgtggaaagtgcgaagatagaaccaccagatactggactttattatgatgaatatctcaagcaagtgattgatgtgctggaaacagataaacacttcagagaaaagctccagaaagcagacatagaggaaataaagagtgggaggctaagcaaa

SEQ ID NO: 161119 - DNA, 1839 bp, Homo sapiens
  Payload ID: 11469
  Gene Symbol: NUCB2
  Gene Name: nucleobindin 2
  ENST ID: ENST00000533773
  CDS Start-End: 349-1365
aaaaaaactaatcggcaggatgaaacttcgtaaacagcctgtggctccaaaagcttctggaaggctcaagctacccatgtgcatctttgagcctcagtttccccatctttaaaatgaggggtttggaatagatgtctgttctctggggcaggatgcagaggaaagagctgtctgcgaatgggcaagagagaagaacgtgttacgagtcagtttttagtgaaaaaacattgagctaggagccaagacccatctcttcactattttggtattgtgcaagtcatcttacctctctggatctcagttgtctcatctgtaaaaaggagataaaaattatttacctgcctgaacatgaggtggaggaccatcctgctacagtattgctttctcttgattacatgtttacttactgctcttgaagctgtgcctattgacatagacaagacaaaagtacaaaatattcaccctgtggaaagtgcgaagatagaaccaccagatactggactttattatgatgaatatctcaagcaagtgattgatgtgctggaaacagataaacacttcagagaaaagctccagaaagcagacatagaggaaataaagagtgggaggctaagcaaagaactggatttagtaagtcaccatgtgaggacaaaacttgatgaactgaaaaggcaagaagtaggaaggttaagaatgttaattaaagctaagttggattcccttcaagatataggcatggaccaccaagctcttctaaaacaatttgatcacctaaaccacctgaatcctgacaagtttgaatccacagatttagatatgctaatcaaagcggcaacaagtgatctggaacactatgacaagactcgtcatgaagaatttaaaaaatatgaaatgatgaaggaacatgaaaggagagaatatttaaaaacattgaatgaagaaaagagaaaagaagaagagtctaaatttgaagaaatgaagaaaaagcatgaaaatcaccctaaagttaatcacccaggaagcaaagatcaactaaaagaggtatgggaagagactgatggattggatcctaatgactttgaccccaagacatttttcaaattacatgatgtcaatagtgatggattcctggatgaacaagaattagaagccctatttactaaagagttggagaaagtatatgaccctaaaaatgaagaggatgatatggtagaaatggaagaagaaaggcttagaatgagggaacatgtaatgaatgaggttgatactaacaaagacagattggtgactctggaggagtttttgaaagccacagaaaaaaaagaattcttggagccagatagctgggagtctccttccatctgaaacaatcaagaggacagactattatgttgtacaatgtcccttgaataccacagaagagatgctcagtgtatcctattagaaggcacatgttgacgatccccataactgacattagatcagcaacagttcttcacagaggaagaactaaaagaatatgaaaatattattgctttacaagaaaatgaacttaagaagaaggcagatgagcttcagaaacaaaaagaagagctacaacgtcagcatgatcaactggaggctcagaagctggaatatcatcaggtcatacagcagatggaacaaaaaaaattacaacaaggaattcctccatcagggccagctggagaattgaagtttgagccacacatttaaagtctgaagtccaccagaacttggaagaaagctgttaactcaacatctatttcatctttttagctcccttcctttttctctgctcaataaatattttaaaagcat

SEQ ID NO: 161120 - DNA, 1837 bp, Homo sapiens
  Payload ID: 11469
  Gene Symbol: NUCB2
  Gene Name: nucleobindin 2
  ENST ID: ENST00000530527
  CDS Start-End: 1242-1837
atattattgcaagcctttgcacatctctttgtatcatccccctatgacatcatgtgttaatctcatctcaggactgcaacccaagattgcagtgagtgggaagatacaatttttacagcatcaccaaaaaggataaggttatttggagatggggacttgctatgttgctcaggctggtttcgaactcttggcctcaagtgattttcctgccttggcctctcaaaacacaggaatgcaggtcaaacacattttgagtttctcagctgagccaaaggaaatcaagaaatctcctggaatcaaggaaatcaaggaatcaattacttacaccaagctgagcaagagacaacatgaaggcagaggtagcagtaatcagacaggatttccaagacagggtctcactctgtggcacaatgatcatggttcactgcagcctcggccttctgagctcaagtgatcctcccgcctctgcctccgcctcctgagtagctgggactacagatgtgcgacacagcacctggcaaatttttaagtattttcttcagactgaaacatcattgtgttaaagataaaaaagtaaaaaatattcttgtagagataggatctcactgttgtccagattggtctcaaatttttgagctcaagccatcctcctgccttggcctcccaaagtgctggcattacagggtgaaaaaaactaatcggcaggatgaaacttcgtaaacagcctgtggctccaaaagcttctggaaggctcaagctacccatgtgcatctttgagcctcagtttccccatctttaaaatgaggggtttggaatagatgtctgttctctggggcaggatgcagaggaaagagctgtctgcgaatgggcaagagagaagaacgtgttacgagtcagtttttagtgaaaaaacattgagctaggagccaagacccatctcttcactattttggtattgtgcaagtcatcttacctctctggatctcagttgtctcatctgtaaaaaggagataaaaattatttacctgcctgaacgtccgtatctctcttatgaaagaagagggtgataaaggaaaggagaaggccattcttactgacctgatagtggaagaaaaatttctccttaaaaatatcagtcttggccgggcacggtggctcaggcctgtaatcccagcactttgggaggctgaggcgggcagatcacctgaggtcaggagttcaagaccagcctggccaacatgatgaggtggaggaccatcctgctacagtattgctttctcttgattacatgtttacttactgctcttgaagctgtgcctattgacatagacaagacaaaagtacaaaatattcaccctgtggaaagtgcgaagatagaaccaccagatactggactttattatgatgaatatctcaagcaagtgattgatgtgctggaaacagataaacacttcagagaaaagctccagaaagcagacatagaggaaataaagagtgggaggctaagcaaagaactggatttagtaagtcaccatgtgaggacaaaacttgatgaactgaaaaggcaagaagtaggaaggttaagaatgttaattaaagctaagttggattcccttcaagatataggcatggaccaccaagctcttctaaaacaatttgatcacctaaaccacctgaatcctgacaagtttgaatccacagatttagatatgctaatcaaagcggcaacaagtgatctggaacactatgacaagactcgtcatgaagaatttaaaaaatatgaaatgatgaaggaacatgaaaggagagaatatttaaaaacattgaatgaagaaaa

SEQ ID NO: 161121 - DNA, 534 bp, Homo sapiens
  Payload ID: 11469
  Gene Symbol: NUCB2
  Gene Name: nucleobindin 2
  ENST ID: ENST00000533738
  CDS Start-End: 328-534
agcggagcggtgggccgggggctggaggacaggtttgtgcgctggacgcaagcaccaggcgcagcctcgctcgccgagacccggccagaacgtgttacgagtcagtttttagtgaaaaaacattgagctaggagccaagacccatctcttcactattttggtattgtgcaagtcatcttacctctctggatctcagttgtctcatctgtaaaaaggagataaaaattatttacctgcctgaacgtccgtatctctcttatgaaagaagagggtgataaaggaaaggagaaggccattcttactgacctgatagtggaagaaaagtagatgaggtggaggaccatcctgctacagtattgctttctcttgattacatgtttacttactgctcttgaagctgtgcctattgacatagacaagacaaaagtacaaaatattcaccctgtggaaagtgcgaagatagaaccaccagatactggactttattatgatgaatatctcaagcaagtgattgatgtgctggaaacagataaa

SEQ ID NO: 161122 - DNA, 701 bp, Homo sapiens
  Payload ID: 11469
  Gene Symbol: NUCB2
  Gene Name: nucleobindin 2
  ENST ID: ENST00000527580
  CDS Start-End: 1-595
aacattgaatgaagaaaagagaaaagaagaagagtctaaatttgaagaaatgaagaaaaagcatgaaaatcaccctaaagttaatcacccaggaagcaaagatcaactaaaagaggtatgggaagagactgatggattggatcctaatgactttgaccccaagacatttttcaaattacatgatgtcaatagtgatggattcctggatgaacaagaattagaagccctatttactaaagagttggagaaagtatatgaccctaaaaatgaagaggatgatatggtagaaatggaagaagaaaggcttagaatgagggaacatgtaatgaatgagacattagatcagcaacagttcttcacagaggaagaactaaaagaatatgaaaatattattgctttacaagaaaatgaacttaagaagaaggcagatgagcttcagaaacaaaaagaagagctacaacgtcagcatgatcaactggaggctcagaagctggaatatcatcaggtcatacagcagatggaacaaaaaaaattacaacaaggaattcctccatcagggccagctggagaattgaagtttgagccacacatttaaagtctgaagtccaccagaacttggaagaaagctgttaactcaacatctatttcatctttttagctcccttcctttttctctgctcaataaatattttaaaagcata

SEQ ID NO: 161123 - DNA, 514 bp, Homo sapiens
  Payload ID: 11469
  Gene Symbol: NUCB2
  Gene Name: nucleobindin 2
  ENST ID: ENST00000531172
  CDS Start-End: 397-514
ggggcagagcggagcggtgggccgggggctggaggacaggtttgtgcgctggacgcaagcaccaggcgcagcctcgctcgccgagacccggccaggtaaggccggtggccgcgcgaacgtgttacgagtcagtttttagtgaaaaaacattgagctaggagccaagacccatctcttcactattttggtattgtgcaagtcatcttacctctctggatctcagttgtctcatctgtaaaaaggagataaaaattatttacctgcctgaacatttctccttaaaaatatcagtcttggccgggcacggtggctcaggcctgtaatcccagcactttgggaggctgaggcgggcagatcacctgaggtcaggagttcaagaccagcctggccaacatgatgaggtggaggaccatcctgctacagtattgctttctcttgattacatgtttacttactgctcttgaagctgtgcctattgacatagacaagacaaaagtacaaaatattcaccctg

SEQ ID NO: 161124 - DNA, 496 bp, Homo sapiens
  Payload ID: 11469
  Gene Symbol: NUCB2
  Gene Name: nucleobindin 2
  ENST ID: ENST00000526120
  CDS Start-End: 290-496
agtttctcagctgagccaaaggaaatcaagaaatctcctggaatcaaggaaatcaaggaatcaattacttacaccaagctgagcaagagacaacatgaaggcagaggtagcagtaatcagacaggatttccaagaacgtgttacgagtcagtttttagtgaaaaaacattgagctaggagccaagacccatctcttcactattttggtattgtgcaagtcatcttacctctctggatctcagttgtctcatctgtaaaaaggagataaaaattatttacctgcctgaacatgaggtggaggaccatcctgctacagtattgctttctcttgattacatgtttacttactgctcttgaagctgtgcctattgacatagacaagacaaaagtacaaaatattcaccctgtggaaagtgcgaagatagaaccaccagatactggactttattatgatgaatatctcaagcaagtgattgatgtgctggaaacagataaa

SEQ ID NO: 161125 - DNA, 2274 bp, Homo sapiens
  Payload ID: 11469
  Gene Symbol: NUCB2
  Gene Name: nucleobindin 2
  ENST ID: ENST00000529010
  CDS Start-End: 220-1482
gaggacaggtttgtgcgctggacgcaagcaccaggcgcagcctcgctcgccgagacccggccagaacgtgttacgagtcagtttttagtgaaaaaacattgagctaggagccaagacccatctcttcactattttggtattgtgcaagtcatcttacctctctggatctcagttgtctcatctgtaaaaaggagataaaaattatttacctgcctgaacatgaggtggaggaccatcctgctacagtattgctttctcttgattacatgtttacttactgctcttgaagctgtgcctattgacatagacaagacaaaagtacaaaatattcaccctgtggaaagtgcgaagatagaaccaccagatactggactttattatgatgaatatctcaagcaagtgattgatgtgctggaaacagataaacacttcagagaaaagctccagaaagcagacatagaggaaataaagagtgggaggctaagcaaagaactggatttagtaagtcaccatgtgaggacaaaacttgatgaactgaaaaggcaagaagtaggaaggttaagaatgttaattaaagctaagttggattcccttcaagatataggcatggaccaccaagctcttctaaaacaatttgatcacctaaaccacctgaatcctgacaagtttgaatccacagatttagatatgctaatcaaagcggcaacaagtgatctggaacactatgacaagactcgtcatgaagaatttaaaaaatatgaaatgatgaaggaacatgaaaggagagaatatttaaaaacattgaatgaagaaaagagaaaagaagaagagtctaaatttgaagaaatgaagaaaaagcatgaaaatcaccctaaagttaatcacccaggaagcaaagatcaactaaaagaggtatgggaagagactgatggattggatcctaatgactttgaccccaagacatttttcaaattacatgatgtcaatagtgatggattcctggatgaacaagaattagaagccctatttactaaagagttggagaaagtatatgaccctaaaaatgaagaggatgatatggtagaaatggaagaagaaaggcttagaatgagggaacatgtaatgaatgaggttgatactaacaaagacagattggtgactctggaggagtttttgaaagccacagaaaaaaaagaattcttggagccagatagctgggagacattagatcagcaacagttcttcacagaggaagaactaaaagaatatgaaaatattattgctttacaagaaaatgaacttaagaagaaggcagatgagcttcagaaacaaaaagaagagctacaacgtcagcatgatcaactggaggctcagaagctggaatatcatcaggtcatacagcagatggaacaaaaaaaattacaacaaggaattcctccatcagggccagctggagaattgaagtttgagccacacatttaaagtctgaagtccaccagaacttggaagaaagctgttaactcaacatctatttcatctttttagctcccttcctttttctctgctcaataaatattttaaaagcatatttgaaataaagggagatactttttaaatgaaaacactttttttgggacacagatattaaaggattgaagtttatcagaaccaggaagaaaacaaactcactgtctgctctctgctctcacattcacacggctcttttatttatttttttgttctcctttaatgatttaattaagtggctttatgccataatttagtgaaactattaggaactatttaagtgagaaaactctgcctcttgcttttaaattagattgctctcacttactcgtaaacataggtattcttttatgggtgcttatcattccttctttcaataaatgtctgtttgatattaacaattctggaaaggccacagtatttccctgtgtttcctggtaacgtttttctagttttggcaacctcaactgctagaaattcttcacctgaatcacttttgctaccacttcaggtcatttttcattcttttttattttgctctatactttatcatttaagattaggttatgttacatataacagaaaaaacaaagataacagtggtttaaactaaataggagtttttcttcttacataagtctagaagtaggtggtgtccaggttcctatctttctgctctgctatcctcagtgcatgatttttatcctcagattacctcactctcactgttcaagtttgctcctggag

SEQ ID NO: 161126 - DNA, 1369 bp, Homo sapiens
  Payload ID: 11469
  Gene Symbol: NUCB2
  Gene Name: nucleobindin 2
  ENST ID: ENST00000622082
  CDS Start-End: 3-1265
agatgaggtggaggaccatcctgctacagtattgctttctcttgattacatgtttacttactgctcttgaagctgtgcctattgacatagacaagacaaaagtacaaaatattcaccctgtggaaagtgcgaagatagaaccaccagatactggactttattatgatgaatatctcaagcaagtgattgatgtgctggaaacagataaacacttcagagaaaagctccagaaagcagacatagaggaaataaagagtgggaggctaagcaaagaactggatttagtaagtcaccatgtgaggacaaaacttgatgaactgaaaaggcaagaagtaggaaggttaagaatgttaattaaagctaagttggattcccttcaagatataggcatggaccaccaagctcttctaaaacaatttgatcacctaaaccacctgaatcctgacaagtttgaatccacagatttagatatgctaatcaaagcggcaacaagtgatctggaacactatgacaagactcgtcatgaagaatttaaaaaatatgaaatgatgaaggaacatgaaaggagagaatatttaaaaacattgaatgaagaaaagagaaaagaagaagagtctaaatttgaagaaatgaagaaaaagcatgaaaatcaccctaaagttaatcacccaggaagcaaagatcaactaaaagaggtatgggaagagactgatggattggatcctaatgactttgaccccaagacatttttcaaattacatgatgtcaatagtgatggattcctggatgaacaagaattagaagccctatttactaaagagttggagaaagtatatgaccctaaaaatgaagaggatgatatggtagaaatggaagaagaaaggcttagaatgagggaacatgtaatgaatgaggttgatactaacaaagacagattggtgactctggaggagtttttgaaagccacagaaaaaaaagaattcttggagccagatagctgggagacattagatcagcaacagttcttcacagaggaagaactaaaagaatatgaaaatattattgctttacaagaaaatgaacttaagaagaaggcagatgagcttcagaaacaaaaagaagagctacaacgtcagcatgatcaactggaggctcagaagctggaatatcatcaggtcatacagcagatggaacaaaaaaaattacaacaaggaattcctccatcagggccagctggagaattgaagtttgagccacacatttaaagtctgaagtccaccagaacttggaagaaagctgttaactcaacatctatttcatctttttagctcccttcctttttctctgctcaataaatattttaaaagca

SEQ ID NO: 161127 - DNA, 3727 bp, Homo sapiens
  Payload ID: 11470
  Gene Symbol: NOLC1
  Gene Name: nucleolar and coiled-body phosphoprotein 1
  ENST ID: ENST00000370007
  CDS Start-End: 1-2126
cggacgccggcattcgccgcgtggttcccagcgacctgtatcccctcgtgctcggcttcctgcgcgataaccaactctcagaggtggccaataagttcgccaaagcgacaggagctacacagcaggatgccaatgcctcttccctcttagacatctatagcttctggctcaagtctgccaaggtcccagagcgaaagttacaggcaaatggaccagtggctaagaaagctaagaagaaggcctcatccagtgacagtgaggacagcagcgaggaggaggaggaagttcaagggcctccagcaaagaaggctgctgtacctgccaagcgagtcggtctgcctcctgggaaggctgcagccaaagcatcagagagtagcagcagtgaagagtccagtgatgatgatgatgaggaggaccaaaagaaacagcctgtccagaagggagttaagccccaagccaaggcagccaaagctcctcctaagaaggccaagagctctgattctgattctgactcaagctccgaggatgagccaccaaagaaccagaagccaaagataacacctgtgacagttaaagctcagactaaagcccctcccaaaccagctcgagcagcacctaaaatagccaatggtaaagcagccagtagcagcagtagcagcagcagcagcagtagcagtgatgactcagaggaggagaaggcagcagccacccccaagaaggtctggaccataacttctgtcagggcagagactgtacctaaaaagcaagttgtggccaaggccccagtgaaagcagctaccacccctacccggaagagttctagcagtgaggattcctccagtgacgaggaagaggagcaaaaaaaacccatgaaaaataaaccaggtccctacagttcagtccccccgccttctgctcccccaccaaagaagtctctgggaacccagcctcccaagaaggctgtggagaagcagcagcctgtggaaagcagtgaagacagcagtgatgagtctgattcaagttctgaagaagagaagaaacccccaactaaggcagtagtctctaaagcaaccactaaaccacctccagcaaagaaagcagcagagagctcttcagacagctcagactctgacagctctgaggatgatgaagctccttctaagccagctggtaccaccaagaattcttcaaataagccagctgtcaccaccaagtcacctgcagtgaagccagctgcagcccccaagcaacctgtgggcggtggccagaagcttctgacgagaaaggctgacagcagctccagtgaggaagagagcagctccagtgaggaggagaagacaaagaagatggtggccaccactaagcccaaggcgactgccaaagcagctctatctctgcctgccaagcaggctcctcagggtagtagggacagcagctctgattcagacagctccagcagtgaggaggaggaagagaagacatctaagtctgcagttaagaagaagccacagaaggtagcaggaggtgcagccccttccaagccagcctctgcaaagaaaggaaaggctgagagcagcaacagttcttcttctgatgactccagtgaggaagaggaagagaagctcaagggcaagggctctccaagaccacaagcccccaaggccaatggcacctctgcactgactgcccagaatggaaaagcagctaagaacagtgaggaggaggaagaagaaaagaaaaaggcggcagtggtagtttccaaatcaggttcattaaagaagcggaagcagaatgaggctgccaaggaggcagagactcctcaggccaagaagataaagcttcagacccctaacacatttccaaaaaggaagaaaggagaaaaaagggcatcatccccattccgaagggtcagggaggaggaaattgaggtggattcacgagttgcggacaactcctttgatgccaagcgaggtgcagccggagactggggagagcgagccaatcaggttttgaagttcaccaaaggcaagtcctttcggcatgagaaaaccaagaagaagcggggcagctaccggggaggctcaatctctgtccaggtcaattctattaagtttgacagcgagtgacctgaggccatcttcggtgaagcaagggtgatgatcggagactacttactttctccagtggacctgggaaccctcaggtctctaggtgagggtcttgatgaggacagaagtttagagtaggtcctaagactttacagtgtaacatcctctctggtccttttctgtgttcctagttttgtacagacttgtttttgagtgttgagtagcagggacaaaataagggaatgttattttttaagaaaattcattttcattgttgtctccttccttttctgtgaaagtcctcatactgagaaatttgtatattttatattaaatcacttactattgatttttgttgtgattttcaaaggtggattcccacagataaaatcttggctattgcccaaaacatagtaaagggtcacgtgtgactttttataataggaagaaaattctgcctttgtgagtgcacatgtccacatttcatccctccttccctcaaaaccctagagaggggcattaaagaattgttgatgtatatgcaatgtctgttaagcatgcactatgtatttcatcctcatttattgggtctgggactgaagtttttagccagcatggacctaacctactttttgggataaaattctctgttttgttacaggcaaaattctggtatggcgtgaatgccatgggtcattctgaatatatttttttctgtaattttatcattacacgatgtttgcaatacgtgctttgttttttaatttgaaagcaaacttttctactgttgaaagacattttttgacaacttgacccttcctagtattgagttctaagttgaggactgcatcttctcgttttttacagtatagagaacaaaatgacatgagtttgaaaaatacatatcacttggtattgctgtcttggttgcagtggtgatacagaattggtttcattaattcctacatggttgagaatcactgatcaagaaagtggggggaaaaaaaacaaacgttaaaacctcaatcctcagtaggaaggtagattacattaggtgaaattataggtaatctatgtatgtgctaatggggttggaaagaaccttacagagcatattacctgataaactggagtgggtttgggagaacaaactaataggattattgtgtctcctagttggtacctgggagcaattgacatgcccccttcagaaccttaactgttagtagcagtggctgtaacaacacaaaccagtgaccagagataacagcttttaggccaagctggcctgacggtatggctgcaggaagtgactgagcagtagcggtactcagccagaccaagacggagagggaagagtccacagctttctggaagctaaggcattctggtggtagaaaagtgtgccccaagccttcatggacgagttataggtcttaagattagtctcctcttgtttggattccatacttgctaaataacctgataataacctggttttccatgtaactgcctctaggaagaaaatgtactgttcatgctgacacagatatttcagtctgcatggtaaaagttctaaatcttactacaaaataataaactggctggtttataatgtg

SEQ ID NO: 161128 - DNA, 3967 bp, Homo sapiens
  Payload ID: 11470
  Gene Symbol: NOLC1
  Gene Name: nucleolar and coiled-body phosphoprotein 1
  Uniprot ID: Q14978
  ENST ID: ENST00000405356
  CDS Start-End: 236-2365
gcggccggtgggctccgcccttaaccaagatggcgatacgcgtgggaccggaaagagtttatagatttcccgtctaccctacctctgaggtgaaggtgggactgccctgtggagcccaccctttccgttatgcgcccgcgcggcgcaatgacgtaacacaggcccgcccactgcccctgttgggttcctgagtcgtgctgcgtcgacaacggtagtgacgcgtattgcctggaggatggcggacgccggcattcgccgcgtggttcccagcgacctgtatcccctcgtgctcggcttcctgcgcgataaccaactctcagaggtggccaataagttcgccaaagcgacaggagctacacagcaggatgccaatgcctcttccctcttagacatctatagcttctggctcaagtctgccaaggtcccagagcgaaagttacaggcaaatggaccagtggctaagaaagctaagaagaaggcctcatccagtgacagtgaggacagcagcgaggaggaggaggaagttcaagggcctccagcaaagaaggctgctgtacctgccaagcgagtcggtctgcctcctgggaaggctgcagccaaagcatcagagagtagcagcagtgaagagtccagtgatgatgatgatgaggaggaccaaaagaaacagcctgtccagaagggagttaagccccaagccaaggcagccaaagctcctcctaagaaggccaagagctctgattctgattctgactcaagctccgaggatgagccaccaaagaaccagaagccaaagataacacctgtgacagttaaagctcagactaaagcccctcccaaaccagctcgagcagcacctaaaatagccaatggtaaagcagccagtagcagcagtagcagcagcagcagcagtagcagtgatgactcagaggaggagaaggcagcagccacccccaagaaggtctggaccataacttctgtcagggcagagactgtacctaaaaagcaagttgtggccaaggccccagtgaaagcagctaccacccctacccggaagagttctagcagtgaggattcctccagtgacgaggaagaggagcaaaaaaaacccatgaaaaataaaccaggtccctacagttcagtccccccgccttctgctcccccaccaaagaagtctctgggaacccagcctcccaagaaggctgtggagaagcagcagcctgtggaaagcagtgaagacagcagtgatgagtctgattcaagttctgaagaagagaagaaacccccaactaaggcagtagtctctaaagcaaccactaaaccacctccagcaaagaaagcagcagagagctcttcagacagctcagactctgacagctctgaggatgatgaagctccttctaagccagctggtaccaccaagaattcttcaaataagccagctgtcaccaccaagtcacctgcagtgaagccagctgcagcccccaagcaacctgtgggcggtggccagaagcttctgacgagaaaggctgacagcagctccagtgaggaagagagcagctccagtgaggaggagaagacaaagaagatggtggccaccactaagcccaaggcgactgccaaagcagctctatctctgcctgccaagcaggctcctcagggtagtagggacagcagctctgattcagacagctccagcagtgaggaggaggaagagaagacatctaagtctgcagttaagaagaagccacagaaggtagcaggaggtgcagccccttccaagccagcctctgcaaagaaaggaaaggctgagagcagcaacagttcttcttctgatgactccagtgaggaagaggaagagaagctcaagggcaagggctctccaagaccacaagcccccaaggccaatggcacctctgcactgactgcccagaatggaaaagcagctaagaacagtgaggaggaggaagaagaaaagaaaaaggcggcagtggtagtttccaaatcaggttcattaaagaagcggaagcagaatgaggctgccaaggaggcagagactcctcaggccaagaagataaagcttcagacccctaacacatttccaaaaaggaagaaaggagaaaaaagggcatcatccccattccgaagggtcagggaggaggaaattgaggtggattcacgagttgcggacaactcctttgatgccaagcgaggtgcagccggagactggggagagcgagccaatcaggttttgaagttcaccaaaggcaagtcctttcggcatgagaaaaccaagaagaagcggggcagctaccggggaggctcaatctctgtccaggtcaattctattaagtttgacagcgagtgacctgaggccatcttcggtgaagcaagggtgatgatcggagactacttactttctccagtggacctgggaaccctcaggtctctaggtgagggtcttgatgaggacagaagtttagagtaggtcctaagactttacagtgtaacatcctctctggtccttttctgtgttcctagttttgtacagacttgtttttgagtgttgagtagcagggacaaaataagggaatgttattttttaagaaaattcattttcattgttgtctccttccttttctgtgaaagtcctcatactgagaaatttgtatattttatattaaatcacttactattgatttttgttgtgattttcaaaggtggattcccacagataaaatcttggctattgcccaaaacatagtaaagggtcacgtgtgactttttataataggaagaaaattctgcctttgtgagtgcacatgtccacatttcatccctccttccctcaaaaccctagagaggggcattaaagaattgttgatgtatatgcaatgtctgttaagcatgcactatgtatttcatcctcatttattgggtctgggactgaagtttttagccagcatggacctaacctactttttgggataaaattctctgttttgttacaggcaaaattctggtatggcgtgaatgccatgggtcattctgaatatatttttttctgtaattttatcattacacgatgtttgcaatacgtgctttgttttttaatttgaaagcaaacttttctactgttgaaagacattttttgacaacttgacccttcctagtattgagttctaagttgaggactgcatcttctcgttttttacagtatagagaacaaaatgacatgagtttgaaaaatacatatcacttggtattgctgtcttggttgcagtggtgatacagaattggtttcattaattcctacatggttgagaatcactgatcaagaaagtggggggaaaaaaaacaaacgttaaaacctcaatcctcagtaggaaggtagattacattaggtgaaattataggtaatctatgtatgtgctaatggggttggaaagaaccttacagagcatattacctgataaactggagtgggtttgggagaacaaactaataggattattgtgtctcctagttggtacctgggagcaattgacatgcccccttcagaaccttaactgttagtagcagtggctgtaacaacacaaaccagtgaccagagataacagcttttaggccaagctggcctgacggtatggctgcaggaagtgactgagcagtagcggtactcagccagaccaagacggagagggaagagtccacagctttctggaagctaaggcattctggtggtagaaaagtgtgccccaagccttcatggacgagttataggtcttaagattagtctcctcttgtttggattccatacttgctaaataacctgataataacctggttttccatgtaactgcctctaggaagaaaatgtactgttcatgctgacacagatatttcagtctgcatggtaaaagttctaaatcttactacaaaataataaactggctggtttataatgtgt

SEQ ID NO: 161129 - DNA, 2288 bp, Homo sapiens
  Payload ID: 11470
  Gene Symbol: NOLC1
  Gene Name: nucleolar and coiled-body phosphoprotein 1
  ENST ID: ENST00000464969
  CDS Start-End: 17-238
gcgtattgcctggaggatggcggacgccggcattcgccgcgtggttcccagcgacctgtatcccctcgtgctcggcttcctgcgcgataaccaactctcagaggtggccaataagttcgccaaagcgacaggagctacacagcaggatgccaatgcctcttccctcttagacatctatagcttctggctcaatcggtctgcctcctgggaaggctgcagccaaagcatcagagagtagcagcagtgaagagtccagtgatgatgatgatgaggaggaccaaaagaaacagcctgtccagaagggagttaagccccaagccaaggcagccaaagctcctcctaagaaggccaagagctctgattctgattctgactcaagctccgaggatgagccaccaaagaaccagaagccaaagataacacctgtgacagttaaagctcagactaaagcccctcccaaaccagctcgagcagcacctaaaatagccaatggtaaagcagccagtagcagcagtagcagcagcagcagcagtagcagtgatgactcagaggaggagaaggcagcagccacccccaagaagactgtacctaaaaagcaagttgtggccaaggccccagtgaaagcagctaccacccctacccggaagagttctagcagtgaggattcctccagtgacgaggaagaggagcaaaaaaaacccatgaaaaataaaccaggtccctacagttcagtccccccgccttctgctcccccaccaaagaagtctctgggaacccagcctcccaagaaggctgtggagaagcagcagcctgtggaaagcagtgaagacagcagtgatgagtctgattcaagttctgaagaagagaagaaacccccaactaaggcagtagtctctaaagcaaccactaaaccacctccagcaaagaaagcagcagagagctcttcagacagctcagactctgacagctctgaggatgatgaagctccttctaagccagctggtaccaccaagaattcttcaaataagccagctgtcaccaccaagtcacctgcagtgaagccagctgcagcccccaagcaacctgtgggcggtggccagaagcttctgacgagaaaggctgacagcagctccagtgaggaagagagcagctccagtgaggaggagaagacaaagaagatggtggccaccactaagcccaaggcgactgccaaagcagctctatctctgcctgccaagcaggctcctcagggtagtagggacagcagctctgattcagacagctccagcagtgaggaggaggaagagaagacatctaagtctgcagttaagaagaagccacagaaggtagcaggaggtgcagccccttccaagccagcctctgcaaagaaaggaaaggctgagagcagcaacagttcttcttctgatgactccagtgaggaagaggaagagaagctcaagggcaagggctctccaagaccacaagcccccaaggccaatggcacctctgcactgactgcccagaatggaaaagcagctaagaacagtgaggaggaggaagaagaaaagaaaaaggcggcagtggtagtttccaaatcaggttcattaaagaagcggaagcagaatgaggctgccaaggaggcagagactcctcaggccaagaagataaagcttcagacccctaacacatttccaaaaaggaagaaaggagaaaaaagggcatcatccccattccgaagggtcagggaggaggaaattgaggtggattcacgagttgcggacaactcctttgatgccaagcgaggtgcagccggagactggggagagcgagccaatcaggttttgaagttcaccaaaggcaagtcctttcggcatgagaaaaccaagaagaagcggggcagctaccggggaggctcaatctctgtccaggtcaattctattaagtttgacagcgagtgacctgaggccatcttcggtgaagcaagggtgatgatcggagactacttactttctccagtggacctgggaaccctcaggtctctaggtgagggtcttgatgaggacagaagtttagagtaggtcctaagactttacagtgtaacatcctctctggtccttttctgtgttcctagttttgtacagacttgtttttgagtgttgagtagcagggacaaaataagggaatgttattttttaagaaaattcattttcattgttgtctccttccttttctgtgaaagtcctcatactgagaaatttgtatattttatattaaatcacttactattg

SEQ ID NO: 161130 - DNA, 777 bp, Homo sapiens
  Payload ID: 11470
  Gene Symbol: NOLC1
  Gene Name: nucleolar and coiled-body phosphoprotein 1
  ENST ID: ENST00000461421
  CDS Start-End: 3-777
ggatggcggacgccggcattcgccgcgtggttcccagcgacctgtatcccctcgtgctcggcttcctgcgcgataaccaactctcagaggtggccaataagttcgccaaagcgacaggagctaagggagttaagccccaagccaaggcagccaaagctcctcctaagaaggccaagagctctgattctgattctgactcaagctccgaggatgagccaccaaagaaccagaagccaaagataacacctgtgacagttaaagctcagactaaagcccctcccaaaccagctcgagcagcacctaaaatagccaatggtaaagcagccagtagcagcagtagcagcagcagcagcagtagcagtgatgactcagaggaggagaaggcagcagccacccccaagaagactgtacctaaaaagcaagttgtggccaaggccccagtgaaagcagctaccacccctacccggaagagttctagcagtgaggattcctccagtgacgaggaagaggagcaaaaaaaacccatgaaaaataaaccaggtccctacagttcagtccccccgccttctgctcccccaccaaagaagtctctgggaacccagcctcccaagaaggctgtggagaagcagcagcctgtggaaagcagtgaagacagcagtgatgagtctgactctgacagctctgaggatgatgaagctccttctaagccagctggtaccaccaagaattcttcaaataagccagctgtcaccaccaagtcacctgcagtgaagccag

SEQ ID NO: 161131 - DNA, 844 bp, Homo sapiens
  Payload ID: 11470
  Gene Symbol: NOLC1
  Gene Name: nucleolar and coiled-body phosphoprotein 1
  ENST ID: ENST00000476468
  CDS Start-End: 1-844
ggcggacgccggcattcgccgcgtggttcccagcgacctgtatcccctcgtgctcggcttcctgcgcgataaccaactctcagaggtggccaataagttcgccaaagcgacaggagctgtctgccaaggtcccagagcgaaagttacaggcaaatggaccagtggctaagaaagctaagaagaaggcctcatccagtgacagtgaggacagcagcgaggaggaggaggaagttcaagggcctccagcaaagaaggctgctgtacctgccaagcgagtcggtctgcctcctgggaaggctgcagccaaagcatcagagagtagcagcagtgaagagtccagtgatgatgatgatgaggaggaccaaaagaaacagcctgtccagaagggagttaagccccaagccaaggcagccaaagctcctcctaagaaggccaagagctctgattctgattctgactcaagctccgaggatgagccaccaaagaaccagaagccaaagataacacctgtgacagttaaagctcagactaaagcccctcccaaaccagctcgagcagcacctaaaatagccaatggtaaagcagccagtagcagcagtagcagcagcagcagcagtagcagtgatgactcagaggaggagaaggcagcagccacccccaagaagactgtacctaaaaagcaagttgtggccaaggccccagtgaaagcagctaccacccctacccggaagagttctagcagtgaggattcctccagtgacgaggaagaggagcaaaaaaaacccatgaaaaataaaccaggtccctacagttcagtccccccgccttctgctcccccaccaaa

SEQ ID NO: 161132 - DNA, 3932 bp, Homo sapiens
  Payload ID: 11470
  Gene Symbol: NOLC1
  Gene Name: nucleolar and coiled-body phosphoprotein 1
  Uniprot ID: Q14978
  ENST ID: ENST00000605788
  CDS Start-End: 236-2335
gcggccggtgggctccgcccttaaccaagatggcgatacgcgtgggaccggaaagagtttatagatttcccgtctaccctacctctgaggtgaaggtgggactgccctgtggagcccaccctttccgttatgcgcccgcgcggcgcaatgacgtaacacaggcccgcccactgcccctgttgggttcctgagtcgtgctgcgtcgacaacggtagtgacgcgtattgcctggaggatggcggacgccggcattcgccgcgtggttcccagcgacctgtatcccctcgtgctcggcttcctgcgcgataaccaactctcagaggtggccaataagttcgccaaagcgacaggagctacacagcaggatgccaatgcctcttccctcttagacatctatagcttctggctcaagtctgccaaggtcccagagcgaaagttacaggcaaatggaccagtggctaagaaagctaagaagaaggcctcatccagtgacagtgaggacagcagcgaggaggaggaggaagttcaagggcctccagcaaagaaggctgctgtacctgccaagcgagtcggtctgcctcctgggaaggctgcagccaaagcatcagagagtagcagcagtgaagagtccagtgatgatgatgatgaggaggaccaaaagaaacagcctgtccagaagggagttaagccccaagccaaggcagccaaagctcctcctaagaaggccaagagctctgattctgattctgactcaagctccgaggatgagccaccaaagaaccagaagccaaagataacacctgtgacagttaaagctcagactaaagcccctcccaaaccagctcgagcagcacctaaaatagccaatggtaaagcagccagtagcagcagtagcagcagcagcagcagtagcagtgatgactcagaggaggagaaggcagcagccacccccaagaagactgtacctaaaaagcaagttgtggccaaggccccagtgaaagcagctaccacccctacccggaagagttctagcagtgaggattcctccagtgacgaggaagaggagcaaaaaaaacccatgaaaaataaaccaggtccctacagttcagtccccccgccttctgctcccccaccaaagaagtctctgggaacccagcctcccaagaaggctgtggagaagcagcagcctgtggaaagcagtgaagacagcagtgatgagtctgattcaagttctgaagaagagaagaaacccccaactaaggcagtagtctctaaagcaaccactaaaccacctccagcaaagaaagcagcagagagctcttcagacagctcagactctgacagctctgaggatgatgaagctccttctaagccagctggtaccaccaagaattcttcaaataagccagctgtcaccaccaagtcacctgcagtgaagccagctgcagcccccaagcaacctgtgggcggtggccagaagcttctgacgagaaaggctgacagcagctccagtgaggaagagagcagctccagtgaggaggagaagacaaagaagatggtggccaccactaagcccaaggcgactgccaaagcagctctatctctgcctgccaagcaggctcctcagggtagtagggacagcagctctgattcagacagctccagcagtgaggaggaggaagagaagacatctaagtctgcagttaagaagaagccacagaaggtagcaggaggtgcagccccttccaagccagcctctgcaaagaaaggaaaggctgagagcagcaacagttcttcttctgatgactccagtgaggaagaggaagagaagctcaagggcaagggctctccaagaccacaagcccccaaggccaatggcacctctgcactgactgcccagaatggaaaagcagctaagaacagtgaggaggaggaagaagaaaagaaaaaggcggcagtggtagtttccaaatcaggttcattaaagaagcggaagcagaatgaggctgccaaggaggcagagactcctcaggccaagaagataaagcttcagacccctaacacatttccaaaaaggaagaaaggagaaaaaagggcatcatccccattccgaagggtcagggaggaggaaattgaggtggattcacgagttgcggacaactcctttgatgccaagcgaggtgcagccggagactggggagagcgagccaatcaggttttgaagttcaccaaaggcaagtcctttcggcatgagaaaaccaagaagaagcggggcagctaccggggaggctcaatctctgtccaggtcaattctattaagtttgacagcgagtgacctgaggccatcttcggtgaagcaagggtgatgatcggagactacttactttctccagtggacctgggaaccctcaggtctctaggtgagggtcttgatgaggacagaagtttagagtaggtcctaagactttacagtgtaacatcctctctggtccttttctgtgttcctagttttgtacagacttgtttttgagtgttgagtagcagggacaaaataagggaatgttattttttaagaaaattcattttcattgttgtctccttccttttctgtgaaagtcctcatactgagaaatttgtatattttatattaaatcacttactattgatttttgttgtgattttcaaaggtggattcccacagataaaatcttggctattgcccaaaacatagtaaagggtcacgtgtgactttttataataggaagaaaattctgcctttgtgagtgcacatgtccacatttcatccctccttccctcaaaaccctagagaggggcattaaagaattgttgatgtatatgcaatgtctgttaagcatgcactatgtatttcatcctcatttattgggtctgggactgaagtttttagccagcatggacctaacctactttttgggataaaattctctgttttgttacaggcaaaattctggtatggcgtgaatgccatgggtcattctgaatatatttttttctgtaattttatcattacacgatgtttgcaatacgtgctttgttttttaatttgaaagcaaacttttctactgttgaaagacattttttgacaacttgacccttcctagtattgagttctaagttgaggactgcatcttctcgttttttacagtatagagaacaaaatgacatgagtttgaaaaatacatatcacttggtattgctgtcttggttgcagtggtgatacagaattggtttcattaattcctacatggttgagaatcactgatcaagaaagtggggggaaaaaaaacaaacgttaaaacctcaatcctcagtaggaaggtagattacattaggtgaaattataggtaatctatgtatgtgctaatggggttggaaagaaccttacagagcatattacctgataaactggagtgggtttgggagaacaaactaataggattattgtgtctcctagttggtacctgggagcaattgacatgcccccttcagaaccttaactgttagtagcagtggctgtaacaacacaaaccagtgaccagagataacagcttttaggccaagctggcctgacggtatggctgcaggaagtgactgagcagtagcggtactcagccagaccaagacggagagggaagagtccacagctttctggaagctaaggcattctggtggtagaaaagtgtgccccaagccttcatggacgagttataggtcttaagattagtctcctcttgtttggattccatacttgctaaataacctgataataacctggttttccatgtaactgcctctaggaagaaaatgtactgttcatgctgacacagatatttcagtctgcatggtaaaagttctaaatcttactacaaaataataaactggctggtttataa

SEQ ID NO: 161133 - DNA, 3217 bp, Homo sapiens
  Payload ID: 11470
  Gene Symbol: NOLC1
  Gene Name: nucleolar and coiled-body phosphoprotein 1
  ENST ID: ENST00000603946
  CDS Start-End: 8-148
ctggaggatggcggacgccggcattcgccgcgtggttcccagcgacctgtatcccctcgtgctcggcttcctgcgcgataaccaactctcagaggtggccaataagttcgccaaagcgacaggagctctcgagcagcacctaaaatagccaatggtaaagcagccagtagcagcagtagcagcagcagcagcagtagcagtgatgactcagaggaggagaaggcagcagccacccccaagaagactgtacctaaaaagcaagttgtggccaaggccccagtgaaagcagctaccacccctacccggaagagttctagcagtgaggattcctccagtgacgaggaagaggagcaaaaaaaacccatgaaaaataaaccaggtccctacagttcagtccccccgccttctgctcccccaccaaagaagtctctgggaacccagcctcccaagaaggctgtggagaagcagcagcctgtggaaagcagtgaagacagcagtgatgagtctgattcaagttctgaagaagagaagaaacccccaactaaggcagtagtctctaaagcaaccactaaaccacctccagcaaagaaagcagcagagagctcttcagacagctcagactctgacagctctgaggatgatgaagctccttctaagccagctggtaccaccaagaattcttcaaataagccagctgtcaccaccaagtcacctgcagtgaagccagctgcagcccccaagcaacctgtgggcggtggccagaagcttctgacgagaaaggctgacagcagctccagtgaggaagagagcagctccagtgaggaggagaagacaaagaagatggtggccaccactaagcccaaggcgactgccaaagcagctctatctctgcctgccaagcaggctcctcagggtagtagggacagcagctctgattcagacagctccagcagtgaggaggaggaagagaagacatctaagtctgcagttaagaagaagccacagaaggtagcaggaggtgcagccccttccaagccagcctctgcaaagaaaggaaaggctgagagcagcaacagttcttcttctgatgactccagtgaggaagaggaagagaagctcaagggcaagggctctccaagaccacaagcccccaaggccaatggcacctctgcactgactgcccagaatggaaaagcagctaagaacagtgaggaggaggaagaagaaaagaaaaaggcggcagtggtagtttccaaatcaggttcattaaagaagcggaagcagaatgaggctgccaaggaggcagagactcctcaggccaagaagataaagcttcagacccctaacacatttccaaaaaggaagaaaggagaaaaaagggcatcatccccattccgaagggtcagggaggaggaaattgaggtggattcacgagttgcggacaactcctttgatgccaagcgaggtgcagccggagactggggagagcgagccaatcaggttttgaagttcaccaaaggcaagtcctttcggcatgagaaaaccaagaagaagcggggcagctaccggggaggctcaatctctgtccaggtcaattctattaagtttgacagcgagtgacctgaggccatcttcggtgaagcaagggtgatgatcggagactacttactttctccagtggacctgggaaccctcaggtctctaggtgagggtcttgatgaggacagaagtttagagtaggtcctaagactttacagtgtaacatcctctctggtccttttctgtgttcctagttttgtacagacttgtttttgagtgttgagtagcagggacaaaataagggaatgttattttttaagaaaattcattttcattgttgtctccttccttttctgtgaaagtcctcatactgagaaatttgtatattttatattaaatcacttactattgatttttgttgtgattttcaaaggtggattcccacagataaaatcttggctattgcccaaaacatagtaaagggtcacgtgtgactttttataataggaagaaaattctgcctttgtgagtgcacatgtccacatttcatccctccttccctcaaaaccctagagaggggcattaaagaattgttgatgtatatgcaatgtctgttaagcatgcactatgtatttcatcctcatttattgggtctgggactgaagtttttagccagcatggacctaacctactttttgggataaaattctctgttttgttacaggcaaaattctggtatggcgtgaatgccatgggtcattctgaatatatttttttctgtaattttatcattacacgatgtttgcaatacgtgctttgttttttaatttgaaagcaaacttttctactgttgaaagacattttttgacaacttgacccttcctagtattgagttctaagttgaggactgcatcttctcgttttttacagtatagagaacaaaatgacatgagtttgaaaaatacatatcacttggtattgctgtcttggttgcagtggtgatacagaattggtttcattaattcctacatggttgagaatcactgatcaagaaagtggggggaaaaaaaacaaacgttaaaacctcaatcctcagtaggaaggtagattacattaggtgaaattataggtaatctatgtatgtgctaatggggttggaaagaaccttacagagcatattacctgataaactggagtgggtttgggagaacaaactaataggattattgtgtctcctagttggtacctgggagcaattgacatgcccccttcagaaccttaactgttagtagcagtggctgtaacaacacaaaccagtgaccagagataacagcttttaggccaagctggcctgacggtatggctgcaggaagtgactgagcagtagcggtactcagccagaccaagacggagagggaagagtccacagctttctggaagctaaggcattctggtggtagaaaagtgtgccccaagccttcatggacgagttataggtcttaagattagtctcctcttgtttggattccatacttgctaaataacctgataataacctggttttccatgtaactgcctctaggaagaaaatgtactgttcatgctgacacagatatttcagtctgcatggtaaaagttctaaatcttactacaaaataataaactggctggtttataa

SEQ ID NO: 161134 - DNA, 2441 bp, Homo sapiens
  Payload ID: 11470
  Gene Symbol: NOLC1
  Gene Name: nucleolar and coiled-body phosphoprotein 1
  Uniprot ID: Q14978
  ENST ID: ENST00000488254
  CDS Start-End: 8-2110
ctggaggatggcggacgccggcattcgccgcgtggttcccagcgacctgtatcccctcgtgctcggcttcctgcgcgataaccaactctcagaggtggccaataagttcgccaaagcgacaggagctacacagcaggatgccaatgcctcttccctcttagacatctatagcttctggctcaacaggtctgccaaggtcccagagcgaaagttacaggcaaatggaccagtggctaagaaagctaagaagaaggcctcatccagtgacagtgaggacagcagcgaggaggaggaggaagttcaagggcctccagcaaagaaggctgctgtacctgccaagcgagtcggtctgcctcctgggaaggctgcagccaaagcatcagagagtagcagcagtgaagagtccagtgatgatgatgatgaggaggaccaaaagaaacagcctgtccagaagggagttaagccccaagccaaggcagccaaagctcctcctaagaaggccaagagctctgattctgattctgactcaagctccgaggatgagccaccaaagaaccagaagccaaagataacacctgtgacagttaaagctcagactaaagcccctcccaaaccagctcgagcagcacctaaaatagccaatggtaaagcagccagtagcagcagtagcagcagcagcagcagtagcagtgatgactcagaggaggagaaggcagcagccacccccaagaagactgtacctaaaaagcaagttgtggccaaggccccagtgaaagcagctaccacccctacccggaagagttctagcagtgaggattcctccagtgacgaggaagaggagcaaaaaaaacccatgaaaaataaaccaggtccctacagttcagtccccccgccttctgctcccccaccaaagaagtctctgggaacccagcctcccaagaaggctgtggagaagcagcagcctgtggaaagcagtgaagacagcagtgatgagtctgattcaagttctgaagaagagaagaaacccccaactaaggcagtagtctctaaagcaaccactaaaccacctccagcaaagaaagcagcagagagctcttcagacagctcagactctgacagctctgaggatgatgaagctccttctaagccagctggtaccaccaagaattcttcaaataagccagctgtcaccaccaagtcacctgcagtgaagccagctgcagcccccaagcaacctgtgggcggtggccagaagcttctgacgagaaaggctgacagcagctccagtgaggaagagagcagctccagtgaggaggagaagacaaagaagatggtggccaccactaagcccaaggcgactgccaaagcagctctatctctgcctgccaagcaggctcctcagggtagtagggacagcagctctgattcagacagctccagcagtgaggaggaggaagagaagacatctaagtctgcagttaagaagaagccacagaaggtagcaggaggtgcagccccttccaagccagcctctgcaaagaaaggaaaggctgagagcagcaacagttcttcttctgatgactccagtgaggaagaggaagagaagctcaagggcaagggctctccaagaccacaagcccccaaggccaatggcacctctgcactgactgcccagaatggaaaagcagctaagaacagtgaggaggaggaagaagaaaagaaaaaggcggcagtggtagtttccaaatcaggttcattaaagaagcggaagcagaatgaggctgccaaggaggcagagactcctcaggccaagaagataaagcttcagacccctaacacatttccaaaaaggaagaaaggagaaaaaagggcatcatccccattccgaagggtcagggaggaggaaattgaggtggattcacgagttgcggacaactcctttgatgccaagcgaggtgcagccggagactggggagagcgagccaatcaggttttgaagttcaccaaaggcaagtcctttcggcatgagaaaaccaagaagaagcggggcagctaccggggaggctcaatctctgtccaggtcaattctattaagtttgacagcgagtgacctgaggccatcttcggtgaagcaagggtgatgatcggagactacttactttctccagtggacctgggaaccctcaggtctctaggtgagggtcttgatgaggacagaagtttagagtaggtcctaagactttacagtgtaacatcctctctggtccttttctgtgttcctagttttgtacagacttgtttttgagtgttgagtagcagggacaaaataagggaatgttattttttaagaaaattcattttcattgttgtctccttccttttctgtgaaagtcctcatactgagaaatttgtatattttatattaaatcacttactattga

SEQ ID NO: 161135 - DNA, 2409 bp, Homo sapiens
  Payload ID: 11471
  Gene Symbol: NUSAP1
  Gene Name: nucleolar and spindle associated protein 1
  Uniprot ID: Q9BXS6
  ENST ID: ENST00000260359
  CDS Start-End: 265-1545
gcgttacaggccctttggcgcctgcgtattcgtgaagtgtgaaaaaagcgcgcctctgttgggacgggaaatcagcctttctattggtcagggttagaaaccccgcctttgaggcattttcaaccaatggaagcgcggcattcttcatttaaactgtctataaatttctgcctagtcaaagttaagagtggcgccagggatttgaaccgcgctgacgaagtttggtgatccatcttccgagtatcgccgggatttcgaatcgcgatgatcatcccctctctagaggagctggactccctcaagtacagtgacctgcagaacttagccaagagtctgggtctccgggccaacctgagggcaaccaagttgttaaaagccttgaaaggctacattaaacatgaggcaagaaaaggaaatgagaatcaggatgaaagtcaaacttctgcatcctcttgtgatgagactgagatacagatcagcaaccaggaagaagctgagagacagccacttggccatgtcaccaaaacaaggagaaggtgcaagactgtccgtgtggaccctgactcacagaatcatgaaaagcaggaaagccaggatctcagagctactgcaaaagttccttctccaccagacgagcaccaagaagctgagaatgctgtttcctcaggtaacagagattcaaaggtaccttcagaaggaaagaaatctctctacacagatgagtcatccaaacctggaaaaaataaaagaactgcaatcactactccaaactttaagaagcttcatgaagctcattttaaggaaatggagtccattgatcaatatattgagagaaaaaagaaacattttgaagaacacaattccatgaatgaactgaagcagcagcccatcaataagggaggggtcaggactccagtacctccaagaggaagactctctgtggcttctactcccatcagccaacgacgctcgcaaggccggtcttgtggccctgcaagtcagagtaccttgggtctgaaggggtcactcaagcgctctgctatctctgcagctaaaacgggtgtcaggttttcagctgctactaaagataatgagcataagcgttcactgaccaagactccagccagaaagtctgcacatgtgaccgtgtctgggggcaccccaaaaggcgaggctgtgcttgggacacacaaattaaagaccatcacggggaattctgctgctgttattaccccattcaagttgacaactgaggcaacgcagactccagtctccaataagaaaccagtgtttgatcttaaagcaagtttgtctcgtcccctcaactatgaaccacacaaaggaaagctaaaaccatgggggcaatctaaagaaaataattatctaaatcaacatgtcaacagaattaacttctacaagaaaacttacaaacaaccccatctccagacaaaggaagagcaacggaagaaacgcgagcaagaacgaaaggagaagaaagcaaaggttttgggaatgcgaaggggcctcattttggctgaagattaataattttttaacatcttgtaaatattcctgtattctcaacttttttccttttgtaaattttttttttttgctgtcatccccactttagtcacgagatctttttctgctaactgttcatagtctgtgtagtgtccatgggttcttcatgtgctatgatctctgaaaagacgttatcaccttaaagctcaaattctttgggatggtttttacttaagtccattaacaattcaggtttctaacgagacccatcctaaaattctgtttctagatttttaatgtcaagttcccaagttccccctgctggttctaatattaacagaactgcagtcttctgctagccaatagcatttacctgatggcagctagttatgcaagcttcaggagaatttgaacaataacaagaatagggtaagctgggatagaaaggccacctcttcactctctatagaatatagtaacctttatgaaacggggccatatagtttggttatgacatcaatattttacctaggtgaaattgtttaggcttatgtaccttcgttcaaatatcctcatgtaattgccatctgtcactcactatattcacaaaaataaaactctacaactcattctaacattgcttacttaaaagctacatagccctatcgaaatgcgaggattaatgctttaatgcttttagagacagggtctcactgtgttgcccaggctggtctcaaactccaccaaatgtacttcttattcattttatggaaaagactaggctttgcttagtatcatgtccatgtttccttcacctcagtggagcttctgagttttatactgctcaagatcgtcataaataaaattttttctcattgtcataga

SEQ ID NO: 161136 - DNA, 2274 bp, Homo sapiens
  Payload ID: 11471
  Gene Symbol: NUSAP1
  Gene Name: nucleolar and spindle associated protein 1
  Uniprot ID: Q9BXS6
  ENST ID: ENST00000414849
  CDS Start-End: 88-1410
aaagttaagagtggcgccagggatttgaaccgcgctgacgaagtttggtgatccatcttccgagtatcgccgggatttcgaatcgcgatgatcatcccctctctagaggagctggactccctcaagtacagtgacctgcagaacttagccaagagtctgggtctccgggccaacctgagggcaaccaagttgttaaaagccttgaaaggctacattaaacatgaggcaagaaaaggaaatgagaatcaggatgaaagtcaaacttctgcatcctcttgtgatgagactgagatacagatcagcaaccaggaagaagctgagagacagccacttggccatgtcaccaaaacaaggagaaggtgcaagactgtccgtgtggaccctgactcacagcagaatcattcagagataaaaataagtaatcccactgaattccagaatcatgaaaagcaggaaagccaggatctcagagctactgcaaaagttccttctccaccagacgagcaccaagaagctgagaatgctgtttcctcaggtaacagagattcaaaggtaccttcagaaggaaagaaatctctctacacagatgagtcatccaaacctggaaaaaataaaagaactgcaatcactactccaaactttaagaagcttcatgaagctcattttaaggaaatggagtccattgatcaatatattgagagaaaaaagaaacattttgaagaacacaattccatgaatgaactgaagcagcccatcaataagggaggggtcaggactccagtacctccaagaggaagactctctgtggcttctactcccatcagccaacgacgctcgcaaggccggtcttgtggccctgcaagtcagagtaccttgggtctgaaggggtcactcaagcgctctgctatctctgcagctaaaacgggtgtcaggttttcagctgctactaaagataatgagcataagcgttcactgaccaagactccagccagaaagtctgcacatgtgaccgtgtctgggggcaccccaaaaggcgaggctgtgcttgggacacacaaattaaagaccatcacggggaattctgctgctgttattaccccattcaagttgacaactgaggcaacgcagactccagtctccaataagaaaccagtgtttgatcttaaagcaagtttgtctcgtcccctcaactatgaaccacacaaaggaaagctaaaaccatgggggcaatctaaagaaaataattatctaaatcaacatgtcaacagaattaacttctacaagaaaacttacaaacaaccccatctccagacaaaggaagagcaacggaagaaacgcgagcaagaacgaaaggagaagaaagcaaaggttttgggaatgcgaaggggcctcattttggctgaagattaataattttttaacatcttgtaaatattcctgtattctcaacttttttccttttgtaaattttttttttttgctgtcatccccactttagtcacgagatctttttctgctaactgttcatagtctgtgtagtgtccatgggttcttcatgtgctatgatctctgaaaagacgttatcaccttaaagctcaaattctttgggatggtttttacttaagtccattaacaattcaggtttctaacgagacccatcctaaaattctgtttctagatttttaatgtcaagttcccaagttccccctgctggttctaatattaacagaactgcagtcttctgctagccaatagcatttacctgatggcagctagttatgcaagcttcaggagaatttgaacaataacaagaatagggtaagctgggatagaaaggccacctcttcactctctatagaatatagtaacctttatgaaacggggccatatagtttggttatgacatcaatattttacctaggtgaaattgtttaggcttatgtaccttcgttcaaatatcctcatgtaattgccatctgtcactcactatattcacaaaaataaaactctacaactcattctaacattgcttacttaaaagctacatagccctatcgaaatgcgaggattaatgctttaatgcttttagagacagggtctcactgtgttgcccaggctggtctcaaactccaccaaatgtacttcttattcattttatggaaaagactaggctttgcttagtatcatgtccatgtttccttcacctcagtggagcttctgagttttatactgctcaagatcgtcataaataaaattttttctcattgtcataga

SEQ ID NO: 161137 - DNA, 1301 bp, Homo sapiens
  Payload ID: 11471
  Gene Symbol: NUSAP1
  Gene Name: nucleolar and spindle associated protein 1
  Uniprot ID: Q9BXS6
  ENST ID: ENST00000450592
  CDS Start-End: 88-1224
aaagttaagagtggcgccagggatttgaaccgcgctgacgaagtttggtgatccatcttccgagtatcgccgggatttcgaatcgcgatgatcatcccctctctagaggagctggactccctcaagtacagtgacctgcagaacttagccaagagtctgggtctccgggccaacctgagggatgaaagtcaaacttctgcatcctcttgtgatgagactgagatacagatcagcaaccaggaagaagctgagagacagccacttggccatgtcaccaaaacaaggagaaggtgcaagactgtccgtgtggaccctgactcacagcagaatcattcagagataaaaataagtaatcccactgaattccagaatcatgaaaagcaggaaagccaggatctcagagctactgcaaaagttccttctccaccagacgagcaccaagaagctgagaatgctgtttcctcaggtaacagagattcaaaggtaccttcagaaggaaagaaatctctctacacagatgagtcatccaaacctggaaaaaataaaagaactgcaatcactactccaaactttaagaagcttcatgaagctcattttaaggaaatggagtccattgatcaatatattgagagaaaaaagaaacattttgaagaacacaattccatgaatgaactgaagcagcccatcaataagggaggggtcaggactccagtacctccaagaggaagactctctgtggcttctactcccatcagccaacgacgctcgcaaggccggtcttgtggccctgcaagtcagagtaccttgggtctgaaggggtcactcaagcgctctgctatctctgcagctaaaacgggtgtcaggttttcagctgctactaaagataatgagcataagcgttcactgaccaagactccagccagaaagtctgcacatgtgaccgtgtctgggggcaccccaaaaggcgaggctgtgcttgggacacacaaattaaagaccatcacggggaattctgctgctggaaagctaaaaccatgggggcaatctaaagaaaataattatctaaatcaacatgtcaacagaattaacttctacaagaaaacttacaaacaaccccatctccagacaaaggaagagcaacggaagaaacgcgagcaagaacgaaaggagaagaaagcaaaggttttgggaatgcgaaggggcctcattttggctgaagattaataattttttaacatcttgtaaatattcctgtattctcaacttttttccttttgtaaattttttttttttgctgtcat

SEQ ID NO: 161138 - DNA, 580 bp, Homo sapiens
  Payload ID: 11471
  Gene Symbol: NUSAP1
  Gene Name: nucleolar and spindle associated protein 1
  ENST ID: ENST00000559046
  CDS Start-End: 104-334
aaatttctgcctagtcaaagttaagagtggcgccagggatttgaaccgcgctgacgaagtttggtgatccatcttccgagtatcgccgggatttcgaatcgcgatgatcatcccctctctagaggagctggactccctcaagtacagtgacctgcagaacttagccaagagtctgggtctccgggccaacctgagggcaaccaagttgttaaaagccttgaaaggctacattaaacatgaggcaagaaaaggaaatgagaatcagtttcactcttgctgcccaggctggagtgcaatgacacgatctcggctcaccgcaacctccacctcctgagttaaagcgattctcctgcctcagcctcctgagtagctgggattacaggatgaaagtcaaacttctgcatcctcttgtgatgagactgagatacagatcagcaaccaggaagaagctgagagacagccacttggccatgtcaccaaaacaaggagaaggtgcaagactgtccgtgtggaccctgactcacagaatcatgaaaagcaggaaagccaggatctcagagctactgcaaaagttccttct

SEQ ID NO: 161139 - DNA, 1629 bp, Homo sapiens
  Payload ID: 11471
  Gene Symbol: NUSAP1
  Gene Name: nucleolar and spindle associated protein 1
  Uniprot ID: Q9BXS6
  ENST ID: ENST00000559596
  CDS Start-End: 88-1413
aaagttaagagtggcgccagggatttgaaccgcgctgacgaagtttggtgatccatcttccgagtatcgccgggatttcgaatcgcgatgatcatcccctctctagaggagctggactccctcaagtacagtgacctgcagaacttagccaagagtctgggtctccgggccaacctgagggcaaccaagttgttaaaagccttgaaaggctacattaaacatgaggcaagaaaaggaaatgagaatcaggatgaaagtcaaacttctgcatcctcttgtgatgagactgagatacagatcagcaaccaggaagaagctgagagacagccacttggccatgtcaccaaaacaaggagaaggtgcaagactgtccgtgtggaccctgactcacagcagaatcattcagagataaaaataagtaatcccactgaattccagaatcatgaaaagcaggaaagccaggatctcagagctactgcaaaagttccttctccaccagacgagcaccaagaagctgagaatgctgtttcctcaggtaacagagattcaaaggtaccttcagaaggaaagaaatctctctacacagatgagtcatccaaacctggaaaaaataaaagaactgcaatcactactccaaactttaagaagcttcatgaagctcattttaaggaaatggagtccattgatcaatatattgagagaaaaaagaaacattttgaagaacacaattccatgaatgaactgaagcagcagcccatcaataagggaggggtcaggactccagtacctccaagaggaagactctctgtggcttctactcccatcagccaacgacgctcgcaaggccggtcttgtggccctgcaagtcagagtaccttgggtctgaaggggtcactcaagcgctctgctatctctgcagctaaaacgggtgtcaggttttcagctgctactaaagataatgagcataagcgttcactgaccaagactccagccagaaagtctgcacatgtgaccgtgtctgggggcaccccaaaaggcgaggctgtgcttgggacacacaaattaaagaccatcacggggaattctgctgctgttattaccccattcaagttgacaactgaggcaacgcagactccagtctccaataagaaaccagtgtttgatcttaaagcaagtttgtctcgtcccctcaactatgaaccacacaaaggaaagctaaaaccatgggggcaatctaaagaaaataattatctaaatcaacatgtcaacagaattaacttctacaagaaaacttacaaacaaccccatctccagacaaaggaagagcaacggaagaaacgcgagcaagaacgaaaggagaagaaagcaaaggttttgggaatgcgaaggggcctcattttggctgaagattaataattttttaacatcttgtaaatattcctgtattctcaacttttttccttttgtaaattttttttttttgctgtcatccccactttagtcacgagatctttttctgctaactgttcatagtctgtgtagtgtccatgggttcttcatgtgctatgatctctgaaaagacgttatcaccttaaagctcaaattctttgggatggtttttacttaagt

SEQ ID NO: 161140 - DNA, 416 bp, Homo sapiens
  Payload ID: 11471
  Gene Symbol: NUSAP1
  Gene Name: nucleolar and spindle associated protein 1
  ENST ID: ENST00000557840
  CDS Start-End: 1-206
tgttaaaagccttgaaaggctacattaaacatgaggcaagaaaaggaaatgagaatcaggactccagtacctccaagaggaagactctctgtggcttctactcccatcagccaacgacgctcgcaaggccggtcttgtggccctgcaagtcagagtaccttgggtctgaaggggtcactcaagcgctctgctatctctgcagctaaaacgggtgtcaggttttcagctgctactaaagataatgagcataagcgttcactgaccaagactccagccagaaagtctgcacatgtgaccgtgtctgggggcaccccaaaaggcgaggctgtgcttgggacacacaaattaaagaccatcacggggaattctgctgctgttattaccccattcaagttgacaactgaggcaacgcagac

SEQ ID NO: 161141 - DNA, 708 bp, Homo sapiens
  Payload ID: 11471
  Gene Symbol: NUSAP1
  Gene Name: nucleolar and spindle associated protein 1
  ENST ID: ENST00000560898
  CDS Start-End: 1-435
caagaagctgagaatgctgtttcctcaggtaacagagattcaaaggtaccttcagaaggaaagaaatctctctacacagatgagtcatccaaacctggaaaaaataaaagaactgcaatcactactccaaactttaagaagcttcatgaagctcattttaaggaaatggagtccattgatcaatatattgagagaaaaaagaaacattttgaagaacacaattccatgaatgaactgaagcagcccatcaataagggaggggtcaggactccagtacctccaagaggaagactctctgtggcttctactcccatcagccaacgacgctcgcaaggccggtcttgtggccctgcaagtcagagtaccttgggtctgaaggggtcactcaagcgctctgctatctctgcagctaaaacgggtgtcaggttcaagtgattcttctgcctcagcctcccgagtagctgggactacaggttttcagctgctactaaagataatgagcataagcgttcactgaccaagactccagccagaaagtctgcacatgtgaccgtgtctgggggcaccccaaaaggcgaggctgtgcttgggacacacaaattaaagaccatcacggggaattctgctgctggaaagctaaaaccatgggggcaatctaaagaaaataattatctaaatcaacatgtcaacagaattaacttctacaag

SEQ ID NO: 161142 - DNA, 2232 bp, Homo sapiens
  Payload ID: 11471
  Gene Symbol: NUSAP1
  Gene Name: nucleolar and spindle associated protein 1
  Uniprot ID: Q9BXS6
  ENST ID: ENST00000560177
  CDS Start-End: 46-1368
gtttggtgatccatcttccgagtatcgccgggatttcgaatcgcgatgatcatcccctctctagaggagctggactccctcaagtacagtgacctgcagaacttagccaagagtctgggtctccgggccaacctgagggcaaccaagttgttaaaagccttgaaaggctacattaaacatgaggcaagaaaaggaaatgagaatcaggatgaaagtcaaacttctgcatcctcttgtgatgagactgagatacagatcagcaaccaggaagaagctgagagacagccacttggccatgtcaccaaaacaaggagaaggtgcaagactgtccgtgtggaccctgactcacagaatcattcagagataaaaataagtaatcccactgaattccagaatcatgaaaagcaggaaagccaggatctcagagctactgcaaaagttccttctccaccagacgagcaccaagaagctgagaatgctgtttcctcaggtaacagagattcaaaggtaccttcagaaggaaagaaatctctctacacagatgagtcatccaaacctggaaaaaataaaagaactgcaatcactactccaaactttaagaagcttcatgaagctcattttaaggaaatggagtccattgatcaatatattgagagaaaaaagaaacattttgaagaacacaattccatgaatgaactgaagcagcagcccatcaataagggaggggtcaggactccagtacctccaagaggaagactctctgtggcttctactcccatcagccaacgacgctcgcaaggccggtcttgtggccctgcaagtcagagtaccttgggtctgaaggggtcactcaagcgctctgctatctctgcagctaaaacgggtgtcaggttttcagctgctactaaagataatgagcataagcgttcactgaccaagactccagccagaaagtctgcacatgtgaccgtgtctgggggcaccccaaaaggcgaggctgtgcttgggacacacaaattaaagaccatcacggggaattctgctgctgttattaccccattcaagttgacaactgaggcaacgcagactccagtctccaataagaaaccagtgtttgatcttaaagcaagtttgtctcgtcccctcaactatgaaccacacaaaggaaagctaaaaccatgggggcaatctaaagaaaataattatctaaatcaacatgtcaacagaattaacttctacaagaaaacttacaaacaaccccatctccagacaaaggaagagcaacggaagaaacgcgagcaagaacgaaaggagaagaaagcaaaggttttgggaatgcgaaggggcctcattttggctgaagattaataattttttaacatcttgtaaatattcctgtattctcaacttttttccttttgtaaattttttttttttgctgtcatccccactttagtcacgagatctttttctgctaactgttcatagtctgtgtagtgtccatgggttcttcatgtgctatgatctctgaaaagacgttatcaccttaaagctcaaattctttgggatggtttttacttaagtccattaacaattcaggtttctaacgagacccatcctaaaattctgtttctagatttttaatgtcaagttcccaagttccccctgctggttctaatattaacagaactgcagtcttctgctagccaatagcatttacctgatggcagctagttatgcaagcttcaggagaatttgaacaataacaagaatagggtaagctgggatagaaaggccacctcttcactctctatagaatatagtaacctttatgaaacggggccatatagtttggttatgacatcaatattttacctaggtgaaattgtttaggcttatgtaccttcgttcaaatatcctcatgtaattgccatctgtcactcactatattcacaaaaataaaactctacaactcattctaacattgcttacttaaaagctacatagccctatcgaaatgcgaggattaatgctttaatgcttttagagacagggtctcactgtgttgcccaggctggtctcaaactccaccaaatgtacttcttattcattttatggaaaagactaggctttgcttagtatcatgtccatgtttccttcacctcagtggagcttctgagttttatactgctcaagatcgtcataaataaaattttttctcattgtcataga

SEQ ID NO: 161143 - DNA, 2256 bp, Homo sapiens
  Payload ID: 11471
  Gene Symbol: NUSAP1
  Gene Name: nucleolar and spindle associated protein 1
  Uniprot ID: Q9BXS6
  ENST ID: ENST00000560747
  CDS Start-End: 73-1392
gccagggatttgaaccgcgctgacgaagtttggtgatccatcttccgagtatcgccgggatttcgaatcgcgatgatcatcccctctctagaggagctggactccctcaagtacagtgacctgcagaacttagccaagagtctgggtctccgggccaacctgagggcaaccaagttgttaaaagccttgaaaggctacattaaacatgaggcaagaaaaggaaatgagaatcaggatgaaagtcaaacttctgcatcctcttgtgatgagactgagatacagatcagcaaccaggaagaagctgagagacagccacttggccatgtcaccaaaacaaggagaaggtgcaagactgtccgtgtggaccctgactcacagaatcattcagagataaaaataagtaatcccactgaattccagaatcatgaaaagcaggaaagccaggatctcagagctactgcaaaagttccttctccaccagacgagcaccaagaagctgagaatgctgtttcctcaggtaacagagattcaaaggtaccttcagaaggaaagaaatctctctacacagatgagtcatccaaacctggaaaaaataaaagaactgcaatcactactccaaactttaagaagcttcatgaagctcattttaaggaaatggagtccattgatcaatatattgagagaaaaaagaaacattttgaagaacacaattccatgaatgaactgaagcagcccatcaataagggaggggtcaggactccagtacctccaagaggaagactctctgtggcttctactcccatcagccaacgacgctcgcaaggccggtcttgtggccctgcaagtcagagtaccttgggtctgaaggggtcactcaagcgctctgctatctctgcagctaaaacgggtgtcaggttttcagctgctactaaagataatgagcataagcgttcactgaccaagactccagccagaaagtctgcacatgtgaccgtgtctgggggcaccccaaaaggcgaggctgtgcttgggacacacaaattaaagaccatcacggggaattctgctgctgttattaccccattcaagttgacaactgaggcaacgcagactccagtctccaataagaaaccagtgtttgatcttaaagcaagtttgtctcgtcccctcaactatgaaccacacaaaggaaagctaaaaccatgggggcaatctaaagaaaataattatctaaatcaacatgtcaacagaattaacttctacaagaaaacttacaaacaaccccatctccagacaaaggaagagcaacggaagaaacgcgagcaagaacgaaaggagaagaaagcaaaggttttgggaatgcgaaggggcctcattttggctgaagattaataattttttaacatcttgtaaatattcctgtattctcaacttttttccttttgtaaattttttttttttgctgtcatccccactttagtcacgagatctttttctgctaactgttcatagtctgtgtagtgtccatgggttcttcatgtgctatgatctctgaaaagacgttatcaccttaaagctcaaattctttgggatggtttttacttaagtccattaacaattcaggtttctaacgagacccatcctaaaattctgtttctagatttttaatgtcaagttcccaagttccccctgctggttctaatattaacagaactgcagtcttctgctagccaatagcatttacctgatggcagctagttatgcaagcttcaggagaatttgaacaataacaagaatagggtaagctgggatagaaaggccacctcttcactctctatagaatatagtaacctttatgaaacggggccatatagtttggttatgacatcaatattttacctaggtgaaattgtttaggcttatgtaccttcgttcaaatatcctcatgtaattgccatctgtcactcactatattcacaaaaataaaactctacaactcattctaacattgcttacttaaaagctacatagccctatcgaaatgcgaggattaatgctttaatgcttttagagacagggtctcactgtgttgcccaggctggtctcaaactccaccaaatgtacttcttattcattttatggaaaagactaggctttgcttagtatcatgtccatgtttccttcacctcagtggagcttctgagttttatactgctcaagatcgtcataaataaaattttttctcattgtcataga

SEQ ID NO: 161144 - DNA, 1632 bp, Homo sapiens
  Payload ID: 11472
  Gene Symbol: NOC4L
  Gene Name: nucleolar complex associated 4 homolog
  Uniprot ID: Q9BVI4
  ENST ID: ENST00000330579
  CDS Start-End: 42-1592
ccggcggctgagaatccgcgttgttccgtgttgggggcggcatggagcgggagccgggcgccgcgggagttcgccgggctctgggccgccggctggaggcggtgctggcgagccgcagtgaggccaacgccgtgttcgacatcctggccgtgctgcagtctgaggaccaggaggagatccaggaagcagtccgcacgtgcagccgtcttttcggggccttgctggagcggggagagctgtttgtgggccagctgccctctgaggagatggtcatgacagggtcccagggagccacacggaagtacaaggtgtggatgagacaccgctatcacagctgctgcaatcgcttgggagagctcctgggccacccctcctttcaggtcaaggagctggccctcagcgcactcctgaagttcgtgcagctggaaggagcgcaccccctggagaagtccaagtgggaaggcaactacctgttcccccgagagctcttcaagttggtggtgggaggcctgctgtctcctgaggaggaccagagcctgctcctgtcccagttccgggagtacctggactacgacgacacccgctaccacaccatgcaggcagccgtggatgccgtggcccgggtcactggccagcaccccgaggtgccccccgccttttggaacaatgccttcacgctgctgtctgccgtgagcctgccccgccgggagcccaccgtctccagcttctatgtgaagcgggcggagctgtgggacacctggaaggttgctcacctgaaggagcacaggagggttttccaggccatgtggctcagcttcctcaagcacaagctgcccctcagcctctacaagaaggtgctgctgattgtgcatgacgccatcctgccgcagctggcgcagcccacgctcatgatcgacttcctcacccgcgcctgcgacctcgggggggccctcagcctcttggccttgaacgggctgttcatcttgattcacaaacacaacctggagtaccctgacttctaccggaagctctacggcctcttggacccctctgtctttcacgtcaagtaccgcgcccgcttcttccacctggctgacctcttcctgtcctcctcccacctccccgcctacctggtggccgccttcgccaagcggctggcccgcctggccctgacggctccccctgaggccctgctcatggtcctgcctttcatctgtaacctgctgcgccggcaccctgcctgccgggtcctcgtgcaccgtccacacggccctgagttggacgccgacccctacgaccctggagaggaggacccagcccagagccgggccttggagagctccctgtgggagcttcaggccctccagcgccactaccaccctgaggtgtccaaagccgccagcgtcatcaaccaggccctgtccatgcctgaggtcagcatcgcgccactgctggagctcacggcctacgagatctttgagcgggacctgaagaagaaggggcccgagccggtgccactggagtttatcccagcccagggcctgctgggacggccgggtgaactctgtgcccagcacttcacgctcagctgaccctggcccacctgtgaataaatctcagctgaccccagcc

SEQ ID NO: 161145 - DNA, 1009 bp, Homo sapiens
  Payload ID: 11472
  Gene Symbol: NOC4L
  Gene Name: nucleolar complex associated 4 homolog
  ENST ID: ENST00000541954
  CDS Start-End: 199-1009
cgagggggaagggaacgggttgggggcagcctaggcaggggcgaaggtgacagttggcggccgggcaccctgccgccgcctctcctgcagtctgaggaccaggaggagatccaggaagcagtccgcacgtgcagccgtcttttcggggccttgctggagcggggagagctgtttgtgggccagctgccctctgaggagatggtcatgacagggtcccagggagccacacggaagtacaaggtgtggatgagacaccgctatcacagctgctgcaatcgcttgggagagctcctgggccacccctcctttcaggtcaagacgctcctcataagggggatcatacggtatgtggcttcttccactcatcggcgtgttcgaagttcgttctctttgtggctgagtagcagcgcgtcgtatagcacagcacgtatcgttcagccgctcgagctggccctcagcgcactcctgaagttcgtgcagctggaaggagcgcaccccctggagaagtccaagtgggaaggcaactacctgttcccccgagagctcttcaagttggtggtgggaggcctgctgtctcctgaggaggaccagagcctgctcctgtcccagttccgggagtacctggactacgacgacacccgctaccacaccatgcaggcagccgtggatgccgtggcccgggtcactggccagcaccccgaggtgccccccgccttttggaacaatgccttcacgctgctgtctgccgtgagcctgccccgccgggagcccaccgtctccagcttctatgtgaagcgggcggagctgtgggacacctggaaggttgctcacctgaaggagcacaggagggttttccaggccatgtggctcagcttcctcaagcacaagctgcccctcagcctctacaagaaggtgctgctgattgtgcatgacgccatcctgccgcagctggcgcagcccacgctcatgatcgacttcctcacccgcgcctgcgacctcggtgagtgcc

SEQ ID NO: 161146 - DNA, 3333 bp, Homo sapiens
  Payload ID: 11473
  Gene Symbol: NOL10
  Gene Name: nucleolar protein 10
  Uniprot ID: Q9BSC4
  ENST ID: ENST00000345985
  CDS Start-End: 112-2028
cggcgccagcggccgcacgccgcggagcaggggctcggaggtcccgggattacggtgctcgagcacgctggtgggaaaggacccgggacttgaacagtgttgtgcggcgccatgcaggtctccagcctcaatgaggtgaagatttacagcctcagctgcggcaagtcccttcctgagtggctttctgataggaagaagagagcgctacagaagaaagatgtagatgtccgtaggagaattgaacttattcaggactttgaaatgcctactgtgtgtaccactattaaggtgtcaaaagatggacagtacattttagcaactggaacatataaacctcgggttcgatgttatgacacctatcaattatccttgaagtttgaaaggtgtttagattcagaagttgtcacctttgaaattttgtctgatgactactcaaagattgtcttcttacataatgatagatacattgaatttcattcgcaatcaggtttttactacaaaaccagaataccaaagtttgggagagatttctcttaccactatccatcctgtgacttgtactttgttggtgcaagttctgaagtttataggttaaacttagaacaaggacgatacctgaatcctctacaaactgatgctgcggagaataatgtttgtgacataaattcagtgcatggcttgtttgccacaggaaccatagagggtagagtggagtgctgggacccaagaactcgaaacagagttggcctgttagactgcgccttaaacagtgtcacagcagattcagagataaacagtttaccaacaatctctgctttgaaatttaatggtgccttgaccatggcagttggaacaaccacagggcagggaaaaatatttacttccttggagccagagcatgaccttaatgatgtttgtctctaccccaactcaggcatgcttctgacggccaatgaaacccccaagatgggcatctattacattccagttttgggtcctgctcctcggtggtgttccttcttagacaacttgaccgaagaattagaagagaatccagaaagcacagtctatgatgattataaatttgtcaccaagaaagaccttgaaaatttagggctcacccacctcattggatctcctttcctccgggcatatatgcatgggtttttcatggatataagactctatcacaaggtgaaactgatggtaaatccatttgcttatgaagaatataggaaagataaaatacgacagaaaatagaagaaacacgtgcacagagagtccagttaaagaaattgccaaaagttaacaaagagctggcacttaaattaattgaggaagaagaggagaagcagaaatctacatggaaaaagaaagttaagagtcttcctaatattctcaccgatgatcgatttaaagttatgtttgagaaccctgacttccaagtagatgaagagagtgaagaatttaggcttctgaatccacttgtttcaaaaattagtgaaaaaaggaagaagaaactaagactcttagagcaacaagaacttcgtgaaaaagaagaggaggaagagccggaaggaaaaccaagtgatgcagaaagttcggagagttcagatgatgaaaaagcctgggttgaagaggtcaggaagcaacgcagactcctccagcaggaggaaaaagtgaagcggcaggaacgactcaaggaggaccagcagacagtcctaaagccccagttttatgagatcaaagcaggagaagaatttagaagcttcaaagattctgccacaaagcagaaactgatgaacaaaacccttgaagatcgtttgaaaattgaagcaaaaaatgggacattgagtgtatccgacaccaccgttggcagcaaacaattgacattcacgttaaagaggtctgaacagcagaagaagcaacaggaggctgagaaactgcatcgacaagaaaggaaaagactccgtcgttcggccggacacctgaagtcaagacacaaaagaggacggtcgtttcattgatttgggaagtggtcctacctgtgattagggaggggtacgtctcccccaaactgatcatcgttagggtgttaaacacagacgaggaaacacacgtttttaaagttcatgtacgttcttgtacacagaggtaaagatttgaaaacctgtgccttgtgggttggactttgaagctggccccgccgacggccaccgcacagccccaggggtgtgcttgcgagtcgttgctccctggaaacattgtcctttccccacggcgttaatcatgaaaaccaggctggggtttttttaatattgtgaaatgtacaccatgaaatgaaaggtttatcctgtgccagaaaccaaggtttatcatgctctaggaacttttttcttacactgcctaccgccattcatgattaaaccatccagaaataccatccctgttttacctggtgtctgtgtattgcctgtgtttgtgtttataagtttatgctgataggtttgttcggcttgtttatgtattagtttgggatttgtttttaaataatttataccaagagagtataatctaatggtgcaggttgagagcatcccaaatccgaaaatctaaaactgtttgagcactgtatttatctgttcttgcactgctataaagaactacctgaaactgggtaatttataagtaaagaaaagaggtttaattgactcacagttctacaggtggtacaggaagcatggctgtggaggccctgggaagcttacaatcgtggcagaaggtgaagcggaagcaggtatgtcctgcgtggctagagccagaggaggagggcaaaggggcagatgctgcacactttcaaacaccagatctccaagaactcactaacacagaatagcaagggggaagtctgcccccatgtttcagtcacctccctccaggcccctcctccaacaccgaagattacaatttgacatgagatttgtgtggggacacagagcaaaaccatatcaagcactgacatgacattggaggaaaatgctcattagagcttttcaggttttggattttcagatttgggatacttgactagtaaatataatacagatattccaaaacacacaaaaaaaccaaagtctaaaagacttctggtcccaagcatttcagataagggatacccaacctgtaataatgggaaacaagcagtagaggctgttggttaatcttggcacaagtttaattacaggttttttttttttcctgtttcttaagtacagtcaaacataaacttactggaggaaacatttataaaaataaatatactttcatttgaa

SEQ ID NO: 161147 - DNA, 2589 bp, Homo sapiens
  Payload ID: 11473
  Gene Symbol: NOL10
  Gene Name: nucleolar protein 10
  Uniprot ID: Q9BSC4
  ENST ID: ENST00000381685
  CDS Start-End: 107-2173
ccagcggccgcacgccgcggagcaggggctcggaggtcccgggattacggtgctcgagcacgctggtgggaaaggacccgggacttgaacagtgttgtgcggcgccatgcaggtctccagcctcaatgaggtgaagatttacagcctcagctgcggcaagtcccttcctgagtggctttctgataggaagaagagagcgctacagaagaaagatgtagatgtccgtaggagaattgaacttattcaggactttgaaatgcctactgtgtgtaccactattaaggtgtcaaaagatggacagtacattttagcaactggaacatataaacctcgggttcgatgttatgacacctatcaattatccttgaagtttgaaaggtgtttagattcagaagttgtcacctttgaaattttgtctgatgactactcaaagattgtcttcttacataatgatagatacattgaatttcattcgcaatcaggtttttactacaaaaccagaataccaaagtttgggagagatttctcttaccactatccatcctgtgacttgtactttgttggtgcaagttctgaagtttataggttaaacttagaacaaggacgatacctgaatcctctacaaactgatgctgcggagaataatgtttgtgacataaattcagtgcatggcttgtttgccacaggaaccatagagggtagagtggagtgctgggacccaagaactcgaaacagagttggcctgttagactgcgccttaaacagtgtcacagcagattcagagataaacagtttaccaacaatctctgctttgaaatttaatggtgccttgaccatggcagttggaacaaccacagggcaggttttattatatgaccttcgatctgataagccattgctagttaaagatcaccagtatgggctgcccattaagtccgttcatttccaggattcattagatctgattttgtctgctgactctcgaattgtcaagatgtggaataagaactccggaaaaatatttacttccttggagccagagcatgaccttaatgatgtttgtctctaccccaactcaggcatgcttctgacggccaatgaaacccccaagatgggcatctattacattccagttttgggtcctgctcctcggtggtgttccttcttagacaacttgaccgaagaattagaagagaatccagaaagcacagtctatgatgattataaatttgtcaccaagaaagaccttgaaaatttagggctcacccacctcattggatctcctttcctccgggcatatatgcatgggtttttcatggatataagactctatcacaaggtgaaactgatggtaaatccatttgcttatgaagaatataggaaagataaaatacgacagaaaatagaagaaacacgtgcacagagagtccagttaaagaaattgccaaaagttaacaaagagctggcacttaaattaattgaggaagaagaggagaagcagaaatctacatggaaaaagaaagttaagagtcttcctaatattctcaccgatgatcgatttaaagttatgtttgagaaccctgacttccaagtagatgaagagagtgaagaatttaggcttctgaatccacttgtttcaaaaattagtgaaaaaaggaagaagaaactaagactcttagagcaacaagaacttcgtgaaaaagaagaggaggaagagccggaaggaaaaccaagtgatgcagaaagttcggagagttcagatgatgaaaaagcctgggttgaagaggtcaggaagcaacgcagactcctccagcaggaggaaaaagtgaagcggcaggaacgactcaaggaggaccagcagacagtcctaaagccccagttttatgagatcaaagcaggagaagaatttagaagcttcaaagattctgccacaaagcagaaactgatgaacaaaacccttgaagatcgtttgaaaattgaagcaaaaaatgggacattgagtgtatccgacaccaccgttggcagcaaacaattgacattcacgttaaagaggtctgaacagcagaagaagcaacaggaggctgagaaactgcatcgacaagaaaggaaaagactccgtcgttcggccggacacctgaagtcaagacacaaaagaggacggtcgtttcattgatttgggaagtggtcctacctgtgattagggaggggtacgtctcccccaaactgatcatcgttagggtgttaaacacagacgaggaaacacacgtttttaaagttcatgtacgttcttgtacacagaggtaaagatttgaaaacctgtgccttgtgggttggactttgaagctggccccgccgacggccaccgcacagccccaggggtgtgcttgcgagtcgttgctccctggaaacattgtcctttccccacggcgttaatcatgaaaaccaggctggggtttttttaatattgtgaaatgtacaccatgaaatgaaaggtttatcctgtgccagaaaccaaggtttatcatgctctaggaacttttttcttacactgcctaccgccattcatgattaaaccatccagaaatacca

SEQ ID NO: 161148 - DNA, 827 bp, Homo sapiens
  Payload ID: 11473
  Gene Symbol: NOL10
  Gene Name: nucleolar protein 10
  ENST ID: ENST00000431319
  CDS Start-End: 1-759
attgtcttcttacataatgatagatacattgaatttcattcgcaatcaggtttttactacaaaaccagaataccaaagtttgggagagatttctcttaccactatccatcctgtgacttgtactttgttggtgcaagttctgaagtttataggttaaacttagaacaaggacgatacctgaatcctctacaaactgatgctgcggagaataatgtttgtgacataaattcagtgcatggcttgtttgccacaggaaccatagagggtagagtggagtgctgggacccaagaactcgaaacagagttggcctgttagactgcgccttaaacagtgtcacagcagattcagagataaacagtttaccaacaatctctgctttgaaatttaatggtgccttgaccatggcagttggaacaaccacagggcaggttttattatatgaccttcgatctgataagccattgctagttaaagatcaccagtatgggctgcccattaagtccgttcatttccaggattcattagatctgattttgtctgctgactctcgaattgtcaagatgtggaataagaactccggaaaaatatttacttccttggagccagagcatgaccttaatgatgtttgtctctaccccaactcaggcatgcttctgacggccaatgaaacccccaagatgggcatctattacattccattctctaaaccagtgctgtccagttctctaaaccaaagtctgccaccagcgtttctgtgatgacggacacgttctatatctgctgtgtcctgtgtggtagccattagtcacatgtagctgttgagcac

SEQ ID NO: 161149 - DNA, 3418 bp, Homo sapiens
  Payload ID: 11473
  Gene Symbol: NOL10
  Gene Name: nucleolar protein 10
  Uniprot ID: Q9BSC4
  ENST ID: ENST00000538384
  CDS Start-End: 127-2115
aagtgcgtcatcagtcggcgccagcggccgcacgccgcggagcaggggctcggaggtcccgggattacggtgctcgagcacgctggtgggaaaggacccgggacttgaacagtgttgtgcggcgccatgcaggtctccagcctcaatgaggtgaagatttacagcctcagctgcggcaagtcccttcctgagtggctttctgataggaagaagagagcgctacagaagaaagatgtagatgtccgtaggagaattgaacttattcaggactttgaaatgcctactgtgtgtaccactattaaggtgtcaaaagatggacagtacattttagcaactgttgtcacctttgaaattttgtctgatgactactcaaagattgtcttcttacataatgatagatacattgaatttcattcgcaatcaggtttttactacaaaaccagaataccaaagtttgggagagatttctcttaccactatccatcctgtgacttgtactttgttggtgcaagttctgaagtttataggttaaacttagaacaaggacgatacctgaatcctctacaaactgatgctgcggagaataatgtttgtgacataaattcagtgcatggcttgtttgccacaggaaccatagagggtagagtggagtgctgggacccaagaactcgaaacagagttggcctgttagactgcgccttaaacagtgtcacagcagattcagagataaacagtttaccaacaatctctgctttgaaatttaatggtgccttgaccatggcagttggaacaaccacagggcaggttttattatatgaccttcgatctgataagccattgctagttaaagatcaccagtatgggctgcccattaagtccgttcatttccaggattcattagatctgattttgtctgctgactctcgaattgtcaagatgtggaataagaactccggaaaaatatttacttccttggagccagagcatgaccttaatgatgtttgtctctaccccaactcaggcatgcttctgacggccaatgaaacccccaagatgggcatctattacattccagttttgggtcctgctcctcggtggtgttccttcttagacaacttgaccgaagaattagaagagaatccagaaagcacagtctatgatgattataaatttgtcaccaagaaagaccttgaaaatttagggctcacccacctcattggatctcctttcctccgggcatatatgcatgggtttttcatggatataagactctatcacaaggtgaaactgatggtaaatccatttgcttatgaagaatataggaaagataaaatacgacagaaaatagaagaaacacgtgcacagagagtccagttaaagaaattgccaaaagttaacaaagagctggcacttaaattaattgaggaagaagaggagaagcagaaatctacatggaaaaagaaagttaagagtcttcctaatattctcaccgatgatcgatttaaagttatgtttgagaaccctgacttccaagtagatgaagagagtgaagaatttaggcttctgaatccacttgtttcaaaaattagtgaaaaaaggaagaagaaactaagactcttagagcaacaagaacttcgtgaaaaagaagaggaggaagagccggaaggaaaaccaagtgatgcagaaagttcggagagttcagatgatgaaaaagcctgggttgaagaggtcaggaagcaacgcagactcctccagcaggaggaaaaagtgaagcggcaggaacgactcaaggaggaccagcagacagtcctaaagccccagttttatgagatcaaagcaggagaagaatttagaagcttcaaagattctgccacaaagcagaaactgatgaacaaaacccttgaagatcgtttgaaaattgaagcaaaaaatgggacattgagtgtatccgacaccaccgttggcagcaaacaattgacattcacgttaaagaggtctgaacagcagaagaagcaacaggaggctgagaaactgcatcgacaagaaaggaaaagactccgtcgttcggccggacacctgaagtcaagacacaaaagaggacggtcgtttcattgatttgggaagtggtcctacctgtgattagggaggggtacgtctcccccaaactgatcatcgttagggtgttaaacacagacgaggaaacacacgtttttaaagttcatgtacgttcttgtacacagaggtaaagatttgaaaacctgtgccttgtgggttggactttgaagctggccccgccgacggccaccgcacagccccaggggtgtgcttgcgagtcgttgctccctggaaacattgtcctttccccacggcgttaatcatgaaaaccaggctggggtttttttaatattgtgaaatgtacaccatgaaatgaaaggtttatcctgtgccagaaaccaaggtttatcatgctctaggaacttttttcttacactgcctaccgccattcatgattaaaccatccagaaataccatccctgttttacctggtgtctgtgtattgcctgtgtttgtgtttataagtttatgctgataggtttgttcggcttgtttatgtattagtttgggatttgtttttaaataatttataccaagagagtataatctaatggtgcaggttgagagcatcccaaatccgaaaatctaaaactgtttgagcactgtatttatctgttcttgcactgctataaagaactacctgaaactgggtaatttataagtaaagaaaagaggtttaattgactcacagttctacaggtggtacaggaagcatggctgtggaggccctgggaagcttacaatcgtggcagaaggtgaagcggaagcaggtatgtcctgcgtggctagagccagaggaggagggcaaaggggcagatgctgcacactttcaaacaccagatctccaagaactcactaacacagaatagcaagggggaagtctgcccccatgtttcagtcacctccctccaggcccctcctccaacaccgaagattacaatttgacatgagatttgtgtggggacacagagcaaaaccatatcaagcactgacatgacattggaggaaaatgctcattagagcttttcaggttttggattttcagatttgggatacttgactagtaaatataatacagatattccaaaacacacaaaaaaaccaaagtctaaaagacttctggtcccaagcatttcagataagggatacccaacctgtaataatgggaaacaagcagtagaggctgttggttaatcttggcacaagtttaattacaggttttttttttttcctgtttcttaagtacagtcaaacataaacttactggaggaaacatttataaaaataaatatactttcatttg

SEQ ID NO: 161150 - DNA, 2947 bp, Homo sapiens
  Payload ID: 11474
  Gene Symbol: NOL11
  Gene Name: nucleolar protein 11
  Uniprot ID: Q9H8H0
  ENST ID: ENST00000253247
  CDS Start-End: 116-2275
gcgagagcaggttcctggtttggcaagcactcgccccctcaggcccgttcattctcgcgagagaaagcgcgaggcctgccgggagtgagcgcggccgtacttaggtttgctcaaaatggcagcgctggaggaagaattcacgttgtcttcggtagtcctgagcgccgggcctgaaggactcctaggcgtggagcagagcgacaaaacagaccagtttctagtgacagacagcggcaggacagtcatcctctataaggtttctgatcagaaacccttggggagctggtcagtgaaacaaggtcaaattataacatgtccagctgtgtgcaactttcaaactggagagtatgttgttgtacacgataataaggttttaagaatatggaataatgaagatgtaaacctggataaagtatttaaagctacattgtcagcagaagtatataggatactttcagtgcaagggacagaacccttggtgctcttcaaggaaggtgctgttcgtggtttagaggccttgcttgcagacccccagcagaaaattgaaactgttatctctgatgaagaagtgattaaatggacaaagtttttcgtagtattcagacatcctgttttaatttttattactgaaaaacatggaaattactttgcttacgtgcaaatgtttaactcacgtatcttaaccaaatatacactcttacttggacaagacgaaaactctgttataaagagttttactgcatctgtagatcggaaattcatctctttgatgtcattaagctctgatggttgtatatatgaaaccttgataccaatacgtccagctgacccagaaaaaaatcagagcttagttaaatcactgctgctcaaggctgttgtatctggtaacgctcgaaatggagttgcactcactgccctggatcaggatcacgtcgcagtcctaggaagtccactagcagcttctaaggaatgcctctctgtatggaacataaaatttcaaacactacagacttcaaaagagttaccacaagggaccagtggtcaactctggtattatggagaacatttgtttatgctacatggaaaatctctaactgtgattccatacaagtgtgaagtgtcatcattagcaggtgctcttggaaaactcaagcatagtcaagatccaggaactcatgtcgtgtcccattttgtaaactgggagacacctcaaggatgtggacttgggttccagaactcagagcagtcaagaagaattttaaggagacgaaaaattgaagtgagtttacagccagaggttccaccatccaaacaacttttgtcaaccataatgaaagattcagaaaaacacattgaagtagaagtacggaaatttttggctctgaagcagacacctgactttcatactgtcattggggacacagtaacaggacttctggaaaggtgtaaagcagaaccatcattttatccccggaactgtctgatgcagcttatccaaacgcatgtgctttcttacagtttgtgccccgacttaatggagattgccttaaaaaagaaagatgtacagttgttacaactctgtctacagcagttccctgacattcctgaatcagtcacctgtgcttgcttaaaaattttcttgagcattggtgatgacagtcttcaagaaacagatgttaatatggagtcagtttttgactatagtataaattctgtacatgatgagaaaatggaagagcaaactgaaattcttcaaaatggcttcaatcctgaagaagataaatgcaataactgtgatcaagagttaaataaaaagccccaggacgaaacaaaggagagcacttcatgccctgtggtacaaaaaagagcagctctacttaatgcaattcttcattcagcatatagcgagacatttcttctgcctcatttgaaagacatcccagcacagcatatcacgctgtttcttaagtatttgtatttcctgtacctgaagtgtagcgaaaatgctactatgactcttcctggaatacacccacctaccttgaaccagattatggattggatatgtctacttctggatgcaaattttactgttgttgtaatgatgccagaagcaaagaggctactgataaatctttacaagcttgtaaaatctcagatatctgtttattctgagctcaacaagattgaagtaagttttcgggagctacagaaattaaatcaagaaaagaataatagaggattatattcaattgaagtgctggagctcttctgatattatcaattctccttcatagacattttataaagctcttttatgtgaactcttgcttcatccaggcaagaacggtgttttgtttgcgaccatctcagtgtcaagagaaacgtgtcagtgagtacctggaccatcacttaactgatgctccggggtaggactgcaggtttcacatgaacctgttctaggctgtggacattggtgtggagaggttctgcaattttttaaaaatatgtaactgggttgattttaagtaaaattatttgtgtattgataaaagtctaatttcttatcatgtgttttgaattttttcttttaataaaaaatgaccattgaagcagtgattctaggaagaatgtaattttatcagagtcagaagctgcccctgctcatttgttccacagctcacctttatttcacacatttgcagtgtgtcttctgccacaagcagggcagagaggggccctcacacaggcacgtgattgcctcctgcggtctcccctgtcctttaggacaaatgaaaagttcaagtgtgattctacagcccagctttacagaaagaatcctgatggctgaatttaccttgcagtagtgaaaagctgcgttttaggtcaggcactgtatgtaaactttagtcacacatgtggccgttaataaacaggttctcctcca

SEQ ID NO: 161151 - DNA, 2448 bp, Homo sapiens
  Payload ID: 11474
  Gene Symbol: NOL11
  Gene Name: nucleolar protein 11
  Uniprot ID: Q9H8H0
  ENST ID: ENST00000581375
  CDS Start-End: 4-513
aaaatggcagcgctggaggaagaattcacgttgtcttcggtagtcctgagcgccgggcctgaaggactcctaggcgtggagcagagcgacaaaacagaccagtttctagtgacagacagcggcaggacagtcatcctctataaggtttctgatcagaaacccttggggagctggtcagtgaaacaaggtcaaattataacatgtccagctgtgtgcaactttcaaactggagagtatgttgttgtacacgataataaggttttaagaatatggaataatgaagatgtaaacctggataaagtatttaaagctacattgtcagcagaagtatataggatactttcagtgcaagggacagaacccttggtgctcttcaaggaaggtgctgttcgtggtttagaggccttgcttgcagacccccagcagaaaattgaaactgttatctctgatgaagaagtgattaacatggaaattactttgcttacgtgcaaatgtttaactcacgtatcttaaccaaatatacactcttacttggacaagacgaaaactctgttataaagagttttactgcatctgtagatcggaaattcatctctttgatgtcattaagctctgatggttgtatatatgaaaccttgataccaatacgtccagctgacccagaaaaaaatcagagcttagttaaatcactgctgctcaaggctgttgtatctggtaacgctcgaaatggagttgcactcactgccctggatcaggatcacgtcgcagtcctaggaagtccactagcagcttctaaggaatgcctctctgtatggaacataaaatttcaaacactacagacttcaaaagagttaccacaagggaccagtggtcaactctggtattatggagaacatttgtttatgctacatggaaaatctctaactgtgattccatacaagtgtgaagtgtcatcattagcaggtgctcttggaaaactcaagcatagtcaagatccaggaactcatgtcgtgtcccattttgtaaactgggagacacctcaaggatgtggacttgggttccagaactcagagcagtcaagaagaattttaaggagacgaaaaattgaagtgagtttacagccagaggttccaccatccaaacaacttttgtcaaccataatgaaagattcagaaaaacacattgaagtagaagtacggaaatttttggctctgaagcagacacctgactttcatactgtcattggggacacagtaacaggacttctggaaaggtgtaaagcagaaccatcattttatccccggaactgtctgatgcagcttatccaaacgcatgtgctttcttacagtttgtgccccgacttaatggagattgccttaaaaaagaaagatgtacagttgttacaactctgtctacagcagttccctgacattcctgaatcagtcacctgtgcttgcttaaaaattttcttgagcattggtgatgacagtcttcaagaaacagatgttaatatggagtcagtttttgactatagtataaattctgtacatgatgagaaaatggaagagcaaactgaaattcttcaaaatggcttcaatcctgaagaagataaatgcaataactgtgatcaagagttaaataaaaagccccaggacgaaacaaaggagagcacttcatgccctgtggtacaaaaaagagcagctctacttaatgcaattcttcattcagcatatagcgagacatttcttctgcctcatttgaaagacatcccagcacagcatatcacgctgtttcttaagtatttgtatttcctgtacctgaagtgtagcgaaaatgctactatgactcttcctggaatacacccacctaccttgaaccagattatggattggatatgtctacttctggatgcaaattttactgttgttgtaatgatgccagaagcaaagaggctactgataaatctttacaagcttgtaaaatctcagatatctgtttattctgagctcaacaagattgaagtaagttttcgggagctacagaaattaaatcaagaaaagaataatagaggattatattcaattgaagtgctggagctcttctgatattatcaattctccttcatagacattttataaagctcttttatgtgaactcttgcttcatccaggcaagaacggtgttttgtttgcgaccatctcagtgtcaagagaaacgtgtcagtgagtacctggaccatcacttaactgatgctccggggtaggactgcaggtttcacatgaacctgttctaggctgtggacattggtgtggagaggttctgcaattttttaaaaatatgtaactgggttgattttaagtaaaattatttgtgtattgataaaagtctaatttcttatcatgtgttttgaattttttcttttaataaaaaatgaccattgaagcagtg

SEQ ID NO: 161152 - DNA, 443 bp, Homo sapiens
  Payload ID: 11474
  Gene Symbol: NOL11
  Gene Name: nucleolar protein 11
  ENST ID: ENST00000583021
  CDS Start-End: 1-257
gtagcgaaaatgctactatgactcttcctggaatacacccacctaccttgaaccagattatggattggatatgtctacttctggatgcaaattttactgttgttgtaatgatgccagaagcaaagaggctactgataaatctttacaagcttgtaaaatctcaggcaagaacggtgttttgtttgcgaccatctcagtgtcaagagaaacgtgtcagtgagtacctggaccatcacttaactgatgctccggggtaggactgcaggtttcacatgaacctgttctaggctgtggacattggtgtggagaggttctgcaattttttaaaaatatgtaactgggttgattttaagtaaaattatttgtgtattgataaaagtctaatttcttatcatgtgttttgaattttttcttttaataaaaaatgaccattgaagcagtga

SEQ ID NO: 161153 - DNA, 584 bp, Homo sapiens
  Payload ID: 11474
  Gene Symbol: NOL11
  Gene Name: nucleolar protein 11
  ENST ID: ENST00000581106
  CDS Start-End: 18-584
acttaggtttgctcaaaatggcagcgctggaggaagaattcacgttgtcttcggtagtcctgagcgccgggcctgaaggactcctaggcgtggagcagagcgacaaaacagaccagtttctagtgacagacagcggcaggacagtcatcctctataagaggtttggccggacgcggtggttcacgcctgtaatcccagaacttcgggaggcccaggtttctgatcagaaacccttggggagctggtcagtgaaacaaggtcaaattataacatgtccagctgtgtgcaactttcaaactggagagtatgttgttgtacacgataataaggttttaagaatatggaataatgaagatgtaaacctggataaagtatttaaagctacattgtcagcagaagtatataggatactttcagtgcaagggacagaacccttggtgctcttcaaggaaggtgctgttcgtggtttagaggccttgcttgcagacccccagcagaaaattgaaactgttatctctgatgaagaagtgattaaatggacaaagtttttcgtagtattcagacatcctgttttaatttttatt

SEQ ID NO: 161154 - DNA, 815 bp, Homo sapiens
  Payload ID: 11474
  Gene Symbol: NOL11
  Gene Name: nucleolar protein 11
  ENST ID: ENST00000580833
  CDS Start-End: 1-815
gttcgtggtttagaggccttgcttgcagacccccagcagaaaattgaaactgttatctctgatgaagaagtgattaaatggacaaagtttttcgtagtattcagacatcctgttttaatttttattactgaaaaacatggaaattactttgcttacgtgcaaatgtttaactcacgtatcttaaccaaatatacactcttacttggacaagacgaaaactctgttataaagagttttactgcatctgtagatcggaaattcatctctttgatgtcattaagctctgatggttgtatatatgaaaccttgataccaatacgtccagctgacccagaaaaaaatcagagcttagttaaatcactgctgctcaaggctgttgtatctggtaacgctcgaaatggagttgcactcactgccctggatcaggatcacgtcgcagtcctaggaagtccactagcagcttctaagggaactcatgtcgtgtcccattttgtaaactgggagacacctcaaggatgtggacttgggttccagaactcagagcagtcaagaagaattttaaggagacgaaaaattgaagtgagtttacagccagaggttccaccatccaaacaacttttgtcaaccataatgaaagattcagaaaaacacattgaagtagaagtacggaaatttttggctctgaagcagacacctgactttcatactgtcattggggacacagtaacaggacttctggaaaggtgtaaagcagaaccatcattttatccccggaactgtctgatgcagcttatccaaacgcatgtgctttctta

SEQ ID NO: 161155 - DNA, 2854 bp, Homo sapiens
  Payload ID: 11475
  Gene Symbol: NOL12
  Gene Name: nucleolar protein 12
  Uniprot ID: Q9UGY1
  ENST ID: ENST00000359114
  CDS Start-End: 71-712
gcgcccgggaggatgagtacgctacacccggaagtgtcttcagggagaggaagccggcggcctcactgctatgggccgcaacaagaagaagaagcgagatggtgacgaccggcggccgaggctcgttcttagcttcgacgaggagaagaggcgggagtacctgacaggcttccacaagcggaaggtcgagcgaaagaaggcagccattgaggagattaagcagcggctgaaagaggagcagaggaagcttcgggaggagcgccaccaggaatacttgaagatgctggcagagagagaagaggctctggaggaggcagatgagctggaccggttggtgacagcaaagacggagtcggtgcagtatgaccaccccaaccacacagtcaccgtgaccaccatcagtgacctggacctctcgggggcccggctgctcgggctgaccccacctgagggaggggctggagacaggtctgaggaggaggcgtcatccacggagaaaccaaccaaagccttgcccaggaagtccagagaccccctgctctctcagcggatctcctccctcacagcatcactacatgcacacagccgcaaaaaggtcaagaggaaacatccccgacgggcccaggactccaaaaagcccccaagggcccctcgtaccagcaaggcccagcgccgccgtctcacaggcaaagcacggcacagcggggagtgagaccgagaacgaagcggtgccccagtctaggctgcggggacctgtccttgctcagcttggctgtccctgtagcccagcctgcacctaggtaatgactgcacagctcaaggttgggaagccaggacctctctggcctggggccagctgcctttgcctggggtcagctgcctttgcctggggtttgaattcccgaaggagcaggcagctgagagcaggcctcccccaggaagagccttcagagccacgtgggggcatcttcccaaatgtgcaccccacctggcactcatcagatttgtgcgcttgtgatttgtttgtccttgataccacgcacaagggcaggtttttggggtggtggaaatggccagggcccatgggtctgtctccagcagttagccctgtggctgcaataaagtacagttctccctgtgttaagatcctaaccagggttaaggatcagtgtgtccgttgctagaatccagagcccacctgctgctctgaaaagcaggctcctgaggccagtgggggagcagtgccccccatgcccttcaccgaggagcctctgtgcctgtcccttgtcctcggccccaggagtctcctcaactgacactgaagtggtggaagcagttgagtgccaggtcatcccccatcaccacactggggcagcgtccccaggcttccagcagctcccaggtgggtcccaacgtggaaggattaattaattctttctaaagcagttgcagccgggcttggtggctcacgcctgtaatcccagcactttgggaggcccaggcgggcagatcacttaaggtcgggagctcgagaccagcctggccaacatggtgaaaccctgtctctactaaaaatgcaaaaattagccaggtgtggtggcacacgcgtgtaatcccagctacttgggaggctgaggtggaagaatcacttgaaccctggaggcggaggctgcagtgagccgagatcacgccattgcactccagcctgggcaacgttgtgaccttgtctcaaaaaaaaactaaaaaataaagcagttgcatcttgactcgtacaaaagtagcccccaccagagtagaccctgcgggtgccagctagaactccacaaggggccatgtcttcacactccttccagatggatgagttgatggaaaccctgtcccttccttgtcccagcttgtcagtcctgggcaggagagaatttcaggttgtgccttggttagaggagctgtgttgggtcctaaacactaggaccacaaaggggagtgaactgtgttcccagggcttgctgacgcccgtggactatggagtcaggatgacaggacagtgcggtgaggggcatctgcgacaggactgcgggctctacccgccctgatgtgggagctcctggagtgggggtgagcagtgagccagggtctgcagggctgtcctctctccacagccaacagccaggccttacagtggggcaggcttagtgactgtgcctcagttatgctgtacctgggagtgggcaggccctctcccatgtcaccatcaaaacccactgatgaaggctggtgggagtctgagggctgcacccgggtatggtgagttcccctcagggattgtgctgagcgccttggcctggcttcttggctccgcccacctgctctccctgccaccaagttgtcttccccgggtggcatgtgccacttggctgcctcgtgcctgggcacagtggtgcctattatgggccctccaggtggctctggtgctcagcctgctgtgagcaggaacagctgagtcccaggggttcttgcacacagcagggctcgggtttgaatccaggctctgctgcttggtcgctgcatgagcttctgctgtgctgacctctctggtttgtctcgtcatgtgtaaggtgacaccagatacctacctcttagggctgccccgagactaaaataagaccatgtgcatgaaccacttaccaaagtgcctgttgctctccaggtgtgcctaccgcatgttgccgctgctgtttctgctgggacgtctgactccagttccttctcccctctccagtgacaaggtcatttacaacttacatttacaatttatagtgtttaccagtattaaattctcagccactcctttcca

SEQ ID NO: 161156 - DNA, 945 bp, Homo sapiens
  Payload ID: 11475
  Gene Symbol: NOL12
  Gene Name: nucleolar protein 12
  Uniprot ID: Q9UGY1
  ENST ID: ENST00000438329
  CDS Start-End: 71-712
gcgcccgggaggatgagtacgctacacccggaagtgtcttcagggagaggaagccggcggcctcactgctatgggccgcaacaagaagaagaagcgagatggtgacgaccggcggccgaggctcgttcttagcttcgacgaggagaagaggcgggagtacctgacaggcttccacaagcggaaggtcgagcgaaagaaggcagccattgaggagattaagcagcggctgaaagaggagcagaggaagcttcgggaggagcgccaccaggaatacttgaagatgctggcagagagagaagaggctctggaggaggcagatgagctggaccggttggtgacagcaaagacggagtcggtgcagtatgaccaccccaaccacacagtcaccgtgaccaccatcagtgacctggacctctcgggggcccggctgctcgggctgaccccacctgagggaggggctggagacaggtctgaggaggaggcgtcatccacggagaaaccaaccaaagccttgcccaggaagtccagagaccccctgctctctcagcggatctcctccctcacagcatcactacatgcacacagccgcaaaaaggtcaagaggaaacatccccgacgggcccaggactccaaaaagcccccaagggcccctcgtaccagcaaggcccagcgccgccgtctcacaggcaaagcacggcacagcggggagtgagaccgagaacgaagcggtgccccagtctaggctgcggggacctgtccttgctcagcttggctgtccctgtagcccagcctgcacctaggtgtgcctaccgcatgttgccgctgctgtttctgctgggacgtctgactccagttccttctcccctctccagtgacaaggtcatttacaacttacatttacaatttatagtgtttaccagtattaaattctcagccactcctttc

SEQ ID NO: 161157 - DNA, 903 bp, Homo sapiens
  Payload ID: 11475
  Gene Symbol: NOL12
  Gene Name: nucleolar protein 12
  Uniprot ID: Q9UGY1
  ENST ID: ENST00000611699
  CDS Start-End: 34-675
cttcagggagaggaagccggcggcctcactgctatgggccgcaacaagaagaagaagcgagatggtgacgaccggcggccgaggctcgttcttagcttcgacgaggagaagaggcgggagtacctgacaggcttccacaagcggaaggtcgagcgaaagaaggcagccattgaggagattaagcagcggctgaaagaggagcagaggaagcttcgggaggagcgccaccaggaatacttgaagatgctggcagagagagaagaggctctggaggaggcagatgagctggaccggttggtgacagcaaagacggagtcggtgcagtatgaccaccccaaccacacagtcaccgtgaccaccatcagtgacctggacctctcgggggcccggctgctcgggctgaccccacctgagggaggggctggagacaggtctgaggaggaggcgtcatccacggagaaaccaaccaaagccttgcccaggaagtccagagaccccctgctctctcagcggatctcctccctcacagcatcactacatgcacacagccgcaaaaaggtcaagaggaaacatccccgacgggcccaggactccaaaaagcccccaagggcccctcgtaccagcaaggcccagcgccgccgtctcacaggcaaagcacggcacagcggggagtgagaccgagaacgaagcggtgccccagtctaggctgcggggacctgtccttgctcagcttggctgtccctgtagcccagcctgcacctaggtgtgcctaccgcatgttgccgctgctgtttctgctgggacgtctgactccagttccttctcccctctccagtgacaaggtcatttacaacttacatttacaatttatagtgtttaccagtattaaattctcagccactc

SEQ ID NO: 161158 - DNA, 1394 bp, Homo sapiens
  Payload ID: 11476
  Gene Symbol: NOL3
  Gene Name: nucleolar protein 3 (apoptosis repressor with CARD domain)
  Uniprot ID: O60936
  ENST ID: ENST00000268605
  CDS Start-End: 87-713
gccgcagctgctgcacccacccccaccctgcccggccctttctgcaccgtcatctcctgccccgccgaggcttgacccccccgacaatgggcaacgcgcaggagcggccgtcagagactatcgaccgcgagcggaaacgcctggtcgagacgctgcaggcggactcgggactgctgttggacgcgctgctggcgcggggcgtgctcaccgggccagagtacgaggcattggatgcactgcctgatgccgagcgcagggtgcgccgcctactgctgctggtgcagggcaagggcgaggccgcctgccaggagctgctacgctgtgcccagcgtaccgcgggcgcgccggaccccgcttgggactggcagcacgtgggtccgggctaccgggaccgcagctatgaccctccatgcccaggccactggacgccggaggcacccggctcggggaccacatgccccgggttgcccagagcttcagaccctgacgaggccgggggccctgagggctccgaggcggtgcaatccgggaccccggaggagccagagccagagctggaagctgaggcctctaaagaggctgaaccggagccggagccagagccagagctggaacccgaggctgaagcagaaccagagccggaactggagccagaaccggacccagagcccgagcccgacttcgaggaaagggacgagtccgaagattcctgaaggccagagctctgacaggcggtgccccgcccatgctggataggacctgggatgctgctggagctgaatcggatgccaccaaggctcggtccagcccagtaccgctggaagtgaataaactccggagggtcggacgggacctgggctctctccacgattctggctgtttgcccaggaacttagggtgggtacctctgagtcccagggacctgggcaggcccaagcccaccacgagcatcatccagtcctcagccctaatctgcccttaggagtccaggctgcaccctggagatcccaaacctagccccctagtgggacaaggacctgaccctcctgcccgcatacacaacccatttcccctggtgagccacttggcagcatatgtaggtaccagctcaaccccacgcaagttcctgagctgaacatggagcaaggggagggtgacttctctccacatagggagggcttagagctcacagccttgggaagtgagactagaagaggggagcagaaagggaccttgagtagacaaaggccacacacatcattgtcattactgttttaattgtctggcttctctctggactgggagctcagtgaggattctgaccagtgacttacacaaaaggcgctctatacatattataatatattcgcttactaaatgaataaggactttcc

SEQ ID NO: 161159 - DNA, 642 bp, Homo sapiens
  Payload ID: 11476
  Gene Symbol: NOL3
  Gene Name: nucleolar protein 3 (apoptosis repressor with CARD domain)
  ENST ID: ENST00000563439
  CDS Start-End: 227-642
gccgcagctgctgcacccacccccaccctgcccggccctttctgcaccgtcatctcctgccccgccgaggcttgacccgtgctgtccccctctcccttcctttgcccaccgattggagggacactctggaaaactcagttgaagaaagcggagagtctgcgtgtacacagtgcaatgatgtcctgtgcttgcggagccgtccggcggctgggatcgagccccgacaatgggcaacgcgcaggagcggccgtcagagactatcgaccgcgagcggaaacgcctggtcgagacgctgcaggcggactcgggactgctgttggacgcgctgctggcgcggggcgtgctcaccgggccagagtacgaggcattggatgcactgcctgatgccgagcgcagggtgcgccgcctactgctgctggtgcagggcaagggcgaggccgcctgccaggagctgctacgctgtgcccagcgtaccgcgggcgcgccggaccccgcttgggactggcagcacgtgggtccgggctaccgggaccgcagctatgaccctccatgcccaggccactggacgccggaggcacccggctcggggaccacatgccccgggttgcccagagcttcagaccctgacgaggccgggggccc

SEQ ID NO: 161160 - DNA, 1351 bp, Homo sapiens
  Payload ID: 11476
  Gene Symbol: NOL3
  Gene Name: nucleolar protein 3 (apoptosis repressor with CARD domain)
  Uniprot ID: O60936
  ENST ID: ENST00000568146
  CDS Start-End: 54-713
ctccaggtcctgtgcttgcggagccgtccggcggctgggatcgagccccgacaatgggcaacgcgcaggagcggccgtcagagactatcgaccgcgagcggaaacgcctggtcgagacgctgcaggcggactcgggactgctgttggacgcgctgctggcgcggggcgtgctcaccgggccagagtacgaggcattggatgcactgcctgatgccgagcgcagggtgcgccgcctactgctgctggtgcagggcaagggcgaggccgcctgccaggagctgctacgctgtgcccagcgtaccgcgggcgcgccggaccccgcttgggactggcagcacgctaccgggaccgcagctatgaccctccatgcccaggccactggacgccggaggcacccggctcggggaccacatgccccgggttgcccagagcttcagaccctgacgaggccgggggccctgagggctccgaggcggtgcaatccgggaccccggaggagccagagccagagctggaagctgaggcctctaaagaggctgaaccggagccggagccagagccagagctggaacccgaggctgaagcagaaccagagccggaactggagccagaaccggacccagagcccgagcccgacttcgaggaaagggacgagtccgaagattcctgaaggccagagctctgacaggcggtgccccgcccatgctggataggacctgggatgctgctggagctgaatcggatgccaccaaggctcggtccagcccagtaccgctggaagtgaataaactccggagggtcggacgggacctgggctctctccacgattctggctgtttgcccaggaacttagggtgggtacctctgagtcccagggacctgggcaggcccaagcccaccacgagcatcatccagtcctcagccctaatctgcccttaggagtccaggctgcaccctggagatcccaaacctagccccctagtgggacaaggacctgaccctcctgcccgcatacacaacccatttcccctggtgagccacttggcagcatatgtaggtaccagctcaaccccacgcaagttcctgagctgaacatggagcaaggggagggtgacttctctccacatagggagggcttagagctcacagccttgggaagtgagactagaagaggggagcagaaagggaccttgagtagacaaaggccacacacatcattgtcattactgttttaattgtctggcttctctctggactgggagctcagtgaggattctgaccagtgacttacacaaaaggcgctctatacatattataatatattcgcttactaaatgaataaggactttcc

SEQ ID NO: 161161 - DNA, 752 bp, Homo sapiens
  Payload ID: 11476
  Gene Symbol: NOL3
  Gene Name: nucleolar protein 3 (apoptosis repressor with CARD domain)
  ENST ID: ENST00000566871
  CDS Start-End: 1-650
caggacagagcgtctggagaggcaggaggacaccgagttccccgtgttggcctccaggtcctgtgcttgcggagccgtccggcggctgggatcgagccccgacaatgggcaacgcgcaggagcggccgtcagagactatcgaccgcgagcggaaacgcctggtcgagacgctgcaggcggactcgggactgctgttggacgcgctgctggcgcggggcgtgctcaccgggccagagtacgaggcattggatgcactgcctgatgccgagcgcagggctaccgggaccgcagctatgaccctccatgcccaggccactggacgccggaggcacccggctcggggaccacatgccccgggttgcccagagcttcagaccctgacgaggccgggggccctgagggctccgaggcggtgcaatccgggaccccggaggagccagagccagagctggaagctgaggcctctaaagaggctgaaccggagccggagccagagccagagctggaacccgaggctgaagcagaaccagagccggaactggagccagaaccggacccagagcccgagcccgacttcgaggaaagggacgagtccgaagattcctgaaggccagagctctgacaggcggtgccccgcccatgctggataggacctgggatgctgctggagctgaatcggatgccaccaaggctcggtccagcccagtaccgctggaagtgaataaactccggagggtcggacgggacctggg

SEQ ID NO: 161162 - DNA, 1592 bp, Homo sapiens
  Payload ID: 11476
  Gene Symbol: NOL3
  Gene Name: nucleolar protein 3 (apoptosis repressor with CARD domain)
  Uniprot ID: O60936
  ENST ID: ENST00000564053
  CDS Start-End: 349-1161
gcaccgtcatctcctgccccgccgaggcttgacccgtgctgtccccctctcccttcctttgcccaccgattggagggacactctggaaaactcagttgaagaaagcggagagtctgcgtgtacacagtgcaatgatgtcagttaatgcactagtgagggcatgtgttgttcacggtacacagaagaaggaaccaccagcccttgggacacttaggcattggtgtagacaagggaacatttgagtcctggacgatggataggtccacggagcggagggaggagaaaaggattccagtcttagcgatcagcatcagcaaaggctccgaggtgccagaggcataagagtagatgccagtcctgggaaaggcaggggaggagaggagagccacggctgacgcttggggacagaaggaggagcctgaggaggagacaggacagagcgtctggagaggcaggaggacaccgagttccccgtgttggcctccaggtcctgtgcttgcggagccgtccggcggctgggatcgagccccgacaatgggcaacgcgcaggagcggccgtcagagactatcgaccgcgagcggaaacgcctggtcgagacgctgcaggcggactcgggactgctgttggacgcgctgctggcgcggggcgtgctcaccgggccagagtacgaggcattggatgcactgcctgatgccgagcgcagggtgcgccgcctactgctgctggtgcagggcaagggcgaggccgcctgccaggagctgctacgctgtgcccagcgtaccgcgggcgcgccggaccccgcttgggactggcagcacgtgggtccgggctaccgggaccgcagctatgaccctccatgcccaggccactggacgccggaggcacccggctcggggaccacatgccccgggttgcccagagcttcagaccctgacgaggccgggggccctgagggctccgaggcggtgcaatccgggaccccggaggagccagagccagagctggaagctgaggcctctaaagaggctgaaccggagccggagccagagccagagctggaacccgaggctgaagcagaaccagagccggaactggagccagaaccggacccagagcccgagcccgacttcgaggaaagggacgagtccgaagattcctgaaggccagagctctgacaggcggtgccccgcccatgctggataggacctgggatgctgctggagctgaatcggatgccaccaaggctcggtccagcccagtaccgctggaagtgaataaactccggagggtcggacgggacctgggctctctccacgattctggctgtttgcccaggaacttagggtgggtacctctgagtcccagggacctgggcaggcccaagcccaccacgagcatcatccagtcctcagccctaatctgcccttaggagtccaggctgcaccctggagatcccaaacctagccccctagtgggacaaggacctgaccctcctgcccgcatacacaacccatttcccctggtgagccacttggcagcatatgtaggtaccagctcaaccccacgcaagttcctgagctgaacatggagc

SEQ ID NO: 161163 - DNA, 677 bp, Homo sapiens
  Payload ID: 11476
  Gene Symbol: NOL3
  Gene Name: nucleolar protein 3 (apoptosis repressor with CARD domain)
  ENST ID: ENST00000564992
  CDS Start-End: 59-677
tgcccggccctttctgcaccgtcatctcctgccccgccgaggcttgacccccccgacaatgggcaacgcgcaggagcggccgtcagagactatcgaccgcgagcggaaacgcctggtcgagacgctgcaggcggactcgggactgctgttggacgcgctgctggcgcggggcgtgctcaccgggccagagtacgaggcattggatgcactgcctgatgccgagcgcagggtgcgccgcctactgctgctggtgcagggcaagggcgaggccgcctgccaggagctgctacgctgtgcccagcgtaccgcgggcgcgccggaccccgcttgggactggcagcacgtgggtccgggctaccgggaccgcagctatgaccctccatgcccaggccactggacgccggaggcacccggctcggggaccacatgccccgggttgcccagagcttcagaccctgacgaggccgggggccctgagggctccgaggcggtgcaatccgggaccccggaggagccagagccagagctggaagctgaggcctctaaagaggctgaaccggagccggagccagagccagagctggaacccgaggctgaagcagaaccagagccggaactggagccagaaccggacccagagcccgagcccgacttcgaggaaagggacgagtccgaag

SEQ ID NO: 161164 - DNA, 579 bp, Homo sapiens
  Payload ID: 11476
  Gene Symbol: NOL3
  Gene Name: nucleolar protein 3 (apoptosis repressor with CARD domain)
  ENST ID: ENST00000565560
  CDS Start-End: 57-579
gcttctgggtcgcgctcagctctgcaatgcatgcgttctgtgatcctgccccgacaatgggcaacgcgcaggagcggccgtcagagactatcgaccgcgagcggaaacgcctggtcgagacgctgcaggcggactcgggactgctgttggacgcgctgctggcgcggggcgtgctcaccgggccagagtacgaggcattggatgcactgcctgatgccgagcgcagggtgcgccgcctactgctgctggtgcagggcaagggcgaggccgcctgccaggagctgctacgctgtgcccagcgtaccgcgggcgcgccggaccccgcttgggactggcagcacgtgggtccgggctaccgggaccgcagctatgaccctccatgcccaggccactggacgccggaggcacccggctcggggaccacatgccccgggttgcccagagcttcagaccctgacgaggccgggggccctgagggctccgaggcggtgcaatccgggaccccggaggagccagagccagagctggaagctgaggcctctaaagaggctgaaccggagccggagccagagccagagc

SEQ ID NO: 161165 - DNA, 317 bp, Homo sapiens
  Payload ID: 11476
  Gene Symbol: NOL3
  Gene Name: nucleolar protein 3 (apoptosis repressor with CARD domain)
  ENST ID: ENST00000564860
  CDS Start-End: 1-317
agagctggaacccgaggctgaagcagaaccagagccggaactggagccagaaccggacccagagcccgagcccgacttcgaggaaagggacgagtccgaaggtattcctgaaggccagagctctgacaggcggtgccccgcccatgctggataggacctgggatgctgctggagctgaatcggatgccaccaaggctcggtccagcccagtaccgctggaagtgaataaactccggagggtcggacgggacctgggctctctccacgattctggctgtttgcccaggaacttagggtgggtacctctgagtcccagg

SEQ ID NO: 161166 - DNA, 794 bp, Homo sapiens
  Payload ID: 11476
  Gene Symbol: NOL3
  Gene Name: nucleolar protein 3 (apoptosis repressor with CARD domain)
  ENST ID: ENST00000563258
  CDS Start-End: 1-395
cgagttccccgtgttggcctccaggtcctgtgcttgcggagccgtccggcggctgggatcgaggctaccgggaccgcagctatgaccctccatgcccaggccactggacgccggaggcacccggctcggggaccacatgccccgggttgcccagagcttcagaccctgacgaggccgggggccctgagggctccgaggcggtgcaatccgggaccccggaggagccagagccagagctggaagctgaggcctctaaagaggctgaaccggagccggagccagagccagagctggaacccgaggctgaagcagaaccagagccggaactggagccagaaccggacccagagcccgagcccgacttcgaggaaagggacgagtccgaagattcctgaaggccagagctctgacaggcggtgccccgcccatgctggataggacctgggatgctgctggagctgaatcggatgccaccaaggctcggtccagcccagtaccgctggaagtgaataaactccggagggtcggacgggacctgggctctctccacgattctggctgtttgcccaggaacttagggtgggtacctctgagtcccagggacctgggcaggcccaagcccaccacgagcatcatccagtcctcagccctaatctgcccttaggagtccaggctgcaccctggagatcccaaacctagccccctagtgggacaaggacctgaccctcctgcccgcatacacaacccatttcccctggtgagccacttggcagcatatgtaggtaccagctcaa

SEQ ID NO: 161167 - DNA, 3957 bp, Homo sapiens
  Payload ID: 11477
  Gene Symbol: NOL4
  Gene Name: nucleolar protein 4
  Uniprot ID: O94818
  ENST ID: ENST00000261592
  CDS Start-End: 299-2215
ggatggtcctggtcacaaaatattaaagagaccgaccgctaagggaacaggaaaaacgtccgagacagccgttgcaattacgaatggaccagacttggtagcacggggcattgattgctggtgcccaaccggaccctcctcccctcttcccatcccttcccccacccaaagcaggctcccgctgcggccgggacctcgcatccctgcaacgtggccggggctgcatttttcatgagcctagggtgaacaggtgcgaagtgcgctgggagcatccggccagcggccgagcgcggggaacatggagagcgagcgcgacatgtaccgccagttccaggactggtgcctcaggacttacggggactcaggcaagaccaagacggtgacccgtaaaaaatacgaacggatcgtccagctcctcaatggctccgagtcgagctccacggacaacgccaaatttaaattctgggtcaaatcgaagggcttccagctgggccagccggacgaggtccgcgggggaggcggcggcgccaagcaagtgctctacgtgcctgtcaagaccacggatggcgtaggggtagatgagaagctatctttacgacgggtagctgtggttgaagatttctttgacattatttattcgatgcatgtggaaacggggccaaatggagaacaaattcggaaacacgctggacaaaagagaacttacaaagcaatttcagagagctatgccttcctaccaagagaagcggtgacacgatttctaatgagctgctcagagtgccagaaaagaatgcatttaaacccagatggaacagatcataaagataatggaaaacctcccactttggtgaccagcatgattgactacaacatgccaattaccatggcctacatgaaacacatgaagctgcagctgctaaactcacagcaagatgaggatgaaagttcaatagaaagtgatgaatttgacatgagtgattcaacacggatgtcagctgtgaactctgatcttagctccaatcttgaagaaagaatgcaaagtccccagaatcttcatggccagcaagatgatgattctgctgcagagagctttaatggcaatgagactctggggcacagttcaattgcttcagggggaacacacagcagggagatgggagactccaacagtgatggcaaaactgggctggagcaagatgaacagccactgaacctgagtgacagtcccctctctgcgcagctaacttcggaatacagaatagatgatcacaacagtaatgggaaaaacaagtataagaatcttctaatttctgacctcaagatggaacgagaggcgagagaaaatggaagcaagtctcctgcacatagttactccagctatgactctggcaaaaatgagagtgtagaccgaggagctgaggacctctcactaaacaggggagatgaggacgaagatgaccacgaggaccatgacgattcggagaaagttaatgagacagacggcgttgaagccgagcggctgaaagcttttaatatgtttgtcaggctgtttgtagatgaaaacttggaccgaatggtcccaatctctaagcagcccaaagaaaagatccaggctatcattgactcatgcaggcgacaattccctgagtatcaagagcgtgccagaaaacgtatacgtacttacctcaagtcctgcaggcggatgaaaagaagtggttttgagatgtctcgacctattccttcccaccttacttcagcagttgcagagagtatcttggcttcagcttgtgagagtgagagtagaaatgccgccaagaggatgcgtctggagagacagcaggatgagtctgctccagctgacaaacagtgtaaaccagaggcgacccaggccacttactcaacatcagctgttccaggctcacaggacgtgctgtacatcaatggaaatgggacctatagttaccatagttacagagggctaggagggggtctgctaaatctgaatgatgcttccagcagtggacccactgatctcagcatgaagagacaattggcgactagctcaggatcctccagcagctcaaactccagaccccagctgagtccaactgaaatcaatgccgtgagacagcttgttgcaggatatcgagaatcagctgcatttttattgcgatctgcagatgaactggaaaatctcattttacaacagaactgagacagacgaccaccatattcactgaggtctaaatttgcagtttccactaatgacattttgatttcccaacagagatacttctggtcttactgcacagtcttttaagagaaatacttccattatgccacattgtccttgatccgtaagtgatgtgttaaggtgcttcaaaggaactctgacctctgaagtacttgagctactttagtatgtccagcctattgctttttgttttagtgtgtcaccataaatatcaggggcataaaaggctatctattcttaattcaaggataaaacagaagaagcttgtggtataaaacaatagttcaagatccagctgaaatattagtggaatttgctactgactcattggactgaaagctgaagtacctggcaaaaaaaaaaaaaagaaaaaaaaaagccaaatttcttgttgctacaggatataacaacaatgaaaaggatctcgtattttaaaaaaatatgtaatttttataaaaagaaaacttgtttttcattcaaacttgtcatttttactttggtaactttttcataggtcctaaaagaaaactgttttgagaaactactgtaagtaccttttccacatccctttgccttctcctctttccaaattctttctacaaaaataacacttgatgctggaaaaacccttgcctacgttctttcaatcgtcacatcaggaactacttccaagagaagcctgcatttctgctctcatgctgatctcaaaaaccccactcaacactgcaactttatcatagcagttttcatcccagaattttttttttaataatgacaagacatgttgttgaaaaaaaatcacaccttggtttcttagagctgctcgttcctgattgccgctgctgtctccaggcatccctctagcagcacctggatgtagatgactgaatgttaagaggttgcaagtgacaatctgaaaatttgcactcttgtgtgtagttttcttttcatttctttcagaaatagtttccaaaaagaccattacatctcctgatatgatttgtataattttcagttctagctaaaaataatgtaaggaactctcagcggatgcagctgcaacttacaatgaactgtgccctcctatcccccatactttacccttctttcttattttatagtgtgggatacacatgagtgatgttttctttgtgcactgagacaagcctattttttaaatatttagggagaagtactttagttcatgcttcttatacaacttttttctgttgtttagctttggttggattacaaattctttgtgcattcctgaatttgccttatttcatgtaaaatttatgtcattcagtttttgacaatgagtttgaggcatcagtgatatttcttatctacttgttacatatagtttttcaagtaatgactgtgattgtgaccgagtaatgtgcactttttcttgtaactgtggacattgctatgcttttttcttctagtgtttctagaattactgttccttacaattatgtaaacaaaaaacaaaaaaaaaacttttgtgatactgttggtgaatataatgtgaaaaatcttattgaaatatgagtattttggaaatacatagctgcacaaacatcttttaagatgtggatttagagtttgcttatttaaatgaaaattcaaaaattgagggctggtataattttctctgttttgtttggtttaataaacagatttctgtgttaaaagaa

SEQ ID NO: 161168 - DNA, 1979 bp, Homo sapiens
  Payload ID: 11477
  Gene Symbol: NOL4
  Gene Name: nucleolar protein 4
  Uniprot ID: O94818
  ENST ID: ENST00000538587
  CDS Start-End: 32-1726
aagaagatgggaactgtgggctacaagtaggatggcagatctgatgcaggagacctttctgcatcatgccacggatggcgtaggggtagatgagaagctatctttacgacgggtagctgtggttgaagatttctttgacattatttattcgatgcatgtggaaacggggccaaatggagaacaaattcggaaacacgctggacaaaagagaacttacaaagcaatttcagagagctatgccttcctaccaagagaagcggtgacacgatttctaatgagctgctcagagtgccagaaaagaatgcatttaaacccagatggaacagatcataaagataatggaaaacctcccactttggtgaccagcatgattgactacaacatgccaattaccatggcctacatgaaacacatgaagctgcagctgctaaactcacagcaagatgaggatgaaagttcaatagaaagtgatgaatttgacatgagtgattcaacacggatgtcagctgtgaactctgatcttagctccaatcttgaagaaagaatgcaaagtccccagaatcttcatggccagcaagatgatgattctgctgcagagagctttaatggcaatgagactctggggcacagttcaattgcttcagggggaacacacagcagggagatgggagactccaacagtgatggcaaaactgggctggagcaagatgaacagccactgaacctgagtgacagtcccctctctgcgcagctaacttcggaatacagaatagatgatcacaacagtaatgggaaaaacaagtataagaatcttctaatttctgacctcaagatggaacgagaggcgagagaaaatggaagcaagtctcctgcacatagttactccagctatgactctggcaaaaatgagagtgtagaccgaggagctgaggacctctcactaaacaggggagatgaggacgaagatgaccacgaggaccatgacgattcggagaaagttaatgagacagacggcgttgaagccgagcggctgaaagcttttaatatgtttgtcaggctgtttgtagatgaaaacttggaccgaatggtcccaatctctaagcagcccaaagaaaagatccaggctatcattgactcatgcaggcgacaattccctgagtatcaagagcgtgccagaaaacgtatacgtacttacctcaagtcctgcaggcggatgaaaagaagtggttttgagatgtctcgacctattccttcccaccttacttcagcagttgcagagagtatcttggcttcagcttgtgagagtgagagtagaaatgccgccaagaggatgcgtctggagagacagcaggatgagtctgctccagctgacaaacagtgtaaaccagaggcgacccaggccacttactcaacatcagctgttccaggctcacaggacgtgctgtacatcaatggaaatgggacctatagttaccatagttacagagggctaggagggggtctgctaaatctgaatgatgcttccagcagtggacccactgatctcagcatgaagagacaattggcgactagctcaggatcctccagcagctcaaactccagaccccagctgagtccaactgaaatcaatgccgtgagacagcttgttgcaggatatcgagaatcagctgcatttttattgcgatctgcagatgaactggaaaatctcattttacaacagaactgagacagacgaccaccatattcactgaggtctaaatttgcagtttccactaatgacattttgatttcccaacagagatacttctggtcttactgcacagtcttttaagagaaatacttccattatgccacattgtccttgatccgtaagtgatgtgttaaggtgcttcaaaggaactctgacctctgaagtacttgagctactttagtatgtccagcctattgctttttgttttagtgtgtcaccataaatatca

SEQ ID NO: 161169 - DNA, 1853 bp, Homo sapiens
  Payload ID: 11477
  Gene Symbol: NOL4
  Gene Name: nucleolar protein 4
  Uniprot ID: O94818
  ENST ID: ENST00000535384
  CDS Start-End: 240-1301
cttactgtgcagaggagagaatttaggggaagtcagactaatccctgggtgcacttcgagagaaaggttggacctcgcctgagggatgctggatctgcaatgatagaattggcctgccacagacattggtatttaagttgaagagcagaattcacaatgattctgctgcagagagctttaatggcaatgagactctggggcacagttcaattgcttcagggggaacacacagcagggagatgggagactccaacagtgatggcaaaactgggctggagcaagatgaacagccactgaacctgagtgacagtcccctctctgcgcagctaacttcggaatacagaatagatgatcacaacagtaatgggaaaaacaagtataagaatcttctaatttctgacctcaagatggaacgagaggcgagagaaaatggaagcaagtctcctgcacatagttactccagctatgactctggcaaaaatgagagtgtagaccgaggagctgaggacctctcactaaacaggggagatgaggacgaagatgaccacgaggaccatgacgattcggagaaagttaatgagacagacggcgttgaagccgagcggctgaaagcttttaatatgtttgtcaggctgtttgtagatgaaaacttggaccgaatggtcccaatctctaagcagcccaaagaaaagatccaggctatcattgactcatgcaggcgacaattccctgagtatcaagagcgtgccagaaaacgtatacgtacttacctcaagtcctgcaggcggatgaaaagaagtggttttgagatgtctcgacctattccttcccaccttacttcagcagttgcagagagtatcttggcttcagcttgtgagagtgagagtagaaatgccgccaagaggatgcgtctggagagacagcaggatgagtctgctccagctgacaaacagtgtaaaccagaggcgacccaggccacttactcaacatcagctgttccaggctcacaggacgtgctgtacatcaatggaaatgggacctatagttaccatagttacagagggctaggagggggtctgctaaatctgaatgatgcttccagcagtggacccactgatctcagcatgaagagacaattggcgactagctcaggatcctccagcagctcaaactccagaccccagctgagtccaactgaaatcaatgccgtgagacagcttgttgcaggatatcgagaatcagctgcatttttattgcgatctgcagatgaactggaaaatctcattttacaacagaactgagacagacgaccaccatattcactgaggtctaaatttgcagtttccactaatgacattttgatttcccaacagagatacttctggtcttactgcacagtcttttaagagaaatacttccattatgccacattgtccttgatccgtaagtgatgtgttaaggtgcttcaaaggaactctgacctctgaagtacttgagctactttagtatgtccagcctattgctttttgttttagtgtgtcaccataaatatcaggggcataaaaggctatctattcttaattcaaggataaaacagaagaagcttgtggtataaaacaatagttcaagatccagctgaaatattagtggaatttgctactgactcattggactgaaagctgaagtacctggcaaaaaaaaaaaaaagaaaaaaaaaagccaaatttcttgttgctacaggatataacaacaatgaaaaggatctcgtattttaaaaaaatatgtaatttttataaaaagaaaacttgtttttcattcaaacttgtcatttttactttggtaactttttcata

SEQ ID NO: 161170 - DNA, 2193 bp, Homo sapiens
  Payload ID: 11477
  Gene Symbol: NOL4
  Gene Name: nucleolar protein 4
  ENST ID: ENST00000586314
  CDS Start-End: 258-467
acaaataaagccgcagctagaagatgaacaacaaagaaagatgggtttaggcgctatcgaatggtgtgtgtatttgttcctttttctggggtggctctagtctcatggccacaaagctctagcccaggcgccgcgaggcactggcattgagagcccaatgcatctcagcctcacgctgcagaagccagtggggctggggagccgcagcagcgtcgattttcttcacaagaagatgggaactgtgggctacaagtaggatggcagatctgatgcaggagacctttctgcatcatgccacggatggcgtaggggtagatgagaagctatctttacgacgggtagctgtggttgaagatttctttgacattatttattcgatgcatgtggaaacggggccaaatggagaacaaattcggaaacacgctggacaaaagagaacttacaaagcaatacagaaaaatgtgtgaaatgctcaaagtttcaaatacagatttcagagagctatgccttcctaccaagagaagcggtgacacgatttctaatgagctgctcagagtgccagaaaagaatgcatttaaacccagatggaacagatcataaagataatggaaaacctcccactttggtgaccagcatgattgactacaacatgccaattaccatggcctacatgaaacacatgaagctgcagctgctaaactcacagcaagatgaggatgaaagttcaatagaaagtgatgaatttgacatgagtgattcaacacggatgtcagctgtgaactctgatcttagctccaatcttgaagaaagaatgcaaagtccccagaatcttcatggccagcaagatgatgattctgctgcagagagctttaatggcaatgagactctggggcacagttcaattgcttcagggggaacacacagcagggagatgggagactccaacagtgatggcaaaactgggctggagcaagatgaacagccactgaacctgagtgacagtcccctctctgcgcagctaacttcggaatacagaatagatgatcacaacagtaatgggaaaaacaagtataagaatcttctaatttctgacctcaagatggaacgagaggcgagagaaaatggaagcaagtctcctgcacatagttactccagctatgactctggcaaaaatgagagtgtagaccgaggagctgaggacctctcactaaacaggggagatgaggacgaagatgaccacgaggaccatgacgattcggagaaagttaatgagacagacggcgttgaagccgagcggctgaaagcttttaattctcgacctattccttcccaccttacttcagcagttgcagagagtatcttggcttcagcttgtgagagtgagagtagaaatgccgccaagaggatgcgtctggagagacagcaggatgagtctgctccagctgacaaacagtgtaaaccagaggcgacccaggccacttactcaacatcagctgttccaggctcacaggacgtgctgtacatcaatggaaatgggacctatagttaccatagttacagagggctaggagggggtctgctaaatctgaatgatgcttccagcagtggacccactgatctcagcatgaagagacaattggcgactagctcaggatcctccagcagctcaaactccagaccccagctgagtccaactgaaatcaatgccgtgagacagcttgttgcaggatatcgagaatcagctgcatttttattgcgatctgcagatgaactggaaaatctcattttacaacagaactgagacagacgaccaccatattcactgaggtctaaatttgcagtttccactaatgacattttgatttcccaacagagatacttctggtcttactgcacagtcttttaagagaaatacttccattatgccacattgtccttgatccgtaagtgatgtgttaaggtgcttcaaaggaactctgacctctgaagtacttgagctactttagtatgtccagcctattgctttttgttttagtgtgtcaccataaatatcaggggcataaaaggctatctattcttaattcaaggataaaacagaagaagcttgtggtataaaacaatagttcaagatccagctgaaatattagtggaatttgctactgactcattggactgaaagctgaagtacctggc

SEQ ID NO: 161171 - DNA, 565 bp, Homo sapiens
  Payload ID: 11477
  Gene Symbol: NOL4
  Gene Name: nucleolar protein 4
  ENST ID: ENST00000586309
  CDS Start-End: 229-303
aacaaagaaagatgggtttaggcgctatcgaatggtgtgtgtatttgttcctttttctggggtggctctagtctcatggccacaaagctctagcccaggcgccgcgaggcactggcattgagagcccaatgcatctcagcctcacgctgcagaagccagtggggctggggagccgcagcagcgtcgattttcttcacaagaagatgggaactgtgggctacaagtaggatggcagatctgatgcaggagacctttctgcatcatgccacgggatataccacaatttacccatttacttgttgaaggacatctgaatgatttccatttttggcaattatgaatagagctgctacaattgcatacaagtttttatgtgaatgatggcgtaggggtagatgagaagctatctttacgacgggtagctgtggttgaagatttctttgacattatttattcgatgcatgtggaaacggggccaaatggagaacaaattcggaaacacgctggacaaaagagaacttacaaagcaatttcagagagctatgccttcctaccaagagaagcg

SEQ ID NO: 161172 - DNA, 2221 bp, Homo sapiens
  Payload ID: 11477
  Gene Symbol: NOL4
  Gene Name: nucleolar protein 4
  Uniprot ID: O94818
  ENST ID: ENST00000589544
  CDS Start-End: 219-1829
cgaatggaccagacttggtagcacggggcattgattgctggtgcccaaccggaccctcctcccctcttcccatcccttcccccacccaaagcaggctcccgctgcggccgggacctcgcatccctgcaacgtggccggggctgcatttttcatgagcctagggtgaacaggtgcgaagtgcgctgggagcatccggccagcggccgagcgcggggaacatggagagcgagcgcgacatgtaccgccagttccaggactggtgcctcaggacttacggggactcaggcaagaccaagacggtgacccgtaaaaaatacgaacggatcgtccagctcctcaatggctccgagtcgagctccacggacaacgccaaatttaaattctgggtcaaatcgaagggcttccagctgggccagccggacgaggtccgcgggggaggcggcggcgccaagcaagtgctctacgtgcctgtcaagaccacggatggcgtaggggtagatgagaagctatctttacgacgggtagctgtggttgaagatttctttgacattatttattcgatgcatgtggaaacggggccaaatggagaacaaattcggaaacacgctggacaaaagagaacttacaaagcaatttcagagagctatgccttcctaccaagagaagcggtgacacgatttctaatgagctgctcagagtgccagaaaagaatgcatttaaacccagatggaacagatcataaagataatggaaaacctcccactttggtgaccagcatgattgactacaacatgccaattaccatggcctacatgaaacacatgaagctgcagctgctaaactcacagcaagatgaggatgaaagttcaatagaaagtgatgaatttgacatgagtgattcaacacggatgtcagctgtgaactctgatcttagctccaatcttgaagaaagaatgcaaagtccccagaatcttcatggccagcaagatgatgattctgctgcagagagctttaatggcaatgagactctggggcacagttcaattgcttcagggggaacacacagcagggagatgggagactccaacagtgatggcaaaactgggctggagcaagatgaacagccactgaacctgagtgacagtcccctctctgcgcagctaacttcggaatacagaatagatgatcacaacagtaatgggaaaaacaagtataagaatcttctaatttctgacctcaagatggaacgagaggcgagagaaaatggaagcaagtctcctgcacatagttactccagctatgactctggcaaaaatgagagtgtagaccgaggagctgaggacctctcactaaacaggggagatgaggacgaagatgaccacgaggaccatgacgattcggagaaagttaatgagacagacggcgttgaagccgagcggctgaaagcttttaatgatgagtctgctccagctgacaaacagtgtaaaccagaggcgacccaggccacttactcaacatcagctgttccaggctcacaggacgtgctgtacatcaatggaaatgggacctatagttaccatagttacagagggctaggagggggtctgctaaatctgaatgatgcttccagcagtggacccactgatctcagcatgaagagacaattggcgactagctcaggatcctccagcagctcaaactccagaccccagctgagtccaactgaaatcaatgccgtgagacagcttgttgcaggatatcgagaatcagctgcatttttattgcgatctgcagatgaactggaaaatctcattttacaacagaactgagacagacgaccaccatattcactgaggtctaaatttgcagtttccactaatgacattttgatttcccaacagagatacttctggtcttactgcacagtcttttaagagaaatacttccattatgccacattgtccttgatccgtaagtgatgtgttaaggtgcttcaaaggaactctgacctctgaagtacttgagctactttagtatgtccagcctattgctttttgttttagtgtgtcaccataaatatcaggggcataaaaggctatctattcttaattcaaggataaaacagaagaagcttgtggtataaaacaatagttcaagatccagctgaaatattagtggaatttgctactgactcattggactgaaagctgaagtacctggc

SEQ ID NO: 161173 - DNA, 838 bp, Homo sapiens
  Payload ID: 11477
  Gene Symbol: NOL4
  Gene Name: nucleolar protein 4
  ENST ID: ENST00000586553
  CDS Start-End: 182-838
ctcttattttccaaagctccaggtgctgttttccttgggactcatatacagagtctttggttcaaatgctatggtacccaggctgaaaccttgagagaagaaccaccgccttggcccagtgaacctgaaggccatacccacagacctaaatactgcaccttctgtgtagcagctactcaggatggaccaaactatgttggatgattctgctgcagagagctttaatggcaatgagactctggggcacagttcaattgcttcagggggaacacacagcagggagatgggagactccaacagtgatggcaaaactgggctggagcaagatgaacagccactgaacctgagtgacagtcccctctctgcgcagctaacttcggaatacagaatagatgatcacaacagtaatgggaaaaacaagtataagaatcttctaatttctgacctcaagatggaacgagaggcgagagaaaatggaagcaagtctcctgcacatagttactccagctatgactctggcaaaaatgagagtgtagaccgaggagctgaggacctctcactaaacaggggagatgaggacgaagatgaccacgaggaccatgacgattcggagaaagttaatgagacagacggcgttgaagccgagcggctgaaagcttttaattctcgacctattccttcccaccttacttcagcagttgcagagagtatcttggcttcagcttgtgagagtgagagtagaaatgccgccaagaggatgcgtctggagagacagcaggatgagtctgctccagctgacaaacagtgtaaaccagaggcgacccaggccacttactca

SEQ ID NO: 161174 - DNA, 544 bp, Homo sapiens
  Payload ID: 11477
  Gene Symbol: NOL4
  Gene Name: nucleolar protein 4
  ENST ID: ENST00000591917
  CDS Start-End: 50-259
agcgtcgattttcttcacaagaagatgggaactgtgggctacaagtaggatggcagatctgatgcaggagacctttctgcatcatgccacggatggcgtaggggtagatgagaagctatctttacgacgggtagctgtggttgaagatttctttgacattatttattcgatgcatgtggaaacggggccaaatggagaacaaattcggaaacacgctggacaaaagagaacttacaaagcaggcccaagggaaatataaatgtatcatattacacatactcttcaggaaaaatcaagacaggaagaggttttccacactcccatatttcagagagctatgccttcctaccaagagaagcggtgacacgatttctaatgagctgctcagagtgccagaaaagaatgcatttaaacccagatggaacagatcataaagataatggaaaacctcccactttggtgaccagcatgattgactacaacatgccaattaccatggcctacatgaaacacatgaagctgcagctgctaaactcacagcaag

SEQ ID NO: 161175 - DNA, 1930 bp, Homo sapiens
  Payload ID: 11477
  Gene Symbol: NOL4
  Gene Name: nucleolar protein 4
  ENST ID: ENST00000590712
  CDS Start-End: 1-1677
aggacttacggggactcaggcaagaccaagacggtgacccgtaaaaaatacgaacggatcgtccagctcctcaatggctccgagtcgagctccacggacaacgccaaatttaaattctgggtcaaatcgaagggcttccagctgggccagccggacgaggtccgcgggggaggcggcggcgccaagcaagtgctctacgtgcctgtcaagaccacggatggcgtaggggtagatgagaagctatctttacgacgggtagctgtggttgaagatttctttgacattatttattcgatgcatgtggaaacggggccaaatggagaacaaattcggaaacacgctggacaaaagagaacttacaaagcaatttcagagagctatgccttcctaccaagagaagcggtgacacgatttctaatgagctgctcagagtgccagaaaagaatgcatttaaacccagatggaacagatcataaagataatggaaaacctcccactttggtgaccagcatgattgactacaacatgccaattaccatggcctacatgaaacacatgaagctgcagctgctaaactcacagcaagatgaggatgaaagttcaatagaaagtgatgaatttgacatgagtgattcaacacggatgtcagctgtgaactctgatcttagctccaatcttgaagaaagaatgcaaagtccccagaatcttcatggccagcaagatgatgattctgctgcagagagctttaatggcaatgagactctggggcacagttcaattgcttcagggggaacacacagcagggagatgggagactccaacagtgatggcaaaactgggctggagcaagatgaacagccactgaacctgagtgacagtcccctctctgcgcagctaacttcggaatacagaatagatgatcacaacagtaatgggaaaaacaagtataagaatcttctaatttctgacctcaagatggaacgagaggcgagagaaaatggaagcaagtctcctgcacatagttactccagctatgactctggcaaaaatgagagtgtagaccgaggagctgaggacctctcactaaacaggggagatgaggacgaagatgaccacgaggaccatgacgattcggagaaagttaatgagacagacggcgttgaagccgagcggctgaaagcttttaattctcgacctattccttcccaccttacttcagcagttgcagagagtatcttggcttcagcttgtgagagtgagagtagaaatgccgccaagaggatgcgtctggagagacagcaggatgagtctgctccagctgacaaacagtgtaaaccagaggcgacccaggccacttactcaacatcagctgttccaggctcacaggacgtgctgtacatcaatggaaatgggacctatagttaccatagttacagagggctaggagggggtctgctaaatctgaatgatgcttccagcagtggacccactgatctcagcatgaagagacaattggcgactagctcaggatcctccagcagctcaaactccagaccccagctgagtccaactgaaatcaatgccgtgagacagcttgttgcaggatatcgagaatcagctgcatttttattgcgatctgcagatgaactggaaaatctcattttacaacagaactgagacagacgaccaccatattcactgaggtctaaatttgcagtttccactaatgacattttgatttcccaacagagatacttctggtcttactgcacagtcttttaagagaaatacttccattatgccacattgtccttgatccgtaagtgatgtgttaaggtgcttcaaaggaactctgacctctgaagtacttgagctactttagtatgtccagcctattgctttttgttttagtgtgtcaccataaatatca

SEQ ID NO: 161176 - DNA, 971 bp, Homo sapiens
  Payload ID: 11478
  Gene Symbol: NOL4L
  Gene Name: nucleolar protein 4-like
  ENST ID: ENST00000201961
  CDS Start-End: 221-748
ggagctgggccgccagttccgggactggtgcttgcgcacctacggcgactcggccaaaaccaagacggtgacacgcagcaaataccagcggatcgccgaggtcctgcagggcggcggcgggactggcgcgggcagcggccccgcagccggcgagaaaggcaagttccagttctgggtgcgctccaagggcttccgcctgggcagcggccgggaacccaagatgggccaagtggtgtatgtgccggtcaagacgggctcgggggcagatggcctgtcggagccagagggcatctctctgaagcgggtcgctgtggtggaagatttctttgacatcatctactcgatgcatgtggagagctcagcggagccaggcaaagcccccaagcacgctgggcagaagaaaacctaccgagcgatcgcagagacctatgccttcctcccgagagaggccgtgacccggttcctgatgagctgtacggagtgtcagaagaggatgcactttaactccaatggcctggaacccaaagaaaacgagcctccatctccactggtctctgggattattgattacaacatgcccctcacctccacctacctgaagcagatgaagcttcgagtgatgaattcccaggagcagtgcctcccttcaggagccgaggacatcatgtctggtggccccactttggaggctgctgaatttgatgacttgattgggaagtgtctgccagatcgccccattgcagagtgaggatggacagttcccgcgtttggaaacacatttcctggatgaacttaagagctgtggccactagttcgttctaaaaatcattattgggcaccagcatgtgtggataaataaagcctcccacctgccccacatcaccaaggatgagaagatccagtaaactggggagagtgaattggtttgaaaacacatttgatttcaggaataaaaggtgcaaatgagtaaa

SEQ ID NO: 161177 - DNA, 701 bp, Homo sapiens
  Payload ID: 11478
  Gene Symbol: NOL4L
  Gene Name: nucleolar protein 4-like
  ENST ID: ENST00000326071
  CDS Start-End: 255-530
ggcgccgccgccgctgccgccgctgctcgcctgggccctcctcctggccacccccgcccccgggccgggcagtgacgcgccgcggtggtgccagcccctctccccgggcagccgcggcggcagcagcagcagcagcagctggagctgtggggctgtcaccgccgcccgccccgctcactcgcggatcccgaccgcccatctccgcctcgcttccagcccaggatgagacttctgtgagcagcgaggattttgatatgagcgactccacatggatgtcagctgacccgcacctggcctccagcctgagccccagccaggacgagaggatgcggagcccgcagaacctccacagtcaagaggacgggccccaccgcttgagccacctgtcccaaggcctgaacatcatctgcagcttggacacctctctacgggccaggaaccccagggtctctgcagagagaaatgatttcagttttaggggaagatctaggtgtgtgacgtctaattcattagccaaggacggctactgagccttggaaaaggctagtgcagacaggtgtgcaatacacgctgcgtctcagcggctccgtaggaaagaagaaggtgaaatatctcagctctgataacacggtatcaattatttgttgaaatggtactattttggatatattgggttaaataaagtagattattaaaattga

SEQ ID NO: 161178 - DNA, 5991 bp, Homo sapiens
  Payload ID: 11478
  Gene Symbol: NOL4L
  Gene Name: nucleolar protein 4-like
  Uniprot ID: Q96MY1
  ENST ID: ENST00000359676
  CDS Start-End: 144-1454
ccgcggcggcagcagcagcagcagcagctggagctgtggggctgtcaccgccgcccgccccgctcactcgcggatcccgaccgcccatctccgcctcgcttccagcccaggatgagacttctgtgagcagcgaggattttgatatgagcgactccacatggatgtcagctgacccgcacctggcctccagcctgagccccagccaggacgagaggatgcggagcccgcagaacctccacagtcaagaggacgatgactcctcctctgagagtggcagcggcaatggctcctccaccctgaacccatccacgtcgagcagcacgcagggcgaccctgccttccccgagatgaatggcaacggcgccgtggcccccatggacttcaccacggccgccgaggatcagcccatcaacctgtgtgacaagctcccgccggccacggcacttggcacagcctcctacccctcggatggctgcggtgccgacgggctgcggagccgcgtcaaatacggggtgaagaccacccccgagtcccccccctacagctctgggagctacgattccatcaagaccgaggtcagcggctgccctgaggacctgacagtgggccgggccccgacggcagatgatgacgacgatgaccacgatgaccatgaggacaatgacaagatgaacgactctgaaggcatggaccctgagcgtcttaaggccttcaacatgtttgtgcgtctctttgtggacgagaacctggaccgcatggtgcccatctccaagcagcccaaggagaagatccaggccatcatcgagtcctgcagccggcagttccctgagttccaggagcgggcccgcaagcgcatccgcacgtacctcaagtcctgccgtcgcatgaagaagaacggcatggagatgaccagacccacgccaccccatctgacctcggccatggcagaaaacatcctggcagctgcctgtgagagcgagacaagaaaggcagccaagcggatgcgtctagagatctaccagtcctcacaggatgagcccatagccctggacaagcagcactcgcgggactccgcagccatcacccactccacctactcactgccagcctcctcctactcccaggaccctgtgtacgccaacggcggcctcaactacagttaccgcgggtacggggccttgagcagcaacctgcagccccctgcctccctccaaacaggaaaccacagtaatgggcccacggacctcagcatgaaaggcggggcctctaccacctccaccacccccacgcccaccccctccagcaccagcaccagcaggcccgtgcccaccgctcagctcagccccacggagatcagcgccgtgcggcagctcatcgcgggctaccgggagtctgctgccttcctgctgcgctctgcagatgaactggaaaacctcatcctacagcagaactgaccccaccggcacctggagcgcactgccctagggaaggaggctgtcccagcctggacctggcttcctgcctcaccagttggtacattttgtttttgaaagaggtgggatccaaaagagctgtttctagccacactccaagcacctgagactttgggcacaaggacacttttttttttttttttttttttttttggaatctcaccacacgggtgctctgacctgcttggaagaggccaacggggcagctctggaagggttgggggctcccctgacaaggcgctggggctgcagctctgtttagaatcaccttcgtggaccctgatgttagaatcccacccccagataattacctttcaagtcttaggtgagcagaattgcatatttattgagaaaagcaaagtggaccctttcttcctctccccttagtaatttatttttctgaaaatggattcttttgtgtttgtacagattgctagtctgtgtctgtctgatcagaaggatgtatccccatacctaacattccatatcactacactgatgtgggctggggccagtaggggcaggacaggtgccaggctggctgttcctctgcatgcctggtgcaccctgtggccgctagcccttggccaggccatcctgttgcagatcccagtgctgccacagggacaccaccaggcacctccctaggcaacgccaagcaggaggacctcacccacacccatggcaaagcaaaacaaaagaggcaccccgaccccattctacagaagccccagtccatggtcacctgtattctacctcacactccagcgtgggctttttccaggatgtgccctgagcctgttctgaacagctgtaaccccaactcccccacacaatgtgtctgcctgggaggtaagtaagtccagactgggtgtccaggagctggaacccagagagcgtcctgtccctaaccagccactgcagccctccagctctggccctcagctgcttgacaggacggactgctgggagatggcagccggttggcagggcccttgccctcacaccccgctgcccaggagccaggtctgaacttctgtgcacaggcctggcccctcagactcactcctgccaagaggggccacttcttcagggtgagccccggctatcaggcagccgtgagctccagggcgggctgcagctcccatccccttgcgccatgtttggagtaaagggatcagtggaagtggaggagccacttgggttctcctaagaccagcccttccggaggggccggtcctggaagaaacccataatccctggagtgtgaaaaagggcaaaaagaaaaagctggcctggtttccttcctccctgattgattgattgataggcacttcctcttgctcagtgcaatacctaccagtgctgctaaaccagggactcgcccagacctcagcaggcccccagggcctctccgtgcaacactccgtagccatgacagcagctctctgctgcccgcccctgcccagagctggcagaagccctctgttgcctttcctccctcagagcagagaggccccaggggagccagggccgagtggatcctaggatggccacggagagccactcgctcccagaacaggcaccccttcccaaaccagcttttctgcagccaattgcctgttgcagctgtggccactgcctcccggcactgtggcagactccccccaaggagggatggggggggcaccagtgaggatgccccatcctgcctcaggtccagaactctgaaaggtagggtgcccaccccgtgcttacttccggcccctagaggttgggggtggtcgttatctctcaagtggcctccaataccccatccagccacaccacctctgccttccatctgaccaatccccaggcctctggtcagggccaggacacctgagactcacccttagcacagcacaacctccagtgcccaaggcctctcccacaccccagccatccacacatctggccccacctgctcagtactactcaacatttgaattcgtgtaaatatttatttttgtgtgtgaacaatactacaaagtaatcagtaagatcttttgcaaaaatgttaccccaggcaattatttgtgaaaatcttaatgttaaaacctggcagagacaatcgccaccctagaattcctggtatcagttacttaacgtgtcacttctcctcccagaggcagtacccaagctagacatgaaccgtttgcatttcttggcagacaggagtgagaaagactggggaaggggctccctccccctacccacacaaggattagatctaaagatcagcataagctacagtttgaagtcatgtttttctgagttcaagctgttggaactgaccaccctccagcctgccttagtactgcggcaagagcgtaggttcaatgtgttttcaagagaaaggaaagaatatgttgttaaagtccattgggcctcccaggcccctccaggacaatggatttcatcatgtcgaccccacctcttgggtgggctcctcctttccagtgaaactacacctgaagccctagagatggcagaatcaggagcaagtttctgcatggaaacaggattccatttagctggctcagtcagggaacttgttttgcttttgttttaaaagatgcagcttcaaccccttccccctactcccgacttggagggcaccaaagagctggttctgatgaactaagctcactgctgtctcaccctcaccagagggactgccttctcccaaaaggagctcccaaagcccttgtcccacagccatttaaaaatcttctgaagggcctcagggcacaaagtgatcatttgggatcctaagttaaaaaggaaatgcaagagtaggatactccaattccagagtctttgcaggaggctaatcccacaagaagggtagcatcagagaagtgggcattggtcttagtggtggatcatcaggtagacaagtgatagtgtgtgtaacccatctgaaattcattttaccgtcaccactcttacaaaggacagtttattcccaaggacagtgctgacggggagggggacaggcagggagttaggagggttttcgaggatttcaaacaggtggaacccatccatccctattcccaagggccacttacaactctaagggtggttacaggattaactaccagttcattttcaaaatgctgctttgaactcagagggttgatacttttaatttgtaattttttgtaaaactttttacaaaatagtaaagtatttcaccagaataccagtttcaatccgtccatggtctgatttttatataatttagtggtgctttagaaactttgtttttgttgtttctgagctaaacagctcaatcctttttcgcctgtatctacctaagaccaatgtgaacctttgtatttttgctcctaattttggactcagtgaaagtgtactgtttacatgtacagatgcccccagtccctgtgtgttctgcaagacttgctcttgaggaggaagatgcacctcactaagctcatctgcttagcaaagccacaaacaaaaacctctcactttttacctacgtttccacctaaaaatacaacaaaaaacctataccacgtagaactcagattggctgaaaaacactttccacctggtagatggcccatatgcctcaattatgtggtccatttaggagcaggagtcagaagagagacctcttattggctgctggtgggtaactgcatggacagaggaaaagggaaggcaggactttgctgcagagctgtgggatgaatgtagttcttccctgggcagcctgggagtgggaaggtcagaatgactcatgttgccttcaggatcaagccatccaggatttagggacaacccaagaggtctttagtcctctggcataatttagacatgttttggaagagcatgagttccatatctgagatgagatttaagactttcagtgcagatagtacaagccatttcttcagggttcctctgggggcagctccttcatgaggtcccacctccggggaggggcacagggctccagatagtaagcacttaaggcaaacagtggatggcaccaacttttaaaggtgactctattaatggcttcacctctaaattatatttttacagatatgcacctatgcaacttaacgtggctcttctaagcaggtgaggacttcctcctcaatgctctctataaaaattatttgtgttctatatagtgagttttaccagtaaatgtggcttaatattttaattcttagaatgtgtcttctctacgtgatgtgactaaattctgttttgtttgtggaatgactagcacaggccgactccctctctccctcacttaacaaaagaccaatgagctgttaatcgagctgttatctccatggtattacttgctaaatgcactgatttcataagtatgtggaatccttttccttttgaatctgtatatcatatataagactgaatctacttaataaacactgaacaacaaaccgaa

SEQ ID NO: 161179 - DNA, 541 bp, Homo sapiens
  Payload ID: 11478
  Gene Symbol: NOL4L
  Gene Name: nucleolar protein 4-like
  ENST ID: ENST00000375677
  CDS Start-End: 29-370
gcccctcacctccacctacctgaagcagatgaagcttcgagtgatgaattcccaggagcaggatgagacttctgtgagcagcgaggattttgatatgagcgactccacatggatgtcagctgacccgcacctggcctccagcctgagccccagccaggacgagaggatgcggagcccgcagaacctccacagtcaagaggacgggccccaccgcttgagccacctgtcccaaggcctgaacatcatctgcagcttggacacctctctacgggccaggaaccccagggtctctgcagagagaaatgatttcagttttaggggaagatctaggtgtgtgacgtctaattcattagccaaggacggctactgagccttggaaaaggctagtgcagacaggtgtgcaatacacgctgcgtctcagcggctccgtaggaaagaagaaggtgaaatatctcagctctgataacacggtatcaattatttgttgaaatggtactattttggatatattgggttaaataaagtagattattaaaattga

SEQ ID NO: 161180 - DNA, 2042 bp, Homo sapiens
  Payload ID: 11478
  Gene Symbol: NOL4L
  Gene Name: nucleolar protein 4-like
  ENST ID: ENST00000375678
  CDS Start-End: 1252-1719
ccccctccagccccacctcttcccccggccctgggtggggcccgcacctggggctctccgctcgttagcgcgcccagggcgcctcctcggcccgagagggacccgcccgcggggcctggctggctcagggctacctccttccgcctaggacccccccttcggtgactcccgattccctgtcctaggctgcggtgccccgggaggcgggtcgccagagtagcagacagagctctttaatgggtgtcttctagggcgggtgctgtttgtgcatcatttgggttcccacacacttcctatgaggtggcgaaagccattatgcctatggtgtctgctcacacagggggaaactgaggcccaggcaggacagccccttgcctggggtgggggctgggttgtccttaggcctgtgacttcacctctacagcaccctcctgtggaccctctccctgcccccgccaggccagagtcctgcagccaggcccagaccctggcctgtccgtccggggatgctggacagtactcctccctccagccctcataagtcattgtcattcggatctgcatttccccagcccctctccttctaactggggggcactgtggcccactgtgcccctttctcttcccattccttccccctacacccattccagacatcccagagttaacaaaacccaaaagaaagagaaaaaagactcagagctgcttggaggagatgacatcctcaaatgtagcgccgttgtttgaggggctggtcccaggcacctttctctgtggcctggggtgtgcgttttggtccccagcgtgatttgaaagaagatggaggttcagcgaagcagaaaggaggtcttggaatatgtgaggcctgttccagatggcaggtgcgactcggtggtggcggtggcggcggcagctacgcgctaacagttggagattgtgcacaagggtggagaagagttacctccctggctcaatcatggagacattctgatcagcagttctcaaaatctgtcttgcatcagaatcatctgggggggcctgttaaaacccccagcacatcagatttgggttctccttgaaggccacgtagacatcctggcgttcttcccctagggtgtagcacacatggaatccaggtggccctagctcaccagaggacagttcaagggggcagatggcctgtcggagccagagggcatctctctgaagcgggtcgctgtggtggaagatttctttgacatcatctactcgatgcatgtggagagctcagcggagccaggcaaagcccccaagcacgctgggcagaagaaaacctaccgagcgatcgcagagacctatgccttcctcccgagagaggccgtgacccggttcctgatgagctgtacggagtgtcagaagaggatgcactttaactccaatggcctggaacccaaagaaaacgagcctccatctccactggtctctgggattattgattacaacatgcccctcacctccacctacctgaagcagatgaagcttcgagtgatgaattcccaggagcaggatgagacttctgtgagcagcgaggattttgatatgagcgactccacatggatgtcagctgacccgcacctggcctccagcctgagccccagccaggacgagaggatgcggagcccgcagaacctccacagtcaagaggacggtggtgtctgtctccagggccccaccgcttgagccacctgtcccaaggcctgaacatcatctgcagcttggacacctctctacgggccaggaaccccagggtctctgcagagagaaatgatttcagttttaggggaagatctaggtgtgtgacgtctaattcattagccaaggacggctactgagccttggaaaaggctagtgcagacaggtgtgcaatacacgctgcgtctcagcggctccgtaggaaagaagaaggtgaaatatctcagctctgataacacggtatcaattatttgttgaaatggtactattttggatatattgggttaaataaagtagattattaaaattga

SEQ ID NO: 161181 - DNA, 311 bp, Homo sapiens
  Payload ID: 11478
  Gene Symbol: NOL4L
  Gene Name: nucleolar protein 4-like
  ENST ID: ENST00000419612
  CDS Start-End: 1-229
tcagaagaggatgcactttaactccaatggcctggaacccaaagaaaacgagcctccatctccactggtctctgggattattgattacaacatgcccctcacctccacctacctgaagcagatgaagcttcgagtgatgaattcccaggagcagccatcctcactgtctccggcacctggcttcgtaaacactgttatcaccgtgctcatctgtgcccatgaagaatgaagcacaaaaccgcacaaacagccggaagcacagccccctggttttgtttcatacagaatggcactaaatccaggtcaccact

SEQ ID NO: 161182 - DNA, 1376 bp, Homo sapiens
  Payload ID: 11478
  Gene Symbol: NOL4L
  Gene Name: nucleolar protein 4-like
  ENST ID: ENST00000616976
  CDS Start-End: 27-1229
cttctgtgagcagcgaggattttgatatgagcgactccacatggatgtcagctgacccgcacctggcctccagcctgagccccagccaggacgagaggatgcggagcccgcagaacctccacagtcaagaggacgatgactcctcctctgagagtggcagcggcaatggctcctccaccctgaacccatccacgtcgagcagcacgcagggcgaccctgccttccccgagatgaatggcaacggcgccgtggcccccatggacttcaccacggccgccgaggatcagcccatcaacctgtgtgacaagctcccgccggccacggcacttggcacagcctcctacccctcggatggctgcggtgccgacgggctgcggagccgcgtcaaatacggggtgaagaccacccccgagtcccccccctacagctctgggagctacgattccatcaagaccgaggtcagcggctgccctgaggacctgacagtgggccgggccccgacggcagatgatgacgacgatgaccacgatgaccatgaggacaatgacaagatgaacgactctgaaggcatggaccctgagcgtcttaaggccttcaacatgtttgtgcgtctctttgtggacgagaacctggaccgcatggtgcccatctccaagcagcccaaggagaagatccaggccatcatcgagtcctgcagccggcagttccctgagttccaggagcgggcccgcaagcgcatccgcacgtacctcaagtcctgccgtcgcatgaagaagaacggcatggagatgaccagacccacgccaccccatctgacctcggccatggcagaaaacatcctggcagctgcctgtgagagcgagacaagaaaggcagccaagcggatgcgtctagagatctaccagtcctcacaggatgagcccatagccctggacaagcagcactcgcgggactccgcagccatcacccactccacctactcactgccagcctcctcctactcccaggaccctgtgtacgccaacggcggcctcaactacagttaccgcgggtacggggccttgagcagcaacctgcagccccctgcctccctccaaacaggaaaccacagtaatgggcccacggacctcagcatgaaaggcggggcctctaccacctccaccacccccacgcccaccccctggttgggggctcccctgacaaggcgctggggctgcagctctgtttagaatcaccttcgtggaccctgatgttagaatcccacccccagataattacctttcaagtcttaggtgagcagaattgcatatttattgagaaaagcaaagtggaccctttcttcctctccccttagtaatttatttttctgaaaatgg

SEQ ID NO: 161183 - DNA, 6761 bp, Homo sapiens
  Payload ID: 11478
  Gene Symbol: NOL4L
  Gene Name: nucleolar protein 4-like
  ENST ID: ENST00000621426
  CDS Start-End: 184-2226
cgcgccgcagccccgcgcgtccggccgccgcccgcgcccatccagcagcctcgccggagccacaccgcgggacagacgcggccgcggcgcgtcccggcccggtccagcccagcccagcccagtcccggcaccgggcggcccggcggccggcccgcccccgagggcgccgggcgcggcgggaggatgccgaagccgacgctgctgctgcgcgggggctgggagcgcgagcgcagccccggggactcggagctgggccgccagttccgggactggtgcttgcgcacctacggcgactcggccaaaaccaagacggtgacacgcagcaaataccagcggatcgccgaggtcctgcagggcggcggcgggactggcgcgggcagcggccccgcagccggcgagaaaggcaagttccagttctgggtgcgctccaagggcttccgcctgggcagcggccgggaacccaagatgggccaagtggtgtatgtgccggtcaagacgggctcgggggcagatggcctgtcggagccagagggcatctctctgaagcgggtcgctgtggtggaagatttctttgacatcatctactcgatgcatgtggagagctcagcggagccaggcaaagcccccaagcacgctgggcagaagaaaacctaccgagcgatcgcagagacctatgccttcctcccgagagaggccgtgacccggttcctgatgagctgtacggagtgtcagaagaggatgcactttaactccaatggcctggaacccaaagaaaacgagcctccatctccactggtctctgggattattgattacaacatgcccctcacctccacctacctgaagcagatgaagcttcgagtgatgaattcccaggagcaggatgagacttctgtgagcagcgaggattttgatatgagcgactccacatggatgtcagctgacccgcacctggcctccagcctgagccccagccaggacgagaggatgcggagcccgcagaacctccacagtcaagaggacgatgactcctcctctgagagtggcagcggcaatggctcctccaccctgaacccatccacgtcgagcagcacgcagggcgaccctgccttccccgagatgaatggcaacggcgccgtggcccccatggacttcaccacggccgccgaggatcagcccatcaacctgtgtgacaagctcccgccggccacggcacttggcacagcctcctacccctcggatggctgcggtgccgacgggctgcggagccgcgtcaaatacggggtgaagaccacccccgagtcccccccctacagctctgggagctacgattccatcaagaccgaggtcagcggctgccctgaggacctgacagtgggccgggccccgacggcagatgatgacgacgatgaccacgatgaccatgaggacaatgacaagatgaacgactctgaaggcatggaccctgagcgtcttaaggccttcaacatgtttgtgcgtctctttgtggacgagaacctggaccgcatggtgcccatctccaagcagcccaaggagaagatccaggccatcatcgagtcctgcagccggcagttccctgagttccaggagcgggcccgcaagcgcatccgcacgtacctcaagtcctgccgtcgcatgaagaagaacggcatggagatgaccagacccacgccaccccatctgacctcggccatggcagaaaacatcctggcagctgcctgtgagagcgagacaagaaaggcagccaagcggatgcgtctagagatctaccagtcctcacaggatgagcccatagccctggacaagcagcactcgcgggactccgcagccatcacccactccacctactcactgccagcctcctcctactcccaggaccctgtgtacgccaacggcggcctcaactacagttaccgcgggtacggggccttgagcagcaacctgcagccccctgcctccctccaaacaggaaaccacagtaatgggcccacggacctcagcatgaaaggcggggcctctaccacctccaccacccccacgcccaccccctccagcaccagcaccagcaggcccgtgcccaccgctcagctcagccccacggagatcagcgccgtgcggcagctcatcgcgggctaccgggagtctgctgccttcctgctgcgctctgcagatgaactggaaaacctcatcctacagcagaactgaccccaccggcacctggagcgcactgccctagggaaggaggctgtcccagcctggacctggcttcctgcctcaccagttggtacattttgtttttgaaagaggtgggatccaaaagagctgtttctagccacactccaagcacctgagactttgggcacaaggacacttttttttttttttttttttttttttggaatctcaccacacgggtgctctgacctgcttggaagaggccaacggggcagctctggaagggttgggggctcccctgacaaggcgctggggctgcagctctgtttagaatcaccttcgtggaccctgatgttagaatcccacccccagataattacctttcaagtcttaggtgagcagaattgcatatttattgagaaaagcaaagtggaccctttcttcctctccccttagtaatttatttttctgaaaatggattcttttgtgtttgtacagattgctagtctgtgtctgtctgatcagaaggatgtatccccatacctaacattccatatcactacactgatgtgggctggggccagtaggggcaggacaggtgccaggctggctgttcctctgcatgcctggtgcaccctgtggccgctagcccttggccaggccatcctgttgcagatcccagtgctgccacagggacaccaccaggcacctccctaggcaacgccaagcaggaggacctcacccacacccatggcaaagcaaaacaaaagaggcaccccgaccccattctacagaagccccagtccatggtcacctgtattctacctcacactccagcgtgggctttttccaggatgtgccctgagcctgttctgaacagctgtaaccccaactcccccacacaatgtgtctgcctgggaggtaagtaagtccagactgggtgtccaggagctggaacccagagagcgtcctgtccctaaccagccactgcagccctccagctctggccctcagctgcttgacaggacggactgctgggagatggcagccggttggcagggcccttgccctcacaccccgctgcccaggagccaggtctgaacttctgtgcacaggcctggcccctcagactcactcctgccaagaggggccacttcttcagggtgagccccggctatcaggcagccgtgagctccagggcgggctgcagctcccatccccttgcgccatgtttggagtaaagggatcagtggaagtggaggagccacttgggttctcctaagaccagcccttccggaggggccggtcctggaagaaacccataatccctggagtgtgaaaaagggcaaaaagaaaaagctggcctggtttccttcctccctgattgattgattgataggcacttcctcttgctcagtgcaatacctaccagtgctgctaaaccagggactcgcccagacctcagcaggcccccagggcctctccgtgcaacactccgtagccatgacagcagctctctgctgcccgcccctgcccagagctggcagaagccctctgttgcctttcctccctcagagcagagaggccccaggggagccagggccgagtggatcctaggatggccacggagagccactcgctcccagaacaggcaccccttcccaaaccagcttttctgcagccaattgcctgttgcagctgtggccactgcctcccggcactgtggcagactccccccaaggagggatggggggggcaccagtgaggatgccccatcctgcctcaggtccagaactctgaaaggtagggtgcccaccccgtgcttacttccggcccctagaggttgggggtggtcgttatctctcaagtggcctccaataccccatccagccacaccacctctgccttccatctgaccaatccccaggcctctggtcagggccaggacacctgagactcacccttagcacagcacaacctccagtgcccaaggcctctcccacaccccagccatccacacatctggccccacctgctcagtactactcaacatttgaattcgtgtaaatatttatttttgtgtgtgaacaatactacaaagtaatcagtaagatcttttgcaaaaatgttaccccaggcaattatttgtgaaaatcttaatgttaaaacctggcagagacaatcgccaccctagaattcctggtatcagttacttaacgtgtcacttctcctcccagaggcagtacccaagctagacatgaaccgtttgcatttcttggcagacaggagtgagaaagactggggaaggggctccctccccctacccacacaaggattagatctaaagatcagcataagctacagtttgaagtcatgtttttctgagttcaagctgttggaactgaccaccctccagcctgccttagtactgcggcaagagcgtaggttcaatgtgttttcaagagaaaggaaagaatatgttgttaaagtccattgggcctcccaggcccctccaggacaatggatttcatcatgtcgaccccacctcttgggtgggctcctcctttccagtgaaactacacctgaagccctagagatggcagaatcaggagcaagtttctgcatggaaacaggattccatttagctggctcagtcagggaacttgttttgcttttgttttaaaagatgcagcttcaaccccttccccctactcccgacttggagggcaccaaagagctggttctgatgaactaagctcactgctgtctcaccctcaccagagggactgccttctcccaaaaggagctcccaaagcccttgtcccacagccatttaaaaatcttctgaagggcctcagggcacaaagtgatcatttgggatcctaagttaaaaaggaaatgcaagagtaggatactccaattccagagtctttgcaggaggctaatcccacaagaagggtagcatcagagaagtgggcattggtcttagtggtggatcatcaggtagacaagtgatagtgtgtgtaacccatctgaaattcattttaccgtcaccactcttacaaaggacagtttattcccaaggacagtgctgacggggagggggacaggcagggagttaggagggttttcgaggatttcaaacaggtggaacccatccatccctattcccaagggccacttacaactctaagggtggttacaggattaactaccagttcattttcaaaatgctgctttgaactcagagggttgatacttttaatttgtaattttttgtaaaactttttacaaaatagtaaagtatttcaccagaataccagtttcaatccgtccatggtctgatttttatataatttagtggtgctttagaaactttgtttttgttgtttctgagctaaacagctcaatcctttttcgcctgtatctacctaagaccaatgtgaacctttgtatttttgctcctaattttggactcagtgaaagtgtactgtttacatgtacagatgcccccagtccctgtgtgttctgcaagacttgctcttgaggaggaagatgcacctcactaagctcatctgcttagcaaagccacaaacaaaaacctctcactttttacctacgtttccacctaaaaatacaacaaaaaacctataccacgtagaactcagattggctgaaaaacactttccacctggtagatggcccatatgcctcaattatgtggtccatttaggagcaggagtcagaagagagacctcttattggctgctggtgggtaactgcatggacagaggaaaagggaaggcaggactttgctgcagagctgtgggatgaatgtagttcttccctgggcagcctgggagtgggaaggtcagaatgactcatgttgccttcaggatcaagccatccaggatttagggacaacccaagaggtctttagtcctctggcataatttagacatgttttggaagagcatgagttccatatctgagatgagatttaagactttcagtgcagatagtacaagccatttcttcagggttcctctgggggcagctccttcatgaggtcccacctccggggaggggcacagggctccagatagtaagcacttaaggcaaacagtggatggcaccaacttttaaaggtgactctattaatggcttcacctctaaattatatttttacagatatgcacctatgcaacttaacgtggctcttctaagcaggtgaggacttcctcctcaatgctctctataaaaattatttgtgttctatatagtgagttttaccagtaaatgtggcttaatattttaattcttagaatgtgtcttctctacgtgatgtgactaaattctgttttgtttgtggaatgactagcacaggccgactccctctctccctcacttaacaaaagaccaatgagctgttaatcgagctgttatctccatggtattacttgctaaatgcactgatttcataagtatgtggaatccttttccttttgaatctgtatatcatatataagactgaatctacttaataaacactgaacaacaaaccg

SEQ ID NO: 161184 - DNA, 4741 bp, Homo sapiens
  Payload ID: 11479
  Gene Symbol: NOL6
  Gene Name: nucleolar protein 6 (RNA-associated)
  Uniprot ID: Q9H6R4
  ENST ID: ENST00000297990
  CDS Start-End: 89-3529
ggagttaggcatttccgcccacgtgggaagctatgaggtatagacccggctagaatctgaagtgcgggagagtgctggaccctgagtgatggggccggcgccagctggagagcagcttcgcggagcgactggagagccagaggtgatggaaccagccctggaaggcacaggcaaagaggggaagaaagcatcctccaggaagcgtacattggctgaacctccagcgaagggcctcctgcagccagtgaagctcagcagggcagaactgtacaaggagcctaccaatgaggagcttaatcgccttcgggagactgagatcttgttccactccagcttgcttcgtttacaggtagaggagctactaaaggaagtaaggctgtcagagaagaagaaggatcggattgatgccttcctacgggaggtcaaccagcgggttgtgagggtgccctcagtccctgagacagagctcactgaccaggcatggctcccagctggggttcgagtgcccctccaccaagtgccctatgccgtgaagggctgtttccgcttcctgcccccagcccaggttactgttgtgggcagctaccttctgggcacctgcatccgaccagacatcaatgtggatgtggcactgaccatgcccagggaaatcctacaggacaaggacgggctgaaccagcgctacttccgcaagcgtgccctctacctggcccacttggctcaccacctggcccaggaccccctctttggcagtgtttgcttctcctacacaaatggctgccacctgaaaccctcactgttgctgcggccgcgtggaaaggatgagcgcctggtcactgtacgtctgcatccgtgccctccacctgacttcttccgcccgtgccgcttgctgccaaccaagaacaatgtgcgctctgcctggtaccgagggcagagtcctgcaggggatggtagcccagagcctcctaccccccgctataacacatgggtcctgcaagatacagttctcgagtcccatttgcagctgctgtcaaccattctgagttcagcccagggcctgaaggatggcgtggcacttctgaaggtctggctgcggcagcgggagctggacaagggccagggtgggtttactgggttccttgtctccatgctggttgtcttccttgtgtctacacgcaagatccataccaccatgagtggctaccaggtcctgagaagtgtcttgcagtttctggccactacagacctgacagtcaacgggatcagtttatgtctcagctcagatccctctttgccggccctggctgacttccaccaggccttctccgttgtcttcctggattcctcaggccatctcaacctctgtgctgatgtcactgcctctacttaccaccaggtacagcatgaggcacggctgtctatgatgttgctggacagcagagctgacgacgggttccacctgctgttgatgactcccaaacccatgatccgggcttttgaccatgtcctgcatctccgtccactgagtcgcctgcaggcagcgtgccaccggctgaagctctggccagagctgcaggacaatggtggggactatgtctcagctgctttgggccccctgaccaccctcctggagcagggcctgggggctcggctgaacctgctggctcactctcgacccccagtcccagagtgggacatcagccaagatccaccaaagcacaaagactctgggaccctgaccctgggactccttctccggcctgagggactgaccagcgtccttgagctgggtccagaggcagaccagcctgaggctgctaaattccgccagttctggggatcccgctcggagcttcggcgtttccaggacggagccattcgggaagctgtggtctgggaggcagcctctatgtcccagaagcgccttattccccaccaggtggtcacccacctcttggcactccatgctgacatcccagaaacctgtgtccactatgtggggggccccctggatgcacttatccaaggcctgaaagagacctccagcacaggtgaggaggccctggtagcggcggtacgttgctacgacgacctcagtcgcctactgtgggggctagagggtctcccactgaccgtgtctgctgttcagggagctcacccagtgctgcgctacacagaggtgttcccaccaactccagtccgtccagccttctccttctatgagactctgcgggagcggtcctcactgctgccccggctcgataagccctgtccggcctacgtggagcccatgaccgtggtttgtcacctggagggcagtggccagtggccacaggacgctgaggccgtgcagcgggtccgagctgccttccagctgcgcctggcagagctgttgacacaacagcatggtctgcagtgccgtgccactgccacgcacacggatgtccttaaggatggatttgtgtttcggattcgcgtggcctatcagcgggagccccagatcctgaaggaggtgcagagcccagaggggatgatctcgctgagggacacagctgcctccctccgccttgagagagacacaaggcagttgccactgctcaccagtgccctgcacggactgcagcagcagcacccagccttctctggtgtggcacggctggccaagcggtgggtgcgtgcccagcttcttggtgagggtttcgctgatgagagcctggatctggtggccgctgcccttttcctgcaccctgagcccttcacccctccgagttccccccaggttggcttccttcgattccttttcttggtatcaacgtttgattggaagaacaaccccctctttgtcaacctcaataatgagctcactgtggaggagcaggtggagatccgcagtggcttcctggcagctcgggcacagctccccgtcatggtcattgttaccccccaagaccgcaaaaactctgtgtggacacaggatggaccctcagcccagatcctgcagcagcttgtggtcctggcagctgaagccctgcccatgttagagaagcagctcatggatccccggggacctggggacatcaggacagtgttccggccgcccttggacatttacgacgtgctgattcgcctgtctcctcgccatatcccgcggcaccgccaggctgtggactcgccagctgcctccttctgccggggcctgctcagccagccggggccctcatccctgatgcccgtgctgggctatgatcctcctcagctctatctgacgcagctcagggaggcctttggggatctggcccttttcttctatgaccagcatggtggagaggtgattggtgtcctctggaagcccaccagcttccagccgcagcccttcaaggcctccagcacaaaggggcgcatggtgatgtctcgaggtggggagctagtaatggtgcccaatgttgaagcaatcctggaggactttgctgtgctgggtgaaggcctggtgcagactgtggaggcccgaagtgagaggtggactgtgtgatcccagctctggagcaagctgtagacggacagcaggacattggacctctagagcaagatgtcagtaggatgacctccaccctccttggacatgaatcctccatggagggcctgctggctgaacatgctgaatcatctccaacaaaacccagccccaactttctctctgatgctccagcattggggcaggggcatggtggcccatgtagtctcctgggcctcaccatcccagaagaggagtgggagccagctcagagaaggaactgaacccaggagatccatccacctattagccctgggcctggacctccctgcgatttcccactcctttcttagtcttcttccagaaacagagaaggggatgtgtgcctgggagaggctctgtctccttcctgctgccaggacctgtgcctagacttagcatgcccttcactgcagtgtcaggcctttagatgggacccagcgaaaatgtggcccttctgagtcacatcaccgacactgagcagtggaaaggggctatatgtgtatgaatagaccacattgaaggagcacaatgccctcctgtgttgatgccacttcccagggtggagacagtggaaaagaaccgaggacaggaaaggattgggtaggtgaaggggtcaggggactggtagtcacccaatcttggagaggtgcaaaaagcactgggggctacccgttagctgcatctgccctggctgtttgcccgttcatgtcacaaactgccactactatgtacctgcagtggggttgcagagatgggggagactcaagtcttactccccaggagctcccagggcccaaggaggagaatgctgcctcctttcagtctggtctacacccactttctggtagcctctctgcttcctgtaattctggctgtttttccagactcagctcaaatagtgcccctccttaagcccatccctcgcccccagcctgaggtgatctttccctcctctgaactattagagcagttactgtctgttcagttcgtttggcaggcacacacagtggcataaattctattgttttgaactctgatttaaaattaaattgcagctgggcgtggtggcttatgcttgtaatcccaacacttagggagtcaggagaatcacttgagctcaggagttctagaccaatctgggcaacagagagaccccatctcttttaaataaaaagttaaattgcttaa

SEQ ID NO: 161185 - DNA, 3411 bp, Homo sapiens
  Payload ID: 11479
  Gene Symbol: NOL6
  Gene Name: nucleolar protein 6 (RNA-associated)
  Uniprot ID: Q9H6R4
  ENST ID: ENST00000353159
  CDS Start-End: 89-2188
ggagttaggcatttccgcccacgtgggaagctatgaggtatagacccggctagaatctgaagtgcgggagagtgctggaccctgagtgatggggccggcgccagctggagagcagcttcgcggagcgactggagagccagaggtgatggaaccagccctggaaggcacaggcaaagaggggaagaaagcatcctccaggaagcgtacattggctgaacctccagcgaagggcctcctgcagccagtgaagctcagcagggcagaactgtacaaggagcctaccaatgaggagcttaatcgccttcgggagactgagatcttgttccactccagcttgcttcgtttacaggtagaggagctactaaaggaagtaaggctgtcagagaagaagaaggatcggattgatgccttcctacgggaggtcaaccagcgggttgtgagggtgccctcagtccctgagacagagctcactgaccaggcatggctcccagctggggttcgagtgcccctccaccaagtgccctatgccgtgaagggctgtttccgcttcctgcccccagcccaggttactgttgtgggcagctaccttctgggcacctgcatccgaccagacatcaatgtggatgtggcactgaccatgcccagggaaatcctacaggacaaggacgggctgaaccagcgctacttccgcaagcgtgccctctacctggcccacttggctcaccacctggcccaggaccccctctttggcagtgtttgcttctcctacacaaatggctgccacctgaaaccctcactgttgctgcggccgcgtggaaaggatgagcgcctggtcactgtacgtctgcatccgtgccctccacctgacttcttccgcccgtgccgcttgctgccaaccaagaacaatgtgcgctctgcctggtaccgagggcagagtcctgcaggggatggtagcccagagcctcctaccccccgctataacacatgggtcctgcaagatacagttctcgagtcccatttgcagctgctgtcaaccattctgagttcagcccagggcctgaaggatggcgtggcacttctgaaggtctggctgcggcagcgggagctggacaagggccagggtgggtttactgggttccttgtctccatgctggttgtcttccttgtgtctacacgcaagatccataccaccatgagtggctaccaggtcctgagaagtgtcttgcagtttctggccactacagacctgacagtcaacgggatcagtttatgtctcagctcagatccctctttgccggccctggctgacttccaccaggccttctccgttgtcttcctggattcctcaggccatctcaacctctgtgctgatgtcactgcctctacttaccaccaggtacagcatgaggcacggctgtctatgatgttgctggacagcagagctgacgacgggttccacctgctgttgatgactcccaaacccatgatccgggcttttgaccatgtcctgcatctccgtccactgagtcgcctgcaggcagcgtgccaccggctgaagctctggccagagctgcaggacaatggtggggactatgtctcagctgctttgggccccctgaccaccctcctggagcagggcctgggggctcggctgaacctgctggctcactctcgacccccagtcccagagtgggacatcagccaagatccaccaaagcacaaagactctgggaccctgaccctgggactccttctccggcctgagggactgaccagcgtccttgagctgggtccagaggcagaccagcctgaggctgctaaattccgccagttctggggatcccgctcggagcttcggcgtttccaggacggagccattcgggaagctgtggtctgggaggcagcctctatgtcccagaagcgccttattccccaccaggtggtcacccacctcttggcactccatgctgacatcccagaaacctgtgtccactatgtggggggccccctggatgcacttatccaaggcctgaaagaggcctccagcacaaaggggcgcatggtgatgtctcgaggtggggagctagtaatggtgcccaatgttgaagcaatcctggaggactttgctgtgctgggtgaaggcctggtgcagactgtggaggcccgaagtgagaggtggactgtgtgatcccagctctggagcaagctgtagacggacagcaggacattggacctctagagcaagatgtcagtaggatgacctccaccctccttggacatgaatcctccatggagggcctgctggctgaacatgctgaatcatctccaacaaaacccagccccaactttctctctgatgctccagcattggggcaggggcatggtggcccatgtagtctcctgggcctcaccatcccagaagaggagtgggagccagctcagagaaggaactgaacccaggagatccatccacctattagccctgggcctggacctccctgcgatttcccactcctttcttagtcttcttccagaaacagagaaggggatgtgtgcctgggagaggctctgtctccttcctgctgccaggacctgtgcctagacttagcatgcccttcactgcagtgtcaggcctttagatgggacccagcgaaaatgtggcccttctgagtcacatcaccgacactgagcagtggaaaggggctatatgtgtatgaatagaccacattgaaggagcacaatgccctcctgtgttgatgccacttcccagggtggagacagtggaaaagaaccgaggacaggaaaggattgggtaggtgaaggggtcaggggactggtagtcacccaatcttggagaggtgcaaaaagcactgggggctacccgttagctgcatctgccctggctgtttgcccgttcatgtcacaaactgccactactatgtacctgcagtggggttgcagagatgggggagactcaagtcttactccccaggagctcccagggcccaaggaggagaatgctgcctcctttcagtctggtctacacccactttctggtagcctctctgcttcctgtaattctggctgtttttccagactcagctcaaatagtgcccctccttaagcccatccctcgcccccagcctgaggtgatctttccctcctctgaactattagagcagttactgtctgttcagttcgtttggcaggcacacacagtggcataaattctattgttttgaactctgatttaaaattaaattgcagctgggcgtggtggcttatgcttgtaatcccaacacttagggagtcaggagaatcacttgagctcaggagttctagaccaatctgggcaacagagagaccccatctcttttaaataaaaagttaaattgcttaatttcccccgta

SEQ ID NO: 161186 - DNA, 2190 bp, Homo sapiens
  Payload ID: 11479
  Gene Symbol: NOL6
  Gene Name: nucleolar protein 6 (RNA-associated)
  ENST ID: ENST00000379470
  CDS Start-End: 376-978
actttttccccagctgagaagtttccttgcggccagccatcatccttcgtgctgcaccctaagtctacatgggaatgggtggttgagcaagtggcagaaggggttctaagatgccctgccctgccaatccacaccagggggtctgagctccatagcctgagagaagcctggggatatgtggctgggccctggattctttgcttactccagccctttagttccccccaggttggcttccttcgattccttttcttggtatcaacgtttgattggaagaacaaccccctctttgtcaacctcaataatgagctcactgtggaggagcaggtggagatccgcagtggcttcctggcagctcgggcacagctccccgtcatggtcattgttaccccccaagaccgcaaaaactctgtgtggacacaggatggaccctcagcccagatcctgcagcagcttgtggtcctggcagctgaagccctgcccatgttagagaagcagctcatggatccccggggacctggggacatcaggacagtgttccggccgcccttggacatttacgacgtgctgattcgcctgtctcctcgccatatcccgcggcaccgccaggctgtggactcgccagctgcctccttctgccggggcctgctcagccagccggggccctcatccctgatgcccgtgctgggctatgatcctcctcagctctatctgacgcagctcagggaggcctttggggatctggcccttttcttctatgaccagcatggtggagaggtgattggtgtcctctggaagcccaccagcttccagccgcagcccttcaaggcctccagcacaaaggggcgcatggtgatgtctcgaggtggggagctagtaatggtgcccaatgttgaagcaatcctggaggactttgctgtgctgggtgaaggcctggtgcagactgtggaggcccgaagtgagaggtggactgtgtgatcccagctctggagcaagctgtagacggacagcaggacattggacctctagagcaagatgtcagtaggatgacctccaccctccttggacatgaatcctccatggagggcctgctggctgaacatgctgaatcatctccaacaaaacccagccccaactttctctctgatgctccagcattggggcaggggcatggtggcccatgtagtctcctgggcctcaccatcccagaagaggagtgggagccagctcagagaaggaactgaacccaggagatccatccacctattagccctgggcctggacctccctgcgatttcccactcctttcttagtcttcttccagaaacagagaaggggatgtgtgcctgggagaggctctgtctccttcctgctgccaggacctgtgcctagacttagcatgcccttcactgcagtgtcaggcctttagatgggacccagcgaaaatgtggcccttctgagtcacatcaccgacactgagcagtggaaaggggctatatgtgtatgaatagaccacattgaaggagcacaatgccctcctgtgttgatgccacttcccagggtggagacagtggaaaagaaccgaggacaggaaaggattgggtaggtgaaggggtcaggggactggtagtcacccaatcttggagaggtgcaaaaagcactgggggctacccgttagctgcatctgccctggctgtttgcccgttcatgtcacaaactgccactactatgtacctgcagtggggttgcagagatgggggagactcaagtcttactccccaggagctcccagggcccaaggaggagaatgctgcctcctttcagtctggtctacacccactttctggtagcctctctgcttcctgtaattctggctgtttttccagactcagctcaaatagtgcccctccttaagcccatccctcgcccccagcctgaggtgatctttccctcctctgaactattagagcagttactgtctgttcagttcgtttggcaggcacacacagtggcataaattctattgttttgaactctgatttaaaattaaattgcagctgggcgtggtggcttatgcttgtaatcccaacacttagggagtcaggagaatcacttgagctcaggagttctagaccaatctgggcaacagagagaccccatctcttttaaataaaaagttaaattgcttaa

SEQ ID NO: 161187 - DNA, 3843 bp, Homo sapiens
  Payload ID: 11479
  Gene Symbol: NOL6
  Gene Name: nucleolar protein 6 (RNA-associated)
  ENST ID: ENST00000379471
  CDS Start-End: 89-3113
ggagttaggcatttccgcccacgtgggaagctatgaggtatagacccggctagaatctgaagtgcgggagagtgctggaccctgagtgatggggccggcgccagctggagagcagcttcgcggagcgactggagagccagaggtgatggaaccagccctggaaggcacaggcaaagaggggaagaaagcatcctccaggaagcgtacattggctgaacctccagcgaagggcctcctgcagccagtgaagctcagcagggcagaactgtacaaggagcctaccaatgaggagcttaatcgccttcgggagactgagatcttgttccactccagcttgcttcgtttacaggtagaggagctactaaaggaagtaaggctgtcagagaagaagaaggatcggattgatgccttcctacgggaggtcaaccagcgggttgtgagggtgccctcagtccctgagacagagctcactgaccaggcatggctcccagctggggttcgagtgcccctccaccaagtgccctatgccgtgaagggctgtttccgcttcctgcccccagcccaggttactgttgtgggcagctaccttctgggcacctgcatccgaccagacatcaatgtggatgtggcactgaccatgcccagggaaatcctacaggacaaggacgggctgaaccagcgctacttccgcaagcgtgccctctacctggcccacttggctcaccacctggcccaggaccccctctttggcagtgtttgcttctcctacacaaatggctgccacctgaaaccctcactgttgctgcggccgcgtggaaaggatgagcgcctggtcactgtacgtctgcatccgtgccctccacctgacttcttccgcccgtgccgcttgctgccaaccaagaacaatgtgcgctctgcctggtaccgagggcagagtcctgcaggggatggtagcccagagcctcctaccccccgctataacacatgggtcctgcaagatacagttctcgagtcccatttgcagctgctgtcaaccattctgagttcagcccagggcctgaaggatggcgtggcacttctgaaggtctggctgcggcagcgggagctggacaagggccagggtgggtttactgggttccttgtctccatgctggttgtcttccttgtgtctacacgcaagatccataccaccatgagtggctaccaggtcctgagaagtgtcttgcagtttctggccactacagacctgacagtcaacgggatcagtttatgtctcagctcagatccctctttgccggccctggctgacttccaccaggccttctccgttgtcttcctggattcctcaggccatctcaacctctgtgctgatgtcactgcctctacttaccaccaggtacagcatgaggcacggctgtctatgatgttgctggacagcagagctgacgacgggttccacctgctgttgatgactcccaaacccatgatccgggcttttgaccatgtcctgcatctccgtccactgagtcgcctgcaggcagcgtgccaccggctgaagctctggccagagctgcaggacaatggtggggactatgtctcagctgctttgggccccctgaccaccctcctggagcagggcctgggggctcggctgaacctgctggctcactctcgacccccagtcccagagtgggacatcagccaagatccaccaaagcacaaagactctgggaccctgaccctgggactccttctccggcctgagggactgaccagcgtccttgagctgggtccagaggcagaccagcctgaggctgctaaattccgccagttctggggatcccgctcggagcttcggcgtttccaggacggagccattcgggaagctgtggtctgggaggcagcctctatgtcccagaagcgccttattccccaccaggtggtcacccacctcttggcactccatgctgacatcccagaaacctgtgtccactatgtggggggccccctggatgcacttatccaaggcctgaaagagacctccagcacaggtgaggaggccctggtagcggcggtacgttgctacgacgacctcagtcgcctactgtgggggctagagggtctcccactgaccgtgtctgctgttcagggagctcacccagtgctgcgctacacagaggtgttcccaccaactccagtccgtccagccttctccttctatgagactctgcgggagcggtcctcactgctgccccggctcgataagccctgtccggcctacgtggagcccatgaccgtggtttgtcacctggagggcagtggccagtggccacaggacgctgaggccgtgcagcgggtccgagctgccttccagctgcgcctggcagagctgttgacacaacagcatggtctgcagtgccgtgccactgccacgcacacggatgtccttaaggatggatttgtgtttcggattcgcgtggcctatcagcgggagccccagatcctgaaggaggtgcagagcccagaggggatgatctcgctgagggacacagctgcctccctccgccttgagagagacacaaggcagttgccactgctcaccagtgccctgcacggactgcagcagcagcacccagccttctctggtgtggcacggctggccaagcggtgggtgcgtgcccagcttcttggtgagggtttcgctgatgagagcctggatctggtggccgctgcccttttcctgcaccctgagcccttcacccctccgagttccccccaggttggcttccttcgattccttttcttggtatcaacgtttgattggaagaacaaccccctctttgtcaacctcaataatgagctcactgtggaggagcaggtggagatccgcagtggcttcctggcagctcgggcacagctccccgtcatggtcattgttaccccccaagaccgcaaaaactctgtgtggacacaggatggaccctcagcccagatcctgcagcagcttgtggtcctggcagctgaagccctgcccatgttagagaagcagctcatggatccccggggacctggggacatcaggatgggacccagcgaaaatgtggcccttctgagtcacatcaccgacactgagcagtggaaaggggctatatgtgtatgaatagaccacattgaaggagcacaatgccctcctgtgttgatgccacttcccagggtggagacagtggaaaagaaccgaggacaggaaaggattgggtaggtgaaggggtcaggggactggtagtcacccaatcttggagaggtgcaaaaagcactgggggctacccgttagctgcatctgccctggctgtttgcccgttcatgtcacaaactgccactactatgtacctgcagtggggttgcagagatgggggagactcaagtcttactccccaggagctcccagggcccaaggaggagaatgctgcctcctttcagtctggtctacacccactttctggtagcctctctgcttcctgtaattctggctgtttttccagactcagctcaaatagtgcccctccttaagcccatccctcgcccccagcctgaggtgatctttccctcctctgaactattagagcagttactgtctgttcagttcgtttggcaggcacacacagtggcataaattctattgttttgaactctgatttaaaattaaattgcagctgggcgtggtggcttatgcttgtaatcccaacacttagggagtcaggagaatcacttgagctcaggagttctagaccaatctgggcaacagagagaccccatctcttttaaataaaaagttaaattgcttaa

SEQ ID NO: 161188 - DNA, 646 bp, Homo sapiens
  Payload ID: 11480
  Gene Symbol: NOL7
  Gene Name: nucleolar protein 7, 27kDa
  ENST ID: ENST00000420088
  CDS Start-End: 1-250
cccggaggagctgactttcgccagcgcccaggcggaagcgagagaagaggagcggcgagtgcgggagaccgtgcgcagggataaaacgctcctgaaggagaagaggaagcgacgcgaggagctgttcatcgaacagaagaaaagaaaactccttccagacactattttggagaagttaaccacagcttcacagactaacatcaagaaatcgccaggaaaggtgaaagaaggtatgactattctaatttaactaacttctcatgtaagtgtcaagtgcacttgcagatgtttccagtcaaatatgaatggcccttagaaagccagcatgggcctggccaaggttagctggggcctattccctgtatttcatacaaataaaaactgcatccacattggtgtgtagtggatgcttaaagtgaactccagtaaatttcctgatttatttttacgtgaatgctaattagaaaatgtaactctattttttagttaatttgcaaaagaaaaatgaagactgtgaaaaaggaaatgactccaagaaagttaaagtacaaaaagtacagtctgtcaggtaatgagtcttttgtttcatttgggatgtaaaggagacctttaagagagttaaagtattggctaacatgggaaaata

SEQ ID NO: 161189 - DNA, 1184 bp, Homo sapiens
  Payload ID: 11480
  Gene Symbol: NOL7
  Gene Name: nucleolar protein 7, 27kDa
  Uniprot ID: Q9UMY1
  ENST ID: ENST00000451315
  CDS Start-End: 33-806
cagaggtcagacggtctagcgctgcgtgggccatggtgcagctccgaccgcgagcgtctcgcgccccggcgtcggcggaggcgatggtggacgagggccagctggcctcggaggaggaggaggcggagcacgggctgttgctcgggcagcccagcagcggcgcggccgccgagcccctggaggaagacgaggaaggggacgatgagtttgacgatgaggccccggaggagctgactttcgccagcgcccaggcggaagcgagagaagaggagcggcgagtgcgggagaccgtgcgcagggataaaacgctcctgaaggagaagaggaagcgacgcgaggagctgttcatcgaacagaagaaaagaaaactccttccagacactattttggagaagttaaccacagcttcacagactaacatcaagaaatcgccaggaaaggtgaaagaagttaatttgcaaaagaaaaatgaagactgtgaaaaaggaaatgactccaagaaagttaaagtacaaaaagtacagtctgtcagccagaataaaagctacttggccgtaaggctaaaagaccaagatctgagagattcaaggcaacaagcagcacaagccttcatacataattcattatatgggccaggaaccaacaggactactgtaaataagttcctgtctcttgccaacaagaggttaccagtgaaaagagctgctgtccagtttttgaataatgcttggggaatccaaaaaaaacaaaatgccaagaggtttaaaagacggtggatggtcagaaagatgaaaactaagaagtaaatcaatgctaaatgaagaatctgtactttgtatgtatagaatttatctaataaatcattcatagatcattttaaaggatcattataaaaatcataaacctatttgaggaagtgctcaaccacatttcattcttctggagtagaactgtgccttgcaatcctagaggaaaaagtggtttaagaaggaattgttttctttttaatatatttaactgaattcaagccatacccacatcagcaacagcacctcttctactctccccgggttagaggggtggcaaaaatggcacggactaaaaggagaaatggatattccagcaaagtctctaactgcagcctgtagacaatttgctattaaagattcagtgcacaaaatata

SEQ ID NO: 161190 - DNA, 4422 bp, Homo sapiens
  Payload ID: 11481
  Gene Symbol: NOL8
  Gene Name: nucleolar protein 8
  Uniprot ID: Q76FK4
  ENST ID: ENST00000358855
  CDS Start-End: 646-3945
cttacgccgacctagtccaggaattggtacacacagcgatagtgttcaatagaaactaggggattttggtttaggctcttttgcagtcgttgagggggaggtgacggaggcgtcagggaaggtgggaggacggaaaaggaaattaaaagctcttgggaactgaattgtggtaacggaaccttaggaggctgggttggaaatcgagtaggaaggaagagaggatgctccgttgggacacgtgaccagaagttaggggctgcagcggcgctggctttagaaaattacttttcccactgaaacacacccaagtatatgcccagccttcatgaaagtgaacagagaaacgaagcgcctttatgtgggtggccttagccaggacatttctgaggcagacctacaaaatcagttcagcagatttggagaagtttcggatgtggagatcatcacacggaaagatgaccaaggaaacccacagaaagtttttgcatatatcaacatcagtgtagcagaagcggacctgaaaaaatccatttttcacgttatccagagggacagcagtgatgaagagaattccagtatcgtataactcagcaggtttaggtccattccatttggcatcagcagacatggtagcactttactggtatgtctgttttaaataaaacaaaatggaaaggtggaacattacaaattcaactagcaaaagaaagctttctgcacagattggcccaagagagagaagcagcaaaagctaagaaagaagaatcaacaacaggtaacgccaacttgttagaaaagacaggaggagtggatttccatatgaaagctgtgccagggacagaagtgccagggcataagaattgggttgtgagcaaatttggaagagtcttacctgttcttcaccttaaaaatcaacataaacgtaaaatcatcaaatatgatccctcaaaatactgccacaacctgaagaagataggggaggatttctcaaacaccattcctatatccagcctgacttgggaattagaaggagggaatgaccctatgagtaagaaacggcgaggagagttctctgactttcatggccctcccaagaagataataaaagtgcagaaggatgagagttccactgggtctctggccatgagtacaaggcccaggagggtaatagagagaccacccttaacacagcaacaggctgcacaaaaaagaacttgtgattccattactccttctaaatcatctcctgtacctgtttctgatactcagaaacttaaaaatctaccttttaagacttctggcttggaaactgccaagaagagaaacagcatttctgatgatgatactgattctgaagatgaattgagaatgatgattgcgaaagaggaaaacttacagagaactacacaaccctcaataaatgaatctgaaagtgatccttttgaagttgtaagggatgatttcaaatcaggcgttcacaaactgcattctttaataggtttaggtatcaaaaatcgtgtctcttgccatgatagtgatgatgatattatgagaaatgatcgtgagtatgactcaggagatacagatgaaattattgcgatgaaaaaaaatgttgctaaggtcaaaaacagtacagaattttcacaaatggaaaaatctacgaagaaaacttctttcaaaaatagagaaaactgtgagctttctgatcactgtattaaactacaaaaaagaaaaagcaatgtagagtcagccctcagtcatggattaaagtctcttaatcgtaaatctccctctcactccagtagcagtgaagatgctgattctgcatcagaattagctgactctgaaggaggtgaggagtataatgccatgatgaaaaactgccttcgtgtgaatctcactttagctgatttggaacaattggctggcagtgatctgaaggttccaaatgaagatactaagagtgatggaccagaaaccaccacccaatgcaagtttgacagaggctccaagagccccaagactcccactggcctccgcagaggccgacagtgtattcgtcctgcggagattgtggcttccctgttagaaggagaggagaacacctgtggcaaacagaaaccaaaggaaaacaatttaaagccaaaatttcaggctttcaagggagtaggctgtctatatgaaaaggagtcaatgaaaaaatccttgaaagacagtgttgcctctaacaataaagatcagaattccatgaaacatgaggatcccagtatcatatccatggaagatgggtccccatatgttaatggctcattaggtgaagtgactccatgccaacatgcaaagaaggcgaatggcccaaactatattcagcctcaaaaaagacagaccacttttgaaagccaggatcgcaaggcagtgtcccctagcagttctgaaaagagaagtaagaatcctatttctaggccattagaaggtaagaagtccttaagtcttagtgcaaagactcacaacataggctttgacaaagacagctgccatagtaccacaaagacagaagcttcacaggaagagcggtctgattcaagcggcctcacatctctcaagaaatcaccaaaggtctcatccaaggacactcgggaaatcaaaactgatttctcactttctattagtaattcgtcagatgtgagtgctaaagataagcatgctgaagacaatgagaagcgtttggcagccttggaagcgaggcaaaaagcaaaagaagtgcagaagaagctggtgcataatgctctggcaaatttggatggtcatccagaggataagccaacgcacatcatcttcggttctgacagtgaatgtgaaacagaggagacatcgactcaggagcagagccatccaggagaggaatgggtgaaagagtctatgggtaaaacatcagggaagctgtttgatagcagtgatgatgacgaatctgattctgaagatgacagtaataggttcaaaattaaacctcagtttgagggcagagctggacagaagctcatggatttacagtcgcactttggcaccgatgacagattccgcatggactctcgatttctagaaactgacagtgaagaggaacaggaagaggtaaatgaaaagaaaactgctgaggaagaagagcttgctgaagaaaaaaagaaagccctgaatgttgtacaaagtgttttgcaaatcaacttaagcaattctacaaacagaggatcagtagctgctaagaaatttaaggacatcatacattatgatccaacgaagcaagaccatgccacttacgaaagaaaaagagatgataagccaaaagaaagtaaagcaaaacgaaaaaagaaaagggaggaagctgagaaactacctgaggtgtctaaagaaatgtattataatattgctatggatctgaaagaaatattccaaactacaaaatataccagtgaaaaggaagagggcacaccctggaatgaggactgtggtaaagagaaacctgaggaaatccaggaccctgcagctctgaccagtgacgctgagcagcccagcgggttcacgttctctttttttgattcagacactaaagacataaaggaagagacctacagagttgaaacagtgaaacctggaaagattgtctggcaggaagaccctcgtttacaagacagcagttcagaagaggaagatgttactgaagaaacagatcacagaaactccagtcctggagaagcatcattacttgagaaagagaccactagatttttctttttctctaagaatgatgaacgacttcaaggttctgacttattctggagaggagtaggaagtaatatgagcaggaactcttgggaggccagaacaaccaacctgcgtatggattgtcgaaagaaacataaagacgcaaaaaggaaaatgaaaccaaaataataaatgtcagctggttttgatactgaatgtgaacaaggctcacctaaggaaactgacccagaaaacagttttagctgacaaagaagaaatttcagagtgaaggaattttaaaaatctggctgacggaatatcattctggttgccatctttttctgtggaactcctctgcatttcttcctaagtaattacttcaaaaattaaattcaacttcttataaaggaagaacaagatagtccttgaaaatactttttgtatataatctctttgccctctatcctgagtaactaatggacatcttctcatgcaaggtttatatgaagcctttttaaataaatgagtcaaagcacttgtattttccagcctaggctttgtgtgaattataggctatttgaaattttatttctgattatgtcaaatacaccttccattttgtcatttttgtttaaactgataaattacaagtcaacattgagtttt

SEQ ID NO: 161191 - DNA, 4341 bp, Homo sapiens
  Payload ID: 11481
  Gene Symbol: NOL8
  Gene Name: nucleolar protein 8
  ENST ID: ENST00000360868
  CDS Start-End: 500-760
ggaggaagaaggctggggtgggtaggttgggggtggagacaattaggaagaggtaggctagctctttttatcttttagtgcgttacatcctgtttctgtcagactttgttaaagacagtaaatgaatgtatgagtgagtcaaggaaaaacatctaaaaacatgaatacataaaattaagagggatagagtgtaatattatggccatttggaggaaaaaaactctgtctgtacctgtgtctatatgggtatggggttgctgttccaaagtgcattcatgaaagatgtggatgtagggcttgggcaaaacctcgaagactaaaatttggaagtaatacaataggaagtgaaatacagatccaggagacggatttgatacagaaggttcagaggaagtagttgttttgttagattttagaagaactaagggaaagaactcttctctgtatacagaaaattacttttcccactgaaacacacccaagtatatgcccagccttcatgaaagtgaacagagaaacgaagcgcctttatgtgggtggccttagccaggacatttctgaggcagacctacaaaatcagttcagcagatttggagaagtttcggatgtggagatcatcacacggaaagatgaccaaggaaacccacagaaagtttttgcatatatcaacatcagtgtagcagaagcggacctgaaaaaatccatttttcacgttatccagagggacagcagtgatgaagagaattccagtatcgtataactcagcaggtttaggtccattccatttggcatcagcagacatggtagcactttactggtatgtctgttttaaataaaacaaaatggaaaggtggaacattacaaattcaactagcaaaagaaagctttctgcacagattggcccaagagagagaagcagcaaaagctaagaaagaagaatcaacaacaggtaacgccaacttgttagaaaagacaggaggagtggatttccatatgaaagctgtgccagggacagaagtgccagggcataagaattgggttgtgagcaaatttggaagagtcttacctgttcttcaccttaaaaatcaacataaacgtaaaatcatcaaatatgatccctcaaaatactgccacaacctgaagaagataggggaggatttctcaaacaccattcctatatccagcctgacttgggaattagaaggagggaatgaccctatgagtaagaaacggcgaggagagttctctgactttcatggccctcccaagaagataataaaagtgcagaaggatgagagttccactgggtctctggccatgagtacaaggcccaggagggtaatagagagaccacccttaacacagcaacaggctgcacaaaaaagaacttgtgattccattactccttctaaatcatctcctgtacctgtttctgatactcagaaacttaaaaatctaccttttaagacttctggcttggaaactgccaagaagagaaacagcatttctgatgatgatactgattctgaagatgaattgagaatgatgattgcgaaagaggaaaacttacagagaactacacaaccctcaataaatgaatctgaaagtgatccttttgaagttgtaagggatgatttcaaatcaggcgttcacaaactgcattctttaataggtttaggtatcaaaaatcgtgtctcttgccatgatagtgatgatgatattatgagaaatgatcgtgagtatgactcaggagatacagatgaaattattgcgatgaaaaaaaatgttgctaaggtcaaaaacagtacagaattttcacaaatggaaaaatctacgaagaaaacttctttcaaaaatagagaaaactgtgagctttctgatcactgtattaaactacaaaaaagaaaaagcaatgtagagtcagccctcagtcatggattaaagtctcttaatcgtaaatctccctctcactccagtagcagtgaagatgctgattctgcatcagaattagctgactctgaaggaggtgaggagtataatgccatgatgaaaaactgccttcgtgtgaatctcactttagctgatttggaacaattggctggcagtgatctgaaggttccaaatgaagatactaagagtgatggaccagaaaccaccacccaatgcaagtttgacagaggctccaagagccccaagactcccactggcctccgcagaggccgacagtgtattcgtcctgcggagattgtggcttccctgttagaaggagaggagaacacctgtggcaaacagaaaccaaaggaaaacaatttaaagccaaaatttcaggctttcaagggagtaggctgtctatatgaaaaggagtcaatgaaaaaatccttgaaagacagtgttgcctctaacaataaagatcagaattccatgaaacatgaggatcccagtatcatatccatggaagatgggtccccatatgttaatggctcattaggtgaagtgactccatgccaacatgcaaagaaggcgaatggcccaaactatattcagcctcaaaaaagacagaccacttttgaaagccaggatcgcaaggcagtgtcccctagcagttctgaaaagagaagtaagaatcctatttctaggccattagaaggtaagaagtccttaagtcttagtgcaaagactcacaacataggctttgacaaagacagctgccatagtaccacaaagacagaagcttcacaggaagagcggtctgattcaagcggcctcacatctctcaagaaatcaccaaaggtctcatccaaggacactcgggaaatcaaaactgatttctcactttctattagtaattcgtcagatgtgagtgctaaagataagcatgctgaagacaatgagaagcgtttggcagccttggaagcgaggcaaaaagcaaaagaagtgcagaagaagctggtgcataatgctctggcaaatttggatggtcatccagaggataagccaacgcacatcatcttcggttctgacagtgaatgtgaaacagaggagacatcgactcaggagcagagccatccaggagaggaatgggtgaaagagtctatgggtaaaacatcagggaagctgtttgatagcagtgatgatgacgaatctgattctgaagatgacagtaataggttcaaaattaaacctcagtttgagggcagagctggacagaagctcatggatttacagtcgcactttggcaccgatgacagattccgcatggactctcgatttctagaaactgacagtgaagaggaacaggaagaggtaaatgaaaagaaaactgctgaggaagaagagcttgctgaagaaaaaaagaaagccctgaatgttgtacaaagtgttttgcaaatcaacttaagcaattctacaaacagaggatcagtagctgctaagaaatttaaggacatcatacattatgatccaacgaagcaagaccatgccacttacgaaagaaaaagagatgataagccaaaagaaagtaaagcaaaacgaaaaaagaaaagggaggaagctgagaaactacctgaggtgtctaaagaaatgtattataatattgctatggatctgaaagaaatattccaaactacaaaatataccagtgaaaaggaagagggcacaccctggaatgaggactgtggtaaagagaaacctgaggaaatccaggaccctgcagctctgaccagtgacgctgagcagcccagcgggttcacgttctctttttttgattcagacactaaagacataaaggaagagacctacagagttgaaacagtgaaacctggaaagattgtctggcaggaagaccctcgtttacaagacagcagttcagaagaggaagatgttactgaagaaacagatcacagaaactccagtcctggagaagcatcattacttgagaaagagaccactagatttttctttttctctaagaatgatgaacgacttcaaggttctgacttattctggagaggagtaggaagtaatatgagcaggaactcttgggaggccagaacaaccaacctgcgtatggattgtcgaaagaaacataaagacgcaaaaaggaaaatgaaaccaaaataataaatgtcagctggttttgatactgaatgtgaacaaggctcacctaaggaaactgacccagaaaacagttttagctgacaaagaagaaatttcagagtgaaggaattttaaaaatctggctgacggaatatcattctggttgccatctttttctgtggaactcctctgcatttcttcctaagtaattacttcaaaaattaaattcaacttcttataaaggaa

SEQ ID NO: 161192 - DNA, 572 bp, Homo sapiens
  Payload ID: 11481
  Gene Symbol: NOL8
  Gene Name: nucleolar protein 8
  ENST ID: ENST00000411621
  CDS Start-End: 134-572
aaggaagagaggatgctccgttgggacacgtgaccagaagttaggggctgcagcggcgctggctttaggaaacccacagaaagtttttgcatatatcaacatcagtgtagcagaagcggacctgaaaaaatgtatgtctgttttaaataaaacaaaatggaaaggtggaacattacaaattcaactagcaaaagaaagctttctgcacagattggcccaagagagagaagcagcaaaagctaagaaagaagaatcaacaacaggtaacgccaacttgttagaaaagacaggaggagtggatttccatatgaaagctgtgccagggacagaagtgccagggcataagaattgggttgtgagcaaatttggaagagtcttacctgttcttcaccttaaaaatcaacataaacgtaaaatcatcaaatatgatccctcaaaatactgccacaacctgaagaagataggggaggatttctcaaacaccattcctatatccagcctgacttgggaattagaaggagggaatgaccctatgagtaagaaacggcgaggagagttctctgactttcatg

SEQ ID NO: 161193 - DNA, 1098 bp, Homo sapiens
  Payload ID: 11481
  Gene Symbol: NOL8
  Gene Name: nucleolar protein 8
  ENST ID: ENST00000421075
  CDS Start-End: 326-1098
cttacgccgacctagtccaggaattggtacacacagcgatagtgttcaatagaaactaggggattttggtttaggctcttttgcagtcgttgagggggaggtgacggaggcgtcagggaaggtgggaggacggaaaaggaaattaaaagctcttgggaactgaattgtggtaacggaaccttaggaggctgggttggaaatcgagtaggaaggaagagaggatgctccgttgggacacgtgaccagaagttaggggctgcagcggcgctggctttagaaaattacttttcccactgaaacacacccaagtatatgcccagccttcatgaaagtgaacagagaaacgaagcgcctttatgtgggtggccttagccaggacatttctgaggcagacctacaaaatcagttcagcagatttggagaagtttcggatgtggagatcatcacacggaaagatgaccaaggaaacccacagaaagtttttgcatatatcaacatcagtgtagcagaagcggacctgaaaaaatgtatgtctgttttaaataaaacaaaatggaaaggtggaacattacaaattcaactagcaaaagaaagctttctgcacagattggcccaagagagagaagcagcaaaagctaagaaagaagaatcaacaacaggtaacgccaacttgttagaaaagacaggaggagtggatttccatatgaaagctgtgccagggacagaagtgccagggcataagaattgggttgtgagcaaatttggaagagtcttacctgttcttcaccttaaaaatcaacataaacgtaaaatcatcaaatatgatccctcaaaatactgccacaacctgaagaagataggggaggatttctcaaacaccattcctatatccagcctgacttgggaattagaaggagggaatgaccctatgagtaagaaacggcgaggagagttctctgactttcatggccctcccaagaagataataaaagtgcagaaggatgagagttccactgggtctctggccatgagtacaaggcccaggagggtaatagagagaccacccttaacacagcaacaggctgcacaaaaaagaac

SEQ ID NO: 161194 - DNA, 1044 bp, Homo sapiens
  Payload ID: 11481
  Gene Symbol: NOL8
  Gene Name: nucleolar protein 8
  ENST ID: ENST00000445919
  CDS Start-End: 182-487
cgacgtggtgaggagtgggtttcgggcatgagaagtcacagggccgtttcctagtctctcttcacttctttgggtcttctcagagaaagaaggctgccgtgggtaggctgggggcggagactatcgggaagagaaaattacttttcccactgaaacacacccaagtatatgcccagccttcatgaaagtgaacagagaaacgaagcgcctttatgtgggtggccttagccaggacatttctgaggcagacctacaaaatcagttcagcagatttggagaagtttcggatgtggagatcatcacacggaaagatgaccaaggaaacccacagaaagtttttgcatatatcaacatcagtgtagcagaagcggacctgaaaaaatgtatgtctgttttaaataaaacaaaatggaaaggtggaacattacaaattcaactagcaaaagaaagctttctgcacaggaggatatggataatcaagacctaacaaattgggctccgaaagataccttcgtcatggggaagagtgaatggagagaagataatataaaatgccaaacgtatataaattgaaaggggaaaattgagagaacttgcgatccatggtcttggtcttccataaaggggaactgggacatccactggagcagagcacagattggcccaagagagagaagcagcaaaagctaagaaagaagaatcaacaacaggtaacgccaacttgttagaaaagacaggaggagtggatttccatatgaaagctgtgccagggacagaagtgccagggcataagaattgggttgtgagcaaatttggaagagtcttacctgttcttcaccttaaaaatcaacataaacgtaaaatcatcaaatatgatccctcaaaatactgccacaacctgaagaagataggggaggatttctcaaacaccattcctatatccagcctgacttgggaattagaaggagggaatgaccctatgagtaagaaacggcgaggagagttctctgactttcatggccctcccaagaagataataaaagt

SEQ ID NO: 161195 - DNA, 4281 bp, Homo sapiens
  Payload ID: 11481
  Gene Symbol: NOL8
  Gene Name: nucleolar protein 8
  Uniprot ID: Q76FK4
  ENST ID: ENST00000442668
  CDS Start-End: 300-3803
atagtgttcaatagaaactaggggattttggtttaggctcttttgcagtcgttgagggggaggtgacggaggcgtcagggaaggtgggaggacggaaaaggaaattaaaagctcttgggaactgaattgtggtaacggaaccttaggaggctgggttggaaatcgagtaggaaggaagagaggatgctccgttgggacacgtgaccagaagttaggggctgcagcggcgctggctttaggtgaacgacgtgaaaattacttttcccactgaaacacacccaagtatatgcccagccttcatgaaagtgaacagagaaacgaagcgcctttatgtgggtggccttagccaggacatttctgaggcagacctacaaaatcagttcagcagatttggagaagtttcggatgtggagatcatcacacggaaagatgaccaaggaaacccacagaaagtttttgcatatatcaacatcagtgtagcagaagcggacctgaaaaaatgtatgtctgttttaaataaaacaaaatggaaaggtggaacattacaaattcaactagcaaaagaaagctttctgcacagattggcccaagagagagaagcagcaaaagctaagaaagaagaatcaacaacaggtaacgccaacttgttagaaaagacaggaggagtggatttccatatgaaagctgtgccagggacagaagtgccagggcataagaattgggttgtgagcaaatttggaagagtcttacctgttcttcaccttaaaaatcaacataaacgtaaaatcatcaaatatgatccctcaaaatactgccacaacctgaagaagataggggaggatttctcaaacaccattcctatatccagcctgacttgggaattagaaggagggaatgaccctatgagtaagaaacggcgaggagagttctctgactttcatggccctcccaagaagataataaaagtgcagaaggatgagagttccactgggtctctggccatgagtacaaggcccaggagggtaatagagagaccacccttaacacagcaacaggctgcacaaaaaagaacttgtgattccattactccttctaaatcatctcctgtacctgtttctgatactcagaaacttaaaaatctaccttttaagacttctggcttggaaactgccaagaagagaaacagcatttctgatgatgatactgattctgaagatgaattgagaatgatgattgcgaaagaggaaaacttacagagaactacacaaccctcaataaatgaatctgaaagtgatccttttgaagttgtaagggatgatttcaaatcaggcgttcacaaactgcattctttaataggtttaggtatcaaaaatcgtgtctcttgccatgatagtgatgatgatattatgagaaatgatcgtgagtatgactcaggagatacagatgaaattattgcgatgaaaaaaaatgttgctaaggtcaaaaacagtacagaattttcacaaatggaaaaatctacgaagaaaacttctttcaaaaatagagaaaactgtgagctttctgatcactgtattaaactacaaaaaagaaaaagcaatgtagagtcagccctcagtcatggattaaagtctcttaatcgtaaatctccctctcactccagtagcagtgaagatgctgattctgcatcagaattagctgactctgaaggaggtgaggagtataatgccatgatgaaaaactgccttcgtgtgaatctcactttagctgatttggaacaattggctggcagtgatctgaaggttccaaatgaagatactaagagtgatggaccagaaaccaccacccaatgcaagtttgacagaggctccaagagccccaagactcccactggcctccgcagaggccgacagtgtattcgtcctgcggagattgtggcttccctgttagaaggagaggagaacacctgtggcaaacagaaaccaaaggaaaacaatttaaagccaaaatttcaggctttcaagggagtaggctgtctatatgaaaaggagtcaatgaaaaaatccttgaaagacagtgttgcctctaacaataaagatcagaattccatgaaacatgaggatcccagtatcatatccatggaagatgggtccccatatgttaatggctcattaggtgaagtgactccatgccaacatgcaaagaaggcgaatggcccaaactatattcagcctcaaaaaagacagaccacttttgaaagccaggatcgcaaggcagtgtcccctagcagttctgaaaagagaagtaagaatcctatttctaggccattagaaggtaagaagtccttaagtcttagtgcaaagactcacaacataggctttgacaaagacagctgccatagtaccacaaagacagaagcttcacaggaagagcggtctgattcaagcggcctcacatctctcaagaaatcaccaaaggtctcatccaaggacactcgggaaatcaaaactgatttctcactttctattagtaattcgtcagatgtgagtgctaaagataagcatgctgaagacaatgagaagcgtttggcagccttggaagcgaggcaaaaagcaaaagaagtgcagaagaagctggtgcataatgctctggcaaatttggatggtcatccagaggataagccaacgcacatcatcttcggttctgacagtgaatgtgaaacagaggagacatcgactcaggagcagagccatccaggagaggaatgggtgaaagagtctatgggtaaaacatcagggaagctgtttgatagcagtgatgatgacgaatctgattctgaagatgacagtaataggttcaaaattaaacctcagtttgagggcagagctggacagaagctcatggatttacagtcgcactttggcaccgatgacagattccgcatggactctcgatttctagaaactgacagtgaagaggaacaggaagaggtaaatgaaaagaaaactgctgaggaagaagagcttgctgaagaaaaaaagaaagccctgaatgttgtacaaagtgttttgcaaatcaacttaagcaattctacaaacagaggatcagtagctgctaagaaatttaaggacatcatacattatgatccaacgaagcaagaccatgccacttacgaaagaaaaagagatgataagccaaaagaaagtaaagcaaaacgaaaaaagaaaagggaggaagctgagaaactacctgaggtgtctaaagaaatgtattataatattgctatggatctgaaagaaatattccaaactacaaaatataccagtgaaaaggaagagggcacaccctggaatgaggactgtggtaaagagaaacctgaggaaatccaggaccctgcagctctgaccagtgacgctgagcagcccagcgggttcacgttctctttttttgattcagacactaaagacataaaggaagagacctacagagttgaaacagtgaaacctggaaagattgtctggcaggaagaccctcgtttacaagacagcagttcagaagaggaagatgttactgaagaaacagatcacagaaactccagtcctggagaagcatcattacttgagaaagagaccactagatttttctttttctctaagaatgatgaacgacttcaaggttctgacttattctggagaggagtaggaagtaatatgagcaggaactcttgggaggccagaacaaccaacctgcgtatggattgtcgaaagaaacataaagacgcaaaaaggaaaatgaaaccaaaataataaatgtcagctggttttgatactgaatgtgaacaaggctcacctaaggaaactgacccagaaaacagttttagctgacaaagaagaaatttcagagtgaaggaattttaaaaatctggctgacggaatatcattctggttgccatctttttctgtggaactcctctgcatttcttcctaagtaattacttcaaaaattaaattcaacttcttataaaggaagaacaagatagtccttgaaaatactttttgtatataatctctttgccctctatcctgagtaactaatggacatcttctcatgcaaggtttatatgaagcctttttaaataaatgagtcaaagcacttgtattttccagcctaggctttgtgtgaattataggctatttgaaattttatttctgattatgtcaaatacaccttccattttgtcatttttgtttaaactgataaattacaagtcaacattgagtttta

SEQ ID NO: 161196 - DNA, 1396 bp, Homo sapiens
  Payload ID: 11481
  Gene Symbol: NOL8
  Gene Name: nucleolar protein 8
  ENST ID: ENST00000433029
  CDS Start-End: 156-1396
ctccgttgggacacgtgaccagaagttaggggctgcagcggcgctggctttaggtgaacgacgtgattttagaagaactaagggaaagaactcttctctgtatacagaaaattacttttcccactgaaacacacccaagtatatgcccagccttcatgaaagtgaacagagaaacgaagcgcctttatgtgggtggccttagccaggacatttctgaggcagacctacaaaatcagttcagcagatttggagaagtttcggatgtggagatcatcacacggaaagatgaccaaggaaacccacagaaagtttttgcatatatcaacatcagtgtagcagaagcggacctgaaaaaatgtatgtctgttttaaataaaacaaaatggaaaggtggaacattacaaattcaactagcaaaagaaagctttctgcacagattggcccaagagagagaagcagcaaaagctaagaaagaagaatcaacaacaggtaacgccaacttgttagaaaagacaggaggagtggatttccatatgaaagctgtgccagggacagaagtgccagggcataagaattgggttgtgagcaaatttggaagagtcttacctgttcttcaccttaaaaatcaacataaacgtaaaatcatcaaatatgatccctcaaaatactgccacaacctgaagaagataggggaggatttctcaaacaccattcctatatccagcctgacttgggaattagaaggagggaatgaccctatgagtaagaaacggcgaggagagttctctgactttcatggccctcccaagaagataataaaagtgcagaaggatgagagttccactgggtctctggccatgagtacaaggcccaggagggtaatagagagaccacccttaacacagcaacaggctgcacaaaaaagaacttgtgattccattactccttctaaatcatctcctgtacctgtttctgatactcagaaacttaaaaatctaccttttaagacttctggcttggaaactgccaagaagagaaacagcatttctgatgatgatactgattctgaagatgaattgagaatgatgattgcgaaagaggaaaacttacagagaactacacaaccctcaataaatgaatctgaaagtgatccttttgaagttgtaagggatgatttcaaatcaggcgttcacaaactgcattctttaataggtttaggtatcaaaaatcgtgtctcttgccatgatagtgatgatgatattatgagaaatgatcgtgagtatgactcaggagatacagatgaaattattgcgatgaaaaaaaatgttgctaaggtcaaaaacagtacagaattttcacaaatggaaaaatctacgaagaaaacttctttcaaaaa

SEQ ID NO: 161197 - DNA, 3136 bp, Homo sapiens
  Payload ID: 11481
  Gene Symbol: NOL8
  Gene Name: nucleolar protein 8
  ENST ID: ENST00000432670
  CDS Start-End: 228-3136
acgtgaccagaagttaggggctgcagcggcgctggctttaggtgaacgacgtggtgaggagtgggtttcgggcatgagaagtcacagggccgtttcctagtctctcttcacttctttgggtcttctcagagaaagaaggctgccgtgggtaggctgggggcggagactatcgggaagagaaaattacttttcccactgaaacacacccaagtatatgcccagccttcatgaaagtgaacagagaaacgaagcgcctttatgtgggtggccttagccaggacatttctgaggcagacctacaaaatcagttcagcagatttggagaagtttcggatgtggagatcatcacacggaaagatgaccaaggaaacccacagaaagtttttgcatatatcaacatcagtgtagcagaagcggacctgaaaaaatgtatgtctgttttaaataaaacaaaatggaaaggtggaacattacaaattcaactagcaaaagaaagctttctgcacagattggcccaagagagagaagcagcaaaagctaagaaagaagaatcaacaacaggtaacgccaacttgttagaaaagacaggaggagtggatttccatatgaaagctgtgccagggacagaagtgccagggcataagaattgggttgtgagcaaatttggaagagtcttacctgttcttcaccttaaaaatcaacataaacgtaaaatcatcaaatatgatccctcaaaatactgccacaacctgaagaagataggggaggatttctcaaacaccattcctatatccagcctgacttgggaattagaaggagggaatgaccctatgagtaagaaacggcgaggagagttctctgactttcatggccctcccaagaagataataaaagtgcagaaggatgagagttccactgggtctctggccatgagtacaaggcccaggagggtaatagagagaccacccttaacacagcaacaggctgcacaaaaaagaacttgtgattccattactccttctaaatcatctcctgtacctgtttctgatactcagaaacttaaaaatctaccttttaagacttctggcttggaaactgccaagaagagaaacagcatttctgatgatgatactgattctgaagatgaattgagaatgatgattgcgaaagaggaaaacttacagagaactacacaaccctcaataaatgaatctgaaagtgatccttttgaagttgtaagggatgatttcaaatcaggcgttcacaaactgcattctttaataggtttaggtatcaaaaatcgtgtctcttgccatgatagtgatgatgatattatgagaaatgatcgtgagtatgactcaggagatacagatgaaattattgcgatgaaaaaaaatgttgctaaggtcaaaaacagtacagaattttcacaaatggaaaaatctacgaagaaaacttctttcaaaaatagagaaaactgtgagctttctgatcactgtattaaactacaaaaaagaaaaagcaatgtagagtcagccctcagtcatggattaaagtctcttaatcgtaaatctccctctcactccagtagcagtgaagatgctgattctgcatcagaattagctgactctgaaggaggtgaggagtataatgccatgatgaaaaactgccttcgtgtgaatctcactttagctgatttggaacaattggctggcagtgatctgaaggttccaaatgaagatactaagagtgatggaccagaaaccaccacccaatgcaagtttgacagaggctccaagagccccaagactcccactggcctccgcagaggccgacagtgtattcgtcctgcggagattgtggcttccctgttagaaggagaggagaacacctgtggcaaacagaaaccaaaggaaaacaatttaaagccaaaatttcaggctttcaagggagtaggctgtctatatgaaaaggagtcaatgaaaaaatccttgaaagacagtgttgcctctaacaataaagatcagaattccatgaaacatgaggatcccagtatcatatccatggaagatgggtccccatatgttaatggctcattaggtgaagtgactccatgccaacatgcaaagaaggcgaatggcccaaactatattcagcctcaaaaaagacagaccacttttgaaagccaggatcgcaaggcagtgtcccctagcagttctgaaaagagaagtaagaatcctatttctaggccattagaaggtaagaagtccttaagtcttagtgcaaagactcacaacataggctttgacaaagacagctgccatagtaccacaaagacagaagcttcacaggaagagcggtctgattcaagcggcctcacatctctcaagaaatcaccaaaggtctcatccaaggacactcgggaaatcaaaactgatttctcactttctattagtaattcgtcagatgtgagtgctaaagataagcatgctgaagacaatgagaagcgtttggcagccttggaagcgaggcaaaaagcaaaagaagtgcagaagaagctggtgcataatgctctggcaaatttggatggtcatccagaggataagccaacgcacatcatcttcggttctgacagtgaatgtgaaacagaggagacatcgactcaggagcagagccatccaggagaggaatgggtgaaagagtctatgggtaaaacatcagggaagctgtttgatagcagtgatgatgacgaatctgattctgaagatgacagtaataggttcaaaattaaacctcagtttgagggcagagctggacagaagctcatggatttacagtcgcactttggcaccgatgacagattccgcatggactctcgatttctagaaactgacagtgaagaggaacaggaagaggtaaatgaaaagaaaactgctgaggaagaagagcttgctgaagaaaaaaagaaagccctgaatgttgtacaaagtgttttgcaaatcaacttaagcaattctacaaacagaggatcagtagctgctaagaaatttaaggacatcatacattatgatccaacgaagcaagaccatgccacttacgaaagaaaaagagatgataagccaaaagaaagtaaagc

SEQ ID NO: 161198 - DNA, 3400 bp, Homo sapiens
  Payload ID: 11481
  Gene Symbol: NOL8
  Gene Name: nucleolar protein 8
  ENST ID: ENST00000434228
  CDS Start-End: 87-347
aggggctgcagcggcgctggctttaggtgaacgacgtgaaaattacttttcccactgaaacacacccaagtatatgcccagccttcatgaaagtgaacagagaaacgaagcgcctttatgtgggtggccttagccaggacatttctgaggcagacctacaaaatcagttcagcagatttggagaagtttcggatgtggagatcatcacacggaaagatgaccaaggaaacccacagaaagtttttgcatatatcaacatcagtgtagcagaagcggacctgaaaaaatccatttttcacgttatccagagggacagcagtgatgaagagaattccagtatcgtataactcagcaggtttaggtccattccatttggcatcagcagacatggtagcactttactggtatgtctgttttaaataaaacaaaatggaaaggtggaacattacaaattcaactagcaaaagaaagctttctgcacagcagttgccagcctactgtgtacaggcactagagccccatgctgagcaggttgagcacacagtgctgctgcttggagtatctgcgtggatatgcctgagaagcatgggtctgatggttattctgggacataaaggagacagaccagaggcaaagaggccagtgaggactgctctgtgcagttgtccaggcctgaagaaggtggcggtgatttgaatcagaagaggtggcattctcttcattaggaggatatggataatcaagacctaacaaattgggctccgaaagataccttcgtcatggggaagagtgaatggagagaagataatataaaatgccaaacgtatataaattgaaaggggaaaattgagagaacttgcgatccatggtcttggtcttccataaaggggaactgggacatccactggagcagagcacagattggcccaagagagagaagcagcaaaagctaagaaagaagaatcaacaacaggtaacgccaacttgttagaaaagacaggaggagtggatttccatatgaaagctgtgccagggacagaagtgccagggcataagaattgggttgtgagcaaatttggaagagtcttacctgttcttcaccttaaaaatcaacataaacgtaaaatcatcaaatatgatccctcaaaatactgccacaacctgaagaagataggggaggatttctcaaacaccattcctatatccagcctgacttgggaattagaaggagggaatgaccctatgagtaagaaacggcgaggagagttctctgactttcatggccctcccaagaagataataaaagtgcagaaggatgagagttccactgggtctctggccatgagtacaaggcccaggagggtaatagagagaccacccttaacacagcaacaggctgcacaaaaaagaacttgtgattccattactccttctaaatcatctcctgtacctgtttctgatactcagaaacttaaaaatctaccttttaagacttctggcttggaaactgccaagaagagaaacagcatttctgatgatgatactgattctgaagatgaattgagaatgatgattgcgaaagaggaaaacttacagagaactacacaaccctcaataaatgaatctgaaagtgatccttttgaagttgtaagggatgatttcaaatcaggcgttcacaaactgcattctttaataggtttaggtatcaaaaatcgtgtctcttgccatgatagtgatgatgatattatgagaaatgatcgtgagtatgactcaggagatacagatgaaattattgcgatgaaaaaaaatgttgctaaggtcaaaaacagtacagaattttcacaaatggaaaaatctacgaagaaaacttctttcaaaaatagagaaaactgtgagctttctgatcactgtattaaactacaaaaaagaaaaagcaatgtagagtcagccctcagtcatggattaaagtctcttaatcgtaaatctccctctcactccagtagcagtgaagatgctgattctgcatcagaattagctgactctgaaggaggtgaggagtataatgccatgatgaaaaactgccttcgtgtgaatctcactttagctgatttggaacaattggctggcagtgatctgaaggttccaaatgaagatactaagagtgatggaccagaaaccaccacccaatgcaagtttgacagaggctccaagagccccaagactcccactggcctccgcagaggccgacagtgtattcgtcctgcggagattgtggcttccctgttagaaggagaggagaacacctgtggcaaacagaaaccaaaggaaaacaatttaaagccaaaatttcaggctttcaagggagtaggctgtctatatgaaaaggagtcaatgaaaaaatccttgaaagacagtgttgcctctaacaataaagatcagaattccatgaaacatgaggatcccagtatcatatccatggaagatgggtccccatatgttaatggctcattaggtgaagtgactccatgccaacatgcaaagaaggcgaatggcccaaactatattcagcctcaaaaaagacagaccacttttgaaagccaggatcgcaaggcagtgtcccctagcagttctgaaaagagaagtaagaatcctatttctaggccattagaaggtaagaagtccttaagtcttagtgcaaagactcacaacataggctttgacaaagacagctgccatagtaccacaaagacagaagcttcacaggaagagcggtctgattcaagcggcctcacatctctcaagaaatcaccaaaggtctcatccaaggacactcgggaaatcaaaactgatttctcactttctattagtaattcgtcagatgtgagtgctaaagataagcatgctgaagacaatgagaagcgtttggcagccttggaagcgaggcaaaaagcaaaagaagtgcagaagaagctggtgcataatgctctggcaaatttggatggtcatccagaggataagccaacgcacatcatcttcggttctgacagtgaatgtgaaacagaggagacatcgactcaggagcagagccatccaggagaggaatgggtgaaagagtctatgggtaaaacatcagggaagctgtttgatagcagtgatgatgacgaatctgattctgaagatgacagtaataggttcaaaattaaacctcagtttgagggcagagctggacagaagctcatggatttacagtcgcactttggcaccgatgacagattccgcatggactctcgatttctagaaactgacagtgaagaggaacaggaagaggtaaatgaaaagaaaactgctgaggaagaagagcttgctgaagaaaaaaagaaagccctgaatgttgtacaaa

SEQ ID NO: 161199 - DNA, 639 bp, Homo sapiens
  Payload ID: 11481
  Gene Symbol: NOL8
  Gene Name: nucleolar protein 8
  ENST ID: ENST00000543260
  CDS Start-End: 206-466
gcagcggcgctggctttaggtgaacgacgtggtgaggagtgggtttcgggcatgagaagtcacagggccgtttcctagtctctcttcacttctttgggtcttctcagagaaagaaggctgccgtgggtaggctgggggcggagactatcgggaagagaaaattacttttcccactgaaacacacccaagtatatgcccagccttcatgaaagtgaacagagaaacgaagcgcctttatgtgggtggccttagccaggacatttctgaggcagacctacaaaatcagttcagcagatttggagaagtttcggatgtggagatcatcacacggaaagatgaccaaggaaacccacagaaagtttttgcatatatcaacatcagtgtagcagaagcggacctgaaaaaatccatttttcacgttatccagagggacagcagtgatgaagagaattccagtatcgtataactcagcaggtttaggtccattccatttggcatcagcagacatggtagcactttactggtatgtctgttttaaataaaacaaaatggaaaggtggaacattacaaattcaactagcaaaagaaagctttctgcacagattggcccaagagagagaagcagcaaaagctaagaaa

SEQ ID NO: 161200 - DNA, 4598 bp, Homo sapiens
  Payload ID: 11481
  Gene Symbol: NOL8
  Gene Name: nucleolar protein 8
  ENST ID: ENST00000544867
  CDS Start-End: 82-3339
ctgcagcggcgctggctttaggtgaacgacgtgaaaattacttttcccactgaaacacacccaagtatatgcccagccttcatgaaagtgaacagagaaacgaagcgcctttatgtgggtggccttagccaggacatttctgaggcagacctacaaaatcagttcagcagatttggagaagtttcggatgtggagatcatcacacggaaagatgaccaaggaaacccacagaaagtttttgcatatatcaacatcagtgtagcagaagcggacctgaaaaaatgtatgtctgttttaaataaaacaaaatggaaaggtggaacattacaaattcaactagcaaaagaaagctttctgcacagattggcccaagagagagaagcagcaaaagctaagaaagaagaatcaacaacaggtaacgccaacttgttagaaaagacaggaggagtggatttccatatgaaagctgtgccagggacagaagtgccagggcataagaattgggttgtgagcaaatttggaagagtcttacctgttcttcaccttaaaaatcaacataaacgtaaaatcatcaaatatgatccctcaaaatactgccacaacctgaagaagataggggaggatttctcaaacaccattcctatatccagcctgacttgggaattagaaggagggaatgaccctatgagtaagaaacggcgaggagagttctctgactttcatggccctcccaagaagataataaaagtgcagaaggatgagagttccactgggtctctggccatgagtacaaggcccaggagggtaatagagagaccacccttaacacagcaacaggctgcacaaaaaagaacttgtgattccattactccttctaaatcatctcctgtacctgtttctgatactcagaaacttaaaaatctaccttttaagacttctggcttggaaactgccaagaagagaaacagcatttctgatgatgatactgattctgaagatgaattgagaatgatgattgcgaaagaggaaaacttacagagaactacacaaccctcaataaatgaatctgaaagtgatccttttgaagttgtaagggatgatttcaaatcaggcgttcacaaactgcattctttaataggtttaggtatcaaaaatcgtgtctcttgccatgatagtgatgatgatattatgagaaatgatcgtgagtatgactcaggagatacagatgaaattattgcgatgaaaaaaaatgttgctaaggtcaaaaacagtacagaattttcacaaatggaaaaatctacgaagaaaacttctttcaaaaatagagaaaactgtgagctttctgatcactgtattaaactacaaaaaagaaaaagcaatgtagagtcagccctcagtcatggattaaagtctcttaatcgtaaatctccctctcactccagtagcagtgaagatgctgattctgcatcagaattagctgactctgaaggaggtgaggagtataatgccatgatgaaaaactgccttcgtgtgaatctcactttagctgatttggaacaattggctggcagtgatctgaaggttccaaatgaagatactaagagtgatggaccagaaaccaccacccaatgcaagtttgacagaggctccaagagccccaagactcccactggcctccgcagaggccgacagtgtattcgtcctgcggagattgtggcttccctgttagaaggagaggagaacacctgtggcaaacagaaaccaaaggaaaacaatttaaagccaaaatttcaggctttcaagggagtaggctgtctatatgaaaaggagtcaatgaaaaaatccttgaaagacagtgttgcctctaacaataaagatcagaattccatgaaacatgaggatcccagtatcatatccatggaagatgggtccccatatgttaatggctcattaggtgaagtgactccatgccaacatgcaaagaaggcgaatggcccaaactatattcagcctcaaaaaagacagaccacttttgaaagccaggatcgcaaggcagtgtcccctagcagttctgaaaagagaagtaagaatcctatttctaggccattagaaggtaagaagtccttaagtcttagtgcaaagactcacaacataggctttgacaaagacagctgccatagtaccacaaagacagaagcttcacaggaagagcggtctgattcaagcggcctcacatctctcaagaaatcaccaaaggtctcatccaaggacactcgggaaatcaaaactgatttctcactttctattagtaattcgtcagatgtgagtgctaaagataagcatgctgaagacaatgagaagcgtttggcagccttggaagcgaggcaaaaagcaaaagaagtgcagaagaagctggtgcataatgctctggcaaatttggatggtcatccagaggataagccaacgcacatcatcttcggttctgacagtgaatgtgaaacagaggagacatcgactcaggagcagagccatccaggagaggaatgggtgaaagagtctatgggtaaaacatcagggaagctgtttgatagcagtgatgatgacgaatctgattctgaagatgacagtaataggttcaaaattaaacctcagtttgagggcagagctggacagaagctcatggatttacagtcgcactttggcaccgatgacagattccgcatggactctcgatttctagaaactgacagtgaagaggaacaggaagaggtaaatgaaaagaaaactgctgaggaagaagagcttgctgaagaaaaaaagaaagccctgaatgttgtacaaagtgttttgcaaatcaacttaagcaattctacaaacagaggatcagtagctgctaagaaatttaaggacatcatacattatgatccaacgaagcaagaccatgccacttacgaaagaaaaagagatgataagccaaaagaaagtaaagcaaaacgaaaaaagaaaagggaggaagctgagaaactacctgaggtgtctaaagaaatgtattataatattgctatggatctgaaagaaatattccaaactacaaaatataccagtgaaaaggaagagggcacaccctggaatgaggactgtggtaaagagaaacctgaggaaatccaggaccctgcagctctgaccagtgacgctgagcagcccagcgggttcacgttctctttttttgattcagacactaaagacataaaggaagacagagtctctgtcacccaggctggagtgcagtggtgcaatctcggttcactagcagataataccaactccgtggtactttaaaaggaagtataacaatctagtagttgttcaaaaagtattgcaaataagacttcattttcttgtctatataaactgttgagtagagttggcatgatgtaaatagtaacgatagtttttctaactttgagagcaaaacgtgagaaattgaccttgaaacgagtcctaaagacatcagcaacttgaaagatgttttttaagtacttgggaaattttgaagacttgtgaggtgattgtcctgatcttatagcagtagtttttccagcagttctagcaaaaagttttgggtattgaaaatgtaaagatatattccttttctcatttataaatagacaagagggaaacctgatttccctgtatcctattatattttaggcttctcatgcaagcacagatgccatggttattttaggtgtcatttttaaaaattatatagctcatttataaacctttattttttaaaccttttttatattactgctgtccttatcagatcattctagcaatgccaaaattatgatagtggcttctgaaaatatttgaaaaatctaaaaagatgatactacctatttttttgatactattttaaattaatgattaacatattggaactttagatatgtctacgtggtaaaagtaatcaaatgaatgtgttcagaaatacttggctgtggagttacaatcccatcatcttttgttgtcataacgatatagagacctacagagttgaaacagtgaaacctggaaagattgtctggcaggaagaccctcgtttacaagacagcagttcagaagaggaagatgttactgaagaaacagatcacagaaactccagtcctggagaagcatcattacttgagaaagagaccactagatttttctttttctctaagaatgatgaacgacttcaaggttctgacttattctggagaggagtaggaagtaatatgagcaggaactcttgggaggccagaacaaccaacctgcgtatggattgtcgaaagaaacataaagacgcaaaaaggaaaatgaaaccaaaataataaatgtcagctggttttgatactgaatgtgaacaaggctcacctaaggaaactgacccagaaaacagttttagctgacaaagaagaaatttcagagtgaaggaattttaaaaatctggctgacggaatatcattctggttgccatctttttctgtggaactcctctgcatttcttcctaagtaattacttcaaaaattaaattcaacttcttataaag

SEQ ID NO: 161201 - DNA, 2090 bp, Homo sapiens
  Payload ID: 11481
  Gene Symbol: NOL8
  Gene Name: nucleolar protein 8
  ENST ID: ENST00000545444
  CDS Start-End: 252-644
cgccgacctagtccaggaattggtacacacagcgatagtgttcaatagaaactaggggattttggaaattaaaagctcttgggaactgaattgtggtaacggaaccttaggaggctgggttggaaatcgagtaggaaggaagagaggatgctccgttgggacacgtgaccagaagttaggggctgcagcggcgctggctttagaaaattacttttcccactgaaacacacccaagtatatgcccagccttcatgaaagtgaacagagaaacgaagcgcctttatgtgggtggccttagccaggacatttctgaggcagacctacaaaatcagttcagcagatttggagaagtttcggatgtggagatcatcacacggaaagatgaccaaggaaacccacagaaagtttttgcatatatcaacatcagtgtagcagaagcggacctgaaaaaatgtatgtctgttttaaataaaacaaaatggaaaggtggaacattacaaattcaactagcaaaagaaagctttctgcacaggatggtcatccagaggataagccaacgcacatcatcttcggttctgacagtgaatgtgaaacagaggagacatcgactcaggagcagagccatccaggagaggaatgggtgaaagagtctatgggtaaaacatcagggaagctgtttgatagcagtgatgatgacgaatctgattctgaagatgacagtaataggttcaaaattaaacctcagtttgagggcagagctggacagaagctcatggatttacagtcgcactttggcaccgatgacagattccgcatggactctcgatttctagaaactgacagtgaagaggaacaggaagaggtaaatgaaaagaaaactgctgaggaagaagagcttgctgaagaaaaaaagaaagccctgaatgttgtacaaagtgttttgcaaatcaacttaagcaattctacaaacagaggatcagtagctgctaagaaatttaaggacatcatacattatgatccaacgaagcaagaccatgccacttacgaaagaaaaagagatgataagccaaaagaaagtaaagcaaaacgaaaaaagaaaagggaggaagctgagaaactacctgaggtgtctaaagaaatgtattataatattgctatggatctgaaagaaatattccaaactacaaaatataccagtgaaaaggaagagggcacaccctggaatgaggactgtggtaaagagaaacctgaggaaatccaggaccctgcagctctgaccagtgacgctgagcagcccagcgggttcacgttctctttttttgattcagacactaaagacataaaggaagagacctacagagttgaaacagtgaaacctggaaagattgtctggcaggaagaccctcgtttacaagacagcagttcagaagaggaagatgttactgaagaaacagatcacagaaactccagtcctggagaagcatcattacttgagaaagagaccactagatttttctttttctctaagaatgatgaacgacttcaaggttctgacttattctggagaggagtaggaagtaatatgagcaggaactcttgggaggccagaacaaccaacctgcgtatggattgtcgaaagaaacataaagacgcaaaaaggaaaatgaaaccaaaataataaatgtcagctggttttgatactgaatgtgaacaaggctcacctaaggaaactgacccagaaaacagttttagctgacaaagaagaaatttcagagtgaaggaattttaaaaatctggctgacggaatatcattctggttgccatctttttctgtggaactcctctgcatttcttcctaagtaattacttcaaaaattaaattcaacttcttataaaggaagaacaagatagtccttgaaaatactttttgtatataatctctttgccctctatcctgagtaactaatggacatcttctcatgcaaggtttatatgaagcctttttaaataaatgagtcaaagcacttgtattttccagcctaggctttgtgtgaattataggctatttgaaattttatttctgattatgt

SEQ ID NO: 161202 - DNA, 557 bp, Homo sapiens
  Payload ID: 11481
  Gene Symbol: NOL8
  Gene Name: nucleolar protein 8
  ENST ID: ENST00000542573
  CDS Start-End: 92-352
aagttaggggctgcagcggcgctggctttaggtgaacgacgtgaaaattacttttcccactgaaacacacccaagtatatgcccagccttcatgaaagtgaacagagaaacgaagcgcctttatgtgggtggccttagccaggacatttctgaggcagacctacaaaatcagttcagcagatttggagaagtttcggatgtggagatcatcacacggaaagatgaccaaggaaacccacagaaagtttttgcatatatcaacatcagtgtagcagaagcggacctgaaaaaatccatttttcacgttatccagagggacagcagtgatgaagagaattccagtatcgtataactcagcaggtttaggtccattccatttggcatcagcagacatggtagcactttactggtatgtctgttttaaataaaacaaaatggaaaggtggaacattacaaattcaactagcaaaagaaagctttctgcacagattggcccaagagagagaagcagcaaaagctaagaaagaagaatcaacaacaggtaacgccaacttgtt

SEQ ID NO: 161203 - DNA, 3393 bp, Homo sapiens
  Payload ID: 11481
  Gene Symbol: NOL8
  Gene Name: nucleolar protein 8
  Uniprot ID: Q76FK4
  ENST ID: ENST00000542053
  CDS Start-End: 94-3393
gcggcgctggctttaggtgaacgacgtggaaacccacagaaagtttttgcatatatcaacatcagtgtagcagaagcggacctgaaaaaatgtatgtctgttttaaataaaacaaaatggaaaggtggaacattacaaattcaactagcaaaagaaagctttctgcacagattggcccaagagagagaagcagcaaaagctaagaaagaagaatcaacaacaggtaacgccaacttgttagaaaagacaggaggagtggatttccatatgaaagctgtgccagggacagaagtgccagggcataagaattgggttgtgagcaaatttggaagagtcttacctgttcttcaccttaaaaatcaacataaacgtaaaatcatcaaatatgatccctcaaaatactgccacaacctgaagaagataggggaggatttctcaaacaccattcctatatccagcctgacttgggaattagaaggagggaatgaccctatgagtaagaaacggcgaggagagttctctgactttcatggccctcccaagaagataataaaagtgcagaaggatgagagttccactgggtctctggccatgagtacaaggcccaggagggtaatagagagaccacccttaacacagcaacaggctgcacaaaaaagaacttgtgattccattactccttctaaatcatctcctgtacctgtttctgatactcagaaacttaaaaatctaccttttaagacttctggcttggaaactgccaagaagagaaacagcatttctgatgatgatactgattctgaagatgaattgagaatgatgattgcgaaagaggaaaacttacagagaactacacaaccctcaataaatgaatctgaaagtgatccttttgaagttgtaagggatgatttcaaatcaggcgttcacaaactgcattctttaataggtttaggtatcaaaaatcgtgtctcttgccatgatagtgatgatgatattatgagaaatgatcgtgagtatgactcaggagatacagatgaaattattgcgatgaaaaaaaatgttgctaaggtcaaaaacagtacagaattttcacaaatggaaaaatctacgaagaaaacttctttcaaaaatagagaaaactgtgagctttctgatcactgtattaaactacaaaaaagaaaaagcaatgtagagtcagccctcagtcatggattaaagtctcttaatcgtaaatctccctctcactccagtagcagtgaagatgctgattctgcatcagaattagctgactctgaaggaggtgaggagtataatgccatgatgaaaaactgccttcgtgtgaatctcactttagctgatttggaacaattggctggcagtgatctgaaggttccaaatgaagatactaagagtgatggaccagaaaccaccacccaatgcaagtttgacagaggctccaagagccccaagactcccactggcctccgcagaggccgacagtgtattcgtcctgcggagattgtggcttccctgttagaaggagaggagaacacctgtggcaaacagaaaccaaaggaaaacaatttaaagccaaaatttcaggctttcaagggagtaggctgtctatatgaaaaggagtcaatgaaaaaatccttgaaagacagtgttgcctctaacaataaagatcagaattccatgaaacatgaggatcccagtatcatatccatggaagatgggtccccatatgttaatggctcattaggtgaagtgactccatgccaacatgcaaagaaggcgaatggcccaaactatattcagcctcaaaaaagacagaccacttttgaaagccaggatcgcaaggcagtgtcccctagcagttctgaaaagagaagtaagaatcctatttctaggccattagaaggtaagaagtccttaagtcttagtgcaaagactcacaacataggctttgacaaagacagctgccatagtaccacaaagacagaagcttcacaggaagagcggtctgattcaagcggcctcacatctctcaagaaatcaccaaaggtctcatccaaggacactcgggaaatcaaaactgatttctcactttctattagtaattcgtcagatgtgagtgctaaagataagcatgctgaagacaatgagaagcgtttggcagccttggaagcgaggcaaaaagcaaaagaagtgcagaagaagctggtgcataatgctctggcaaatttggatggtcatccagaggataagccaacgcacatcatcttcggttctgacagtgaatgtgaaacagaggagacatcgactcaggagcagagccatccaggagaggaatgggtgaaagagtctatgggtaaaacatcagggaagctgtttgatagcagtgatgatgacgaatctgattctgaagatgacagtaataggttcaaaattaaacctcagtttgagggcagagctggacagaagctcatggatttacagtcgcactttggcaccgatgacagattccgcatggactctcgatttctagaaactgacagtgaagaggaacaggaagaggtaaatgaaaagaaaactgctgaggaagaagagcttgctgaagaaaaaaagaaagccctgaatgttgtacaaagtgttttgcaaatcaacttaagcaattctacaaacagaggatcagtagctgctaagaaatttaaggacatcatacattatgatccaacgaagcaagaccatgccacttacgaaagaaaaagagatgataagccaaaagaaagtaaagcaaaacgaaaaaagaaaagggaggaagctgagaaactacctgaggtgtctaaagaaatgtattataatattgctatggatctgaaagaaatattccaaactacaaaatataccagtgaaaaggaagagggcacaccctggaatgaggactgtggtaaagagaaacctgaggaaatccaggaccctgcagctctgaccagtgacgctgagcagcccagcgggttcacgttctctttttttgattcagacactaaagacataaaggaagagacctacagagttgaaacagtgaaacctggaaagattgtctggcaggaagaccctcgtttacaagacagcagttcagaagaggaagatgttactgaagaaacagatcacagaaactccagtcctggagaagcatcattacttgagaaagagaccactagatttttctttttctctaagaatgatgaacgacttcaaggttctgacttattctggagaggagtaggaagtaatatgagcaggaactcttgggaggccagaacaaccaacctgcgtatggattgtcgaaagaaacataaagacgcaaaaaggaaaatgaaaccaaaataa

SEQ ID NO: 161204 - DNA, 4343 bp, Homo sapiens
  Payload ID: 11481
  Gene Symbol: NOL8
  Gene Name: nucleolar protein 8
  Uniprot ID: Q76FK4
  ENST ID: ENST00000545558
  CDS Start-End: 494-3997
agaagttaggggctgcagcggcgctggctttaggtgaacgacgtggtgaggagtgggtttcgggcatgagaagtcacagggccgtttcctagtctctcttcacttctttgggtcttctcagagaaagaaggctgccgtgggtaggctgggggcggagactatcgggaagaggtaggccgaagttctgcccagaatacacgccatgtggtggacgctggttgggagtctcttctggaaagagtctgtcagctcttggggaagggaagggcgagagctgagcgcctgccgggtgctaaacgaaatgagagatactatgatgggccctagtacctctggaaaagttttcctgagtcccctgtgatacagcaaccttcatagtatagtgttaagaattccaagttctgaaggtagacctgcattataatcctggattcactaattttcgaaaattacttttcccactgaaacacacccaagtatatgcccagccttcatgaaagtgaacagagaaacgaagcgcctttatgtgggtggccttagccaggacatttctgaggcagacctacaaaatcagttcagcagatttggagaagtttcggatgtggagatcatcacacggaaagatgaccaaggaaacccacagaaagtttttgcatatatcaacatcagtgtagcagaagcggacctgaaaaaatgtatgtctgttttaaataaaacaaaatggaaaggtggaacattacaaattcaactagcaaaagaaagctttctgcacagattggcccaagagagagaagcagcaaaagctaagaaagaagaatcaacaacaggtaacgccaacttgttagaaaagacaggaggagtggatttccatatgaaagctgtgccagggacagaagtgccagggcataagaattgggttgtgagcaaatttggaagagtcttacctgttcttcaccttaaaaatcaacataaacgtaaaatcatcaaatatgatccctcaaaatactgccacaacctgaagaagataggggaggatttctcaaacaccattcctatatccagcctgacttgggaattagaaggagggaatgaccctatgagtaagaaacggcgaggagagttctctgactttcatggccctcccaagaagataataaaagtgcagaaggatgagagttccactgggtctctggccatgagtacaaggcccaggagggtaatagagagaccacccttaacacagcaacaggctgcacaaaaaagaacttgtgattccattactccttctaaatcatctcctgtacctgtttctgatactcagaaacttaaaaatctaccttttaagacttctggcttggaaactgccaagaagagaaacagcatttctgatgatgatactgattctgaagatgaattgagaatgatgattgcgaaagaggaaaacttacagagaactacacaaccctcaataaatgaatctgaaagtgatccttttgaagttgtaagggatgatttcaaatcaggcgttcacaaactgcattctttaataggtttaggtatcaaaaatcgtgtctcttgccatgatagtgatgatgatattatgagaaatgatcgtgagtatgactcaggagatacagatgaaattattgcgatgaaaaaaaatgttgctaaggtcaaaaacagtacagaattttcacaaatggaaaaatctacgaagaaaacttctttcaaaaatagagaaaactgtgagctttctgatcactgtattaaactacaaaaaagaaaaagcaatgtagagtcagccctcagtcatggattaaagtctcttaatcgtaaatctccctctcactccagtagcagtgaagatgctgattctgcatcagaattagctgactctgaaggaggtgaggagtataatgccatgatgaaaaactgccttcgtgtgaatctcactttagctgatttggaacaattggctggcagtgatctgaaggttccaaatgaagatactaagagtgatggaccagaaaccaccacccaatgcaagtttgacagaggctccaagagccccaagactcccactggcctccgcagaggccgacagtgtattcgtcctgcggagattgtggcttccctgttagaaggagaggagaacacctgtggcaaacagaaaccaaaggaaaacaatttaaagccaaaatttcaggctttcaagggagtaggctgtctatatgaaaaggagtcaatgaaaaaatccttgaaagacagtgttgcctctaacaataaagatcagaattccatgaaacatgaggatcccagtatcatatccatggaagatgggtccccatatgttaatggctcattaggtgaagtgactccatgccaacatgcaaagaaggcgaatggcccaaactatattcagcctcaaaaaagacagaccacttttgaaagccaggatcgcaaggcagtgtcccctagcagttctgaaaagagaagtaagaatcctatttctaggccattagaaggtaagaagtccttaagtcttagtgcaaagactcacaacataggctttgacaaagacagctgccatagtaccacaaagacagaagcttcacaggaagagcggtctgattcaagcggcctcacatctctcaagaaatcaccaaaggtctcatccaaggacactcgggaaatcaaaactgatttctcactttctattagtaattcgtcagatgtgagtgctaaagataagcatgctgaagacaatgagaagcgtttggcagccttggaagcgaggcaaaaagcaaaagaagtgcagaagaagctggtgcataatgctctggcaaatttggatggtcatccagaggataagccaacgcacatcatcttcggttctgacagtgaatgtgaaacagaggagacatcgactcaggagcagagccatccaggagaggaatgggtgaaagagtctatgggtaaaacatcagggaagctgtttgatagcagtgatgatgacgaatctgattctgaagatgacagtaataggttcaaaattaaacctcagtttgagggcagagctggacagaagctcatggatttacagtcgcactttggcaccgatgacagattccgcatggactctcgatttctagaaactgacagtgaagaggaacaggaagaggtaaatgaaaagaaaactgctgaggaagaagagcttgctgaagaaaaaaagaaagccctgaatgttgtacaaagtgttttgcaaatcaacttaagcaattctacaaacagaggatcagtagctgctaagaaatttaaggacatcatacattatgatccaacgaagcaagaccatgccacttacgaaagaaaaagagatgataagccaaaagaaagtaaagcaaaacgaaaaaagaaaagggaggaagctgagaaactacctgaggtgtctaaagaaatgtattataatattgctatggatctgaaagaaatattccaaactacaaaatataccagtgaaaaggaagagggcacaccctggaatgaggactgtggtaaagagaaacctgaggaaatccaggaccctgcagctctgaccagtgacgctgagcagcccagcgggttcacgttctctttttttgattcagacactaaagacataaaggaagagacctacagagttgaaacagtgaaacctggaaagattgtctggcaggaagaccctcgtttacaagacagcagttcagaagaggaagatgttactgaagaaacagatcacagaaactccagtcctggagaagcatcattacttgagaaagagaccactagatttttctttttctctaagaatgatgaacgacttcaaggttctgacttattctggagaggagtaggaagtaatatgagcaggaactcttgggaggccagaacaaccaacctgcgtatggattgtcgaaagaaacataaagacgcaaaaaggaaaatgaaaccaaaataataaatgtcagctggttttgatactgaatgtgaacaaggctcacctaaggaaactgacccagaaaacagttttagctgacaaagaagaaatttcagagtgaaggaattttaaaaatctggctgacggaatatcattctggttgccatctttttctgtggaactcctctgcatttcttcctaagtaattacttcaaaaattaaattcaacttcttataaaggaagaacaagatagtccttgaaaatactttttgtatataatctctttgccctctatcctgagtaactaatggacatcttctcatgcaaggtttatatgaagcctttttaaataaatgagtcaaagca

SEQ ID NO: 161205 - DNA, 3390 bp, Homo sapiens
  Payload ID: 11481
  Gene Symbol: NOL8
  Gene Name: nucleolar protein 8
  Uniprot ID: Q76FK4
  ENST ID: ENST00000535387
  CDS Start-End: 1-3390
atgaaagtgaacagagaaacgaagcgcctttatgtgggtggccttagccaggacatttctgaggcagacctacaaaatcagttcagcagatttggagaagtttcggatgtggagatcatcacacggaaagatgaccaaggaaacccacagaaagtttttgcatatatcaacatcagtgtagcagaagcggacctgaaaaaatgtatgtctgttttaaataaaacaaaatggaaaggtggaacattacaaattcaactagcaaaagaaagctttctgcacagattggcccaagagagagaagcagcaaaagctaagaaagaagaatcaacaacaggtaacgccaacttgttagaaaagacaggaggagtggatttccatatgaaagctgtgccagggacagaagtgccagggcataagaattgggttgtgagcaaatttggaagagtcttacctgttcttcaccttaaaaatcaacataaacgtaaaatcatcaaatatgatccctcaaaatactgccacaacctgaagaagataggggaggatttctcaaacaccattcctatatccagcctgacttgggaattagaaggagggaatgaccctatgagtaagaaacggcgaggagagttctctgactttcatggccctcccaagaagataataaaagtgcagaaggatgagagttccactgggtctctggccatgagtacaaggcccaggagggtaatagagagaccacccttaacacagcaacaggctgcacaaaaaagaacttgtgattccattactccttctaaatcatctcctgtacctgtttctgatactcagaaacttaaaaatctaccttttaagacttctggcttggaaactgccaagaagagaaacagcatttctgatgatgatactgattctgaagatgaattgagaatgatgattgcgaaagaggaaaacttacagagaactacacaaccctcaataaatgaatctgaaagtgatccttttgaagttgtaagggatgatttcaaatcaggcgttcacaaactgcattctttaataggtttaggtatcaaaaatcgtgtctcttgccatgatagtgatgatgatattatgagaaatgatcgtgagtatgactcaggagatacagatgaaattattgcgatgaaaaaaaatgttgctaaggtcaaaaacagtacagaattttcacaaatggaaaaatctacgaagaaaacttctttcaaaaatagagaaaactgtgagctttctgatcactgtattaaactacaaaaaagaaaaagcaatgtagagtcagccctcagtcatggattaaagtctcttaatcgtaaatctccctctcactccagtagcagtgaagatgctgattctgcatcagaattagctgactctgaaggaggtgaggagtataatgccatgatgaaaaactgccttcgtgtgaatctcactttagctgatttggaacaattggctggcagtgatctgaaggttccaaatgaagatactaagagtgatggaccagaaaccaccacccaatgcaagtttgacagaggctccaagagccccaagactcccactggcctccgcagaggccgacagtgtattcgtcctgcggagattgtggcttccctgttagaaggagaggagaacacctgtggcaaacagaaaccaaaggaaaacaatttaaagccaaaatttcaggctttcaagggagtaggctgtctatatgaaaaggagtcaatgaaaaaatccttgaaagacagtgttgcctctaacaataaagatcagaattccatgaaacatgaggatcccagtatcatatccatggaagatgggtccccatatgttaatggctcattaggtgaagtgactccatgccaacatgcaaagaaggcgaatggcccaaactatattcagcctcaaaaaagacagaccacttttgaaagccaggatcgcaaggcagtgtcccctagcagttctgaaaagagaagtaagaatcctatttctaggccattagaaggtaagaagtccttaagtcttagtgcaaagactcacaacataggctttgacaaagacagctgccatagtaccacaaagacagaagcttcacaggaagagcggtctgattcaagcggcctcacatctctcaagaaatcaccaaaggtctcatccaaggacactcgggaaatcaaaactgatttctcactttctattagtaattcgtcagatgtgagtgctaaagataagcatgctgaagacaatgagaagcgtttggcagccttggaagcgaggcaaaaagcaaaagaagtgcagaagaagctggtgcataatgctctggcaaatttggagtctatgggtaaaacatcagggaagctgtttgatagcagtgatgatgacgaatctgattctgaagatgacagtaataggttcaaaattaaacctcagtttgagggcagagctggacagaagctcatggatttacagtcgcactttggcaccgatgacagattccgcatggactctcgatttctagaaactgacagtgaagaggaacaggaagaggtaaatgaaaagaaaactgctgaggaagaagagcttgctgaagaaaaaaagaaagccctgaatgttgtacaaagtgttttgcaaatcaacttaagcaattctacaaacagaggatcagtagctgctaagaaatttaaggacatcatacattatgatccaacgaagcaagaccatgccacttacgaaagaaaaagagatgataagccaaaagaaagtaaagcaaaacgaaaaaagaaaagggaggaagctgagaaactacctgaggtgtctaaagaaatgtattataatattgctatggatctgaaagaaatattccaaactacaaaatataccagtgaaaaggaagagggcacaccctggaatgaggactgtggtaaagagaaacctgaggaaatccaggaccctgcagctctgaccagtgacgctgagcagcccagcgggttcacgttctctttttttgattcagacactaaagacataaaggaagagacctacagagttgaaacagtgaaacctggaaagattgtctggcaggaagaccctcgtttacaagacagcagttcagaagaggaagatgttactgaagaaacagatcacagaaactccagtcctggagaagcatcattacttgagaaagagaccactagatttttctttttctctaagaatgatgaacgacttcaaggttctgacttattctggagaggagtaggaagtaatatgagcaggaactcttgggaggccagaacaaccaacctgcgtatggattgtcgaaagaaacataaagacgcaaaaaggaaaatgaaaccaaaataa

SEQ ID NO: 161206 - DNA, 551 bp, Homo sapiens
  Payload ID: 11481
  Gene Symbol: NOL8
  Gene Name: nucleolar protein 8
  ENST ID: ENST00000536624
  CDS Start-End: 117-551
gtggaggggagcgcctctttatttttttcacctacttcctctcttacgccgacctagtccaggaattgaaaattacttttcccactgaaacacacccaagtatatgcccagccttcatgaaagtgaacagagaaacgaagcgcctttatgtgggtggccttagccaggacatttctgaggcagacctacaaaatcagttcagcagatttggagaagtttcggatgtggagatcatcacacggaaagatgaccaaggaaacccacagaaagtttttgcatatatcaacatcagtgtagcagaagcggacctgaaaaaatgtatgtctgttttaaataaaacaaaatggaaaggtggaacattacaaattcaactagcaaaagaaagctttctgcacagattggcccaagagagagaagcagcaaaagctaagaaagaagaatcaacaacaggtaacgccaacttgttagaaaagacaggaggagtggatttccatatgaaagctgtgccagggacagaagtgccagggcataagaattgggttgtgagcaaa

SEQ ID NO: 161207 - DNA, 421 bp, Homo sapiens
  Payload ID: 11481
  Gene Symbol: NOL8
  Gene Name: nucleolar protein 8
  ENST ID: ENST00000542613
  CDS Start-End: 266-421
ggcgctggctttaggtgaacgacgtgttcagcagatttggagaagtttcggatgtggagatcatcacacggaaagatgaccaaggaaacccacagaaagtttttgcatatatcaacatcagtgtagcagaagcggacctgaaaaaatccatttttcacgttatccagagggacagcagtgatgaagagaattccagtatcgtataactcagcaggtttaggtccattccatttggcatcagcagacatggtagcactttactggtatgtctgttttaaataaaacaaaatggaaaggtggaacattacaaattcaactagcaaaagaaagctttctgcacagattggcccaagagagagaagcagcaaaagctaagaaagaagaatcaacaacaggtaacgccaacttgttagaaaagaca

SEQ ID NO: 161208 - DNA, 575 bp, Homo sapiens
  Payload ID: 11481
  Gene Symbol: NOL8
  Gene Name: nucleolar protein 8
  ENST ID: ENST00000535807
  CDS Start-End: 249-575
tctttgggtcttctaggaggaagaaggctggggtgggtaggttgggggtggagacaattaggaagaggaaacccacagaaagtttttgcatatatcaacatcagtgtagcagaagcggacctgaaaaaatccatttttcacgttatccagagggacagcagtgatgaagagaattccagtatcgtataactcagcaggtttaggtccattccatttggcatcagcagacatggtagcactttactggtatgtctgttttaaataaaacaaaatggaaaggtggaacattacaaattcaactagcaaaagaaagctttctgcacagattggcccaagagagagaagcagcaaaagctaagaaagaagaatcaacaacaggtaacgccaacttgttagaaaagacaggaggagtggatttccatatgaaagctgtgccagggacagaagtgccagggcataagaattgggttgtgagcaaatttggaagagtcttacctgttcttcaccttaaaaatcaacataaacgtaaaatcatcaaatatgatccctcaaaatactgccacaacctgaagaag

SEQ ID NO: 161209 - DNA, 754 bp, Homo sapiens
  Payload ID: 11481
  Gene Symbol: NOL8
  Gene Name: nucleolar protein 8
  ENST ID: ENST00000544321
  CDS Start-End: 105-365
gacacgtgaccagaagttaggggctgcagcggcgctggctttaggtgaacgacgtgaaaattacttttcccactgaaacacacccaagtatatgcccagccttcatgaaagtgaacagagaaacgaagcgcctttatgtgggtggccttagccaggacatttctgaggcagacctacaaaatcagttcagcagatttggagaagtttcggatgtggagatcatcacacggaaagatgaccaaggaaacccacagaaagtttttgcatatatcaacatcagtgtagcagaagcggacctgaaaaaatccatttttcacgttatccagagggacagcagtgatgaagagaattccagtatcgtataactcagcaggtttaggtccattccatttggcatcagcagacatggtagcactttactggtatgtctgttttaaataaaacaaaatggaaaggtggaacattacaaattcaactagcaaaagaaagctttctgcacagcagcagttgccagcctactgtgtacaggcactagagccccatgctgagcaggttgagcacacagtgctgctgcttggagtatctgcgtggatatgcctgagaagcatgggtctgatggttattctgggacataaaggagacagaccagaggcaaagaggccagtgaggactgctctgtgcagttgtccaggcctgaagaaggtggcggtgatttgaatcagaagaggtggcattctcttcattaggaggatat

SEQ ID NO: 161210 - DNA, 4053 bp, Homo sapiens
  Payload ID: 11481
  Gene Symbol: NOL8
  Gene Name: nucleolar protein 8
  ENST ID: ENST00000536593
  CDS Start-End: 82-342
agaagttaggggctgcagcggcgctggctttagaaaattacttttcccactgaaacacacccaagtatatgcccagccttcatgaaagtgaacagagaaacgaagcgcctttatgtgggtggccttagccaggacatttctgaggcagacctacaaaatcagttcagcagatttggagaagtttcggatgtggagatcatcacacggaaagatgaccaaggaaacccacagaaagtttttgcatatatcaacatcagtgtagcagaagcggacctgaaaaaatccatttttcacgttatccagagggacagcagtgatgaagagaattccagtatcgtataactcagcaggtttaggtccattccatttggcatcagcagacatggtagcactttactggtatgtctgttttaaataaaacaaaatggaaaggtggaacattacaaattcaactagcaaaagaaagctttctgcacagattggcccaagagagagaagcagcaaaagctaagaaagaagaatcaacaacaggtaacgccaacttgttagaaaagacaggaggagtggatttccatatgaaagctgtgccagggacagaagtgccagggcataagaattgggttgtgagcaaatttggaagagtcttacctgttcttcaccttaaaaatcaacataaacgtaaaatcatcaaatatgatccctcaaaatactgccacaacctgaagaagataggggaggatttctcaaacaccattcctatatccagcctgacttgggaattagaaggagggaatgaccctatgagtaagaaacggcgaggagagttctctgactttcatggccctcccaagaagataataaaagtgcagaaggatgagagttccactgggtctctggccatgagtacaaggcccaggagggtaatagagagaccacccttaacacagcaacaggctgcacaaaaaagaacttgtgattccattactccttctaaatcatctcctgtacctgtttctgatactcagaaacttaaaaatctaccttttaagacttctggcttggaaactgccaagaagagaaacagcatttctgatgatgatactgattctgaagatgaattgagaatgatgattgcgaaagaggaaaacttacagagaactacacaaccctcaataaatgaatctgaaagtgatccttttgaagttgtaagggatgatttcaaatcaggcgttcacaaactgcattctttaataggtttaggtatcaaaaatcgtgtctcttgccatgatagtgatgatgatattatgagaaatgatcgtgagtatgactcaggagatacagatgaaattattgcgatgaaaaaaaatgttgctaaggtcaaaaacagtacagaattttcacaaatggaaaaatctacgaagaaaacttctttcaaaaatagagaaaactgtgagctttctgatcactgtattaaactacaaaaaagaaaaagcaatgtagagtcagccctcagtcatggattaaagtctcttaatcgtaaatctccctctcactccagtagcagtgaagatgctgattctgcatcagaattagctgactctgaaggaggtgaggagtataatgccatgatgaaaaactgccttcgtgtgaatctcactttagctgatttggaacaattggctggcagtgatctgaaggttccaaatgaagatactaagagtgatggaccagaaaccaccacccaatgcaagtttgacagaggctccaagagccccaagactcccactggcctccgcagaggccgacagtgtattcgtcctgcggagattgtggcttccctgttagaaggagaggagaacacctgtggcaaacagaaaccaaaggaaaacaatttaaagccaaaatttcaggctttcaagggagtaggctgtctatatgaaaaggagtcaatgaaaaaatccttgaaagacagtgttgcctctaacaataaagatcagaattccatgaaacatgaggatcccagtatcatatccatggaagatgggtccccatatgttaatggctcattaggtgaagtgactccatgccaacatgcaaagaaggcgaatggcccaaactatattcagcctcaaaaaagacagaccacttttgaaagccaggatcgcaaggcagtgtcccctagcagttctgaaaagagaagtaagaatcctatttctaggccattagaaggtaagaagtccttaagtcttagtgcaaagactcacaacataggctttgacaaagacagctgccatagtaccacaaagacagaagcttcacaggaagagcggtctgattcaagcggcctcacatctctcaagaaatcaccaaaggtctcatccaaggacactcgggaaatcaaaactgatttctcactttctattagtaattcgtcagatgtgagtgctaaagataagcatgctgaagacaatgagaagcgtttggcagccttggaagcgaggcaaaaagcaaaagaagtgcagaagaagctggtgcataatgctctggcaaatttggatggtcatccagaggataagccaacgcacatcatcttcggttctgacagtgaatgtgaaacagaggagacatcgactcaggagcagagccatccaggagaggaatgggtgaaagagtctatgggtaaaacatcagggaagctgtttgatagcagtgatgatgacgaatctgattctgaagatgacagtaataggttcaaaattaaacctcagtttgagggcagagctggacagaagctcatggatttacagtcgcactttggcaccgatgacagattccgcatggactctcgatttctagaaactgacagtgaagaggaacaggaagaggtaaatgaaaagaaaactgctgaggaagaagagcttgctgaagaaaaaaagaaagccctgaatgttgtacaaagtgttttgcaaatcaacttaagcaattctacaaacagaggatcagtagctgctaagaaatttaaggacatcatacattatgatccaacgaagcaagaccatgccacttacgaaagaaaaagagatgataagccaaaagaaagtaaagcaaaacgaaaaaagaaaagggaggaagctgagaaactacctgaggtgtctaaagaaatgtattataatattgctatggatctgaaagaaatattccaaactacaaaatataccagtgaaaaggaagagggcacaccctggaatgaggactgtggtaaagagaaacctgaggaaatccaggaccctgcagctctgaccagtgacgctgagcagcccagcgggttcacgttctctttttttgattcagacactaaagacataaaggaagagacctacagagttgaaacagtgaaacctggaaagattgtctggcaggaagaccctcgtttacaagacagcagttcagaagaggaagatgttactgaagaaacagatcacagaaactccagtcctggagaagcatcattacttgagaaagagaccactagatttttctttttctctaagaatgatgaacgacttcaaggttctgacttattctggagaggagtaggaagtaatatgagcaggaactcttgggaggccagaacaaccaacctgcgtatggattgtcgaaagaaacataaagacgcaaaaaggaaaatgaaaccaaaataataaatgtcagctggttttgatactgaatgtgaacaaggctcacctaaggaaactgacccagaaaacagttttagctgacaaagaagaaatttcagagtgaaggaattttaaaaatctggctgacggaatatcattctggttgccatctttttctgtggaactcctctgcatttcttcctaagtaattacttcaaaaattaaattcaacttcttataaaggaagaacaagatagtccttgaaaatactttttgtatataatctctttgccctctatcctgagtaactaatggacatcttctcatgcaaggtttatatgaagcctttttaaataaatgagtcaaagcacttgta

SEQ ID NO: 161211 - DNA, 6649 bp, Homo sapiens
  Payload ID: 11482
  Gene Symbol: NOL9
  Gene Name: nucleolar protein 9
  Uniprot ID: Q5SY16
  ENST ID: ENST00000377705
  CDS Start-End: 34-2142
agattctcgcgcggtaggccctgaggacccagcatggcggactcgggactgctgctaaagcggggttcctgccgttccacttggctgcgggtccgcaaggcccggccccagctcatcctcagccgccggccccgccgccggctcgggagcctgcgctggtgcggtcggcggcgcctacggtggcggttactgcaagcccaggcgtccggcgtggactggagggagggagcccgccaggtgtcgcgcgcggcggcggcccggagacccaacaccgcgacccccagcccgatccctagcccgaccccggcctccgaacccgagtccgaacccgaactcgaatccgcctcgagttgccaccggcctctcctcatcccaccggtgcggcccgtgggccccggccgcgcgttgctgctgctgccggtcgagcagggttttacttttagtgggatctgtcgtgtgacttgcctctatggccaggtgcaggtatttggttttaccatcagccaaggccagcctgcccaagacatcttctctgtgtatacccactcttgcttgagtatccatgcacttcactactcacagcctgagaaaagcaagaaggaactgaaaagggaagcccggaatttgctcaaatctcatcttaaccttgatgacaggcgttggtcgatgcagaatttttctcctcagtgttccattgtgttgctagaacatctgaaaactgccactgtaaacttcataaccagctatccgggttcatcctacatttttgtgcaagagagtccaactccccagattaaacctgaatatttagccttgaggtctgttggcatcagaagagagaaaaaaaggaaaggccttcagttaactgagagtaccctttcagccctggaagagttagtcaatgtttcctgtgaagaagtagatggctgccctgtcattctagtttgtggatcccaggatgttggaaagtcaacatttaatagatacctgattaaccatttgttaaatagtcttccctgcgttgactatttggaatgtgatctgggacagacagaatttacccctcctggttgcatttctttgcttaatattacagaaccagttctgggaccacctttcactcacctgaggactccacagaagatggtatattatgggaaaccttcttgtaaaaacaactatgagaattatattgacatagtgaaatatgtgttcagcgcttacaagagagagtcccctctcatcgtcaacactatgggatgggtttcagaccaggggctcctgcttctcattgatctgatccgattgctgtctcccagccacgtggttcagttccgctctgaccacagtaaatatatgccagaccttaccccgcagtatgtagatgacatggatggcttgtacacaaaaagcaagaccaagatgagaaatcgacgtttcagactcgcagcatttgcagatgctttggaatttgctgatgaagaaaaagagagtccagttgagttcactggacataaactgataggtgtttatacagactttgcattcagaataactccaagaaatagagagtcacataacaaaattcttcgagatctgtccatcttgagttaccttagccagctgcagcccccgatgcccaaaccactttctcctttacatagcctgacaccctatcaggtccctttcaatgcagtcgcactccggattacccactctgatgtcgcccctacccatatactatatgctgtaaacgccagctgggttggtctttgcaagatccaggatgacgtcagaggatacacgaatgggcccatcctgcttgcccagactccaatctgtgactgcttgggctttggcatctgtagaggcattgacatggagaagcggctgtaccacatcctcacccctgtgcccccggaagagctaaggaccgtgaattgtctgctcgttggagctattgccattccacattgtgtccttaagtgccagcgtgggatcgaagggacagtaccttatgtcacaacggattacaattttaaacttcctggagcatcagagaaaattggagcaagagaacctgaggaggcacataaagagaaaccataccgaagacctaagttctgtcgaaaaatgaagtgatgctcgcgtttttaataagggaagaaactttcctaccagaaagctttgtctcaagcctgaccacaagagacatgatggagtttcatggccatgaatggtgcccttattagcaacagtgttttttgtgtaattcgtgaatgtcatatagtagtcttaagtttctcttttaaagctgcatgagctagaatttgttctagtcttctgtgtgatactcatacttgctgtccagagggagtaaaacagcagagaacagtttgtgtgccattaaaacagagattcctcagaaagttcttcagggacctggttattagaatcaggataaaaataaggaaactggggccattacaatgtaccgagaaggaaggaagaaggccgacctgcaggatctcaagcataatggatacaagggctcgccacgggccttgcctgagccatgtgcagagctggggtccagcggtctgcttccttggagccagtgtggatggttacagcccatccatttggtgcagttgtacttggtctgttatattcaatcaaggtttaatagatagggctgggcatggtggctcatgcacacctgtaatcctagcactttgggaggctgaggcgggaggattgcttgagcctcggagttccaggctggagtacaccaactactccagcctgagcgacagagtaagaccttatcttttaaaaaagaaaagaaaaatttaaacgggtttgatagatataaatttggacccaagagcccttccttttttttaatcctgaggttttatgctgaggaaatttctttcaaatctggaaaacctcggggccaggcgcagtggctcacgcctgtaattccagcactttgggaggccaaggcaggcggttcacgaggtcaggagattgagaccatcctggctaacacagtgaaactccgtctctactaaaaatacaaaaaactagctgggcgtggtggtgggcgcctatagtcccagctactcaggaggctgaggcaggagaatggcatgaacccaggaggcggagcttgcagtgagccgaggtcacgccactgcactccagcctgggcaacaagagcaagactccatctcaaaaaaaaaaaataataatctggaaaacctcttctgggggctcttataaaagtagatttgtccaaattgacttctgatctgaggccagagacaaccacagggcagagctggagactgggctgttttgaaggaagaaggactggcagaccagctcttgggaaagctccattattgcctgtgggaggctggacctgaacttgcacctatgaacaaccctgccatttagagctttttcctgggggtgccggcggctggtgaccagactgccattctccacgttctccctggtgcttccgactctgtcctctaggttggaagtggtttgtgtaaacgggtgatgggaccaggtcacatcatttctgcatttaagacagcaggatacttcctggggctgaggttcaaactggtattgtgaccaccgctttgacagaattccatcttcccagcatgatcacattgtaagactattaggatgtgtgggttttaacacttatatacacttatacaactgttggttatcattgtctttagtattttacagtggcccctcagcacctcttagacccaacagcaaaggacttaaaataagcacaggaaaccttgctatggtgattagttttgatacctttgagacaattgagtctagcttcttagttgccccttatttatgttgaaatctggctcattcatatgatgttttactgtgctggccttgtaaagaattttaagacaatccatcaccatcaatgttttgcctttctccactttcgtgtatcttacagttatactcactggaggtcatttgcagcaaggctctggaagaatgaaactggtgccctgtaattgcatttgcattcaatctaggtttgccttcaggctttaaatgcggcctgtatgaaggtcaagtctttttcttcagtccctatcagtaaagaaaaatcgttgcctctagagggagctatcagctgtgggtcaggtggccgtactggggctagagttggcccaggaagctgtacagggtttagggaaggaggttcggagacagggagccaaggcctctgtcaggtctagcttgtgccggtcagacctgcagcagcaccattctccaggatgacaattcatcccattattgatggcagtggcctttttatccttttttttttttttttttttttttgagatggagtttcgctcttgttgcccaggctggagtgcagtggcgcaatctgggctcactgccacctccgcctcccgggttcaagtgattctcttgcctcaacctcccgagtagctgggattacaggcatgcgccaccatgcctggctgattttctatttttagtagagaaggggtttcaccatgttggccaggctggttttgaactcctgtcctcaggtgatccacctgccttggcctcccaaagtgttgggattacaggcatgagccaccgcacccggctggtggcagtggctttaagggcatttagaagaaggacaagattggactttttatcatttccacagtctgttatgggtcagattaggtagtaaggagttctccattggagctattcttttttttttttctttttttttgagacagagtctcgctctgtcacccaggctggggtgcagtggcacgaccttggctcactacagcctctcccctcccgggttcaagtgattcttctgccccagcctcccaagtagctgggattacaggtgagcgccaccatgcctggctaatttttatatttttagtagagatagggtttcaccgtattggctaggctggtctcgatctcctgaccttgtgatccgcttgcctcggcctcccaaagtgctgaagcaatttcttttttttttttttttttgagacagagtctagctctgtcgcccaggctggggtgcagtggagtgatctcggctcactgcaacttccgcctcccaggtttaagcgattctcctgcctcagcctcctgagtagctgggattacaggcgtatgccaccacgcccagctaatttttgtatttttagtagagacagggtttcaccatgttggtcaggctggtctcgaactcctgacctcgtgatccgcccgccttggcctccgaaagtgctgggattacaggcgtgagccactgcgcctggcctgaagctattctttacaaaagctcttagtttttgtttgtttgtttgtttttttcttttgcgacggactctctgtcgccaaggctggagtgcagtggcctgatctcaggtcactgcaacctctgcctcctgggttcaagcgattctcctgcttcagcctcccaagtagctgggattacaggcgcctgccaccacacccagctaatttttgtatttttagtagagatggcgtttcactttattggtcaggctggtctcgaacttccaacctcaggggatccgcctgccttggcctcccaaggtgttgggattacaggcataagacactgtgcctgggcctcttagtaatttttgtatgtaattttcaaagtatccgggattacaggcgcccgccactacactagctaattttttttgtatttttagtagagatggggttttactatgttggctaggctggtctcgagctcctgacctcgtgatccgtccaccttggcctcccaaagtgctgggattacaggcgtgagccaccgcgcccggcctaggtcatttgtttttgggtttggatggcaagatcatggataagacagcaggctttgattatagagctctgagttcaaatcctggctctaccacttgtcagtggtgtaacttggaggaagatgcttagcctgagcctgttttatgttttgaagattgggtaattgtccttccttcagtgttcctgggtgaggagtaagtgaagtcatgtctataagagatgtagcacagtctccggcatgtagaaacggtcagtaactcctagtgtgtagctagcctctgatgagatggtaaactcaggaggctggcaccacggctgtgctactcacggtcatgctggagggatgcagaaactaaatgaatccacagctacttactcatcttgcctctggcaggttcaccttaaaattgttgctaccaagcttcctgtggtcaaagagcccttgaggaagcaagctccacggccaccatagataacccattcctgaaagtttttcataaacccccacttgttgcttttaaaattttataagcagcttacacatgtagaaaatgatcctccagcccaccaccacatagtaatcactgacactgtgaggtgtctcagctggggttctgctgtgtgtgtgtgtattttacaaaatatgtatggtttctgttcagctcttttcagttaacagatgaacttttgtatcattaaatatttttgaaaacatgaa

SEQ ID NO: 161212 - DNA, 1734 bp, Homo sapiens
  Payload ID: 11483
  Gene Symbol: NIFK
  Gene Name: nucleolar protein interacting with the FHA domain of MKI67
  Uniprot ID: Q9BYG3
  ENST ID: ENST00000285814
  CDS Start-End: 74-955
acttccgcctcgggggagctgggagcccgacgtttccgggagcgccgcgtggttagcgtcggcggcttttggcatggcgactttttctggcccggctgggccaatcctgtcgcttaatccgcaggaagatgtcgagtttcaaaaggaggtggcgcaggttcgcaagcgcataacccagcgaaaaaaacaagaacaacttactcctggagtagtctatgtgcgccacctacctaacctacttgacgaaacccagatcttttcatatttctcccagtttggcactgtgacacggttcaggctgtccagaagtaaaaggactggaaatagcaaaggctatgcatttgtggagtttgagtctgaggatgttgccaaaatagttgctgaaacaatgaacaactacctgtttggtgaaagactcttggagtgtcattttatgccacctgaaaaagtacataaagaactctttaaagactggaatattccatttaagcagccatcatatccatcagtgaaacggtataatcggaatcggacactaacacaaaagctacggatggaggagcgatttaaaaagaaagaaagattactcaggaagaaattagctaaaaaaggaattgactatgattttccttctttgattttacagaaaacggaaagtatttcaaaaactaatcgtcagacgtctacaaaaggccaggttttacgtaagaagaagaaaaaagtttcaggtactcttgacactcctgagaagactgtggatagccagggccccacaccagtttgtacaccaacatttttggagaggcgaaaatctcaagtggctgaactgaatgatgatgataaagatgatgaaatagttttcaaacagcccatatcctgtgtaaaagaagaaatacaagagactcaaacacctacacattcacggaaaaaaagacgaagaagcagcaatcagtgattttcaatgtattatatttcttttgaaaaatataatatttttatgagagtggactttgtatttcactaggtacaatggaatacaacctttgacaagattttcagaggaaaaatacactgtttggtcaagttaaggaaagcagtgtgtaattttggattgcctgcccttggctgaaatacaggggtgcataccatcttgcagtggcttggctgacattgcctctttgtcctggcctctagttttcttttgatatttcatagctctccttagtttactctgcctggatagaaagttgaccactaactgcaggtttaagtactaaactgcagccttttctgtcgccagcaattaaagaccaccaatcttgtttgtccatctacatggtttgtcggggacatttaactcatggaggtgctttagatttcaacatcagatggttgaagctggaagtttaattatatgtagagtgagaaggcagttccagttttagcacagatttgtttatgtgttcagattttaatagagattcaaaaatgactcatttttaccaataatgttaaattagttttggttgtgctagcatgaattaataaccaccattttataccagtatcatcagtgaagaattgtatttcaagattcaaacaataaccagcaattaaacttttttctacaatgtatttgtttgcgagtaggacttgggagtcattgggaaaaaaaaataataaattttccccttcattaacgaattcagactcattaaaaacattgccatcaga

SEQ ID NO: 161213 - DNA, 686 bp, Homo sapiens
  Payload ID: 11483
  Gene Symbol: NIFK
  Gene Name: nucleolar protein interacting with the FHA domain of MKI67
  ENST ID: ENST00000423105
  CDS Start-End: 1-309
ctcaggaagaaattagctaaaaaaggaattgactatgattttccttctttggttttacgtaagaagaagaaaaaagtttcaggtactcttgacactcctgagaagactgtggatagccagggccccacaccagtttgtacaccaacatttttggagaggcgaaaatctcaagtggctgaactgaatgatgatgataaagatgatgaaatagttttcaaacagcccatatcctgtgtaaaagaagaaatacaagagactcaaacacctacacattcacggaaaaaaagacgaagaagcagcaatcagtgattttcaatgtattatatttcttttgaaaaatataatatttttatgagagtggactttgtatttcactaggtacaatggaatacaacctttgacaagattttcagaggaaaaatacactgtttggtcaagttaaggaaagcagtgtgtaattttggattgcctgcccttggctgaaatacaggggtgcataccatcttgcagtggcttggctgacattgcctctttgtcctggcctctagttttcttttgatatttcatagctctccttagtttactctgcctggatagaaagttgaccactaactgcaggtttaagtactaaactgcagccttttctgtcgccagcaattaaagaccaccaatcttgtttgtccatc

SEQ ID NO: 161214 - DNA, 559 bp, Homo sapiens
  Payload ID: 11483
  Gene Symbol: NIFK
  Gene Name: nucleolar protein interacting with the FHA domain of MKI67
  ENST ID: ENST00000451734
  CDS Start-End: 62-559
ggggagctgggagcccgacgtttccgggagcgccgcgtggttagcgtcggcggcttttggcatggcgactttttctggcccggctgggccaatcctgtcgcttaatccgcaggaagatgtcgagtttcaaaaggaggtggcgcaggttcgcaagcgcataacccagtttggcactgtgacacggttcaggctgtccagaagtaaaaggactggaaatagcaaaggctatgcatttgtggagtttgagtctgaggatgttgccaaaatagttgctgaaacaatgaacaactacctgtttggtgaaagactcttggagtgtcattttatgccacctgaaaaagtacataaagaactctttaaagactggaatattccatttaagcagccatcatatccatcagtgaaacggtataatcggaatcggacactaacacaaaagctacggatggaggagcgatttaaaaagaaagaaagattactcaggaagaaattagctaaaaaaggaattgactatgattttccttctttgattttacagaaaacggaaagtatttcaaaa

SEQ ID NO: 161215 - DNA, 759 bp, Homo sapiens
  Payload ID: 11483
  Gene Symbol: NIFK
  Gene Name: nucleolar protein interacting with the FHA domain of MKI67
  ENST ID: ENST00000447132
  CDS Start-End: 266-759
tacaatgtgattttcttatttatatatttaatttacctggtctttacgtctttagcgaaaaaaacaagaacaacttactcctggagtagtctatgtgcgccacctacctaacctacttgacgaaacccagatcttttcatatttctcccagtttggcactgtgacacggttcaggctgtccagaagtaaaaggactggaaatagcaaaggctatgcatttgtggagtttgagtctgaggatgttgccaaaatagttgctgaaacaatgaacaactacctgtttggtgaaagactcttggagtgtcattttatgccacctgaaaaagtacataaagaactctttaaagactggaatattccatttaagcagccatcatatccatcagtgaaacggtataatcggaatcggacactaacacaaaagctacggatggaggagcgatttaaaaagaaagaaagattactcaggaagaaattagctaaaaaaggaattgactatgattttccttctttgattttacagaaaacggaaagtatttcaaaaactaatcgtcagacgtctacaaaaggccaggttttacgtaagaagaagaaaaaagtttcaggtactcttgacactcctgagaagactgtggatagccagggccccacaccagtttgtacaccaacatttttggagaggcgaaaatctcaagtggctgaactgaatgatgatgataaagatgatgaaatagttttcaaacagcccatatcctgtgt

SEQ ID NO: 161216 - DNA, 6077 bp, Homo sapiens
  Payload ID: 11484
  Gene Symbol: NOM1
  Gene Name: nucleolar protein with MIF4G domain 1
  Uniprot ID: Q5C9Z4
  ENST ID: ENST00000275820
  CDS Start-End: 16-2598
cacgcgtttcgaaagatggcggcgtccaggagcgcgggagaggccggcccgggcggctcccagggacgcgtggtccgcatgaagcgcagaggcgggcgcgggccgcgccgcggtcctgctggcggtggggagaaggccctgaagaggctgaagctagcggtggaggagttcgtgcacgcgacttcggaaggcgaggctcccgggggttgcgaggggcgcggcgccccggtgagctttcgcccgggagggagaaaaagccgtaaggaactgaggaaggagaagcggcacctgcggaaagcacgccggctgcagaggacggcgggccccgaacagggtcccggcctgggaggccgaagcggagccgaagaagccagcggtcaccggcaggacacggaggagcgcgcccgcccagcccctagtcgggacccctcgcctcccaggaagccgcggccgtcccgggtcaaggccaaggccacggccgccaccgcaaagaccagaccctccgcagccgccaccgccgctgcccggaaacgggcgcttttagcggcgaacgaggaggaggaccgagagatccgaaagctggagcgttgcctcggtttgaacaagcgcaaaaagaaggacggcagcagctccgtgccgctgagctttgcacgcgacggtcttgactatattctgggagccctggagtctgggaaaaatagcggcttgtacgacagcagtggtgaggaggaggaagatgccggacagacactccccgaaagtgacttagagagtgactcccaggacgaaagtgaggaggaggaggagggagacgtagaaaaggaaaagaaggcgcaggaagcagaagcgcagagcgaggacgacgacgaggatacagaagaggaacagggggaagaaaaggaaaagggagcgcaggagaaaaggagggggaagagagtccgttttgcagaagatgaagaaaagagtgaaaattcctcggaggacggtgacataacggataagagtctttgtggaagtggtgaaaagtacatcccacctcatgtgaggcaagctgaggagacagtggacttcaagaaaaaggaagaactagaaaggctgaagaaacatgtaaaaggtctacttaacaggttgagtgaacccaacatggcttccatcagtgggcagctggaggaactgtacatggcccacagcagaaaggacatgaatgacaccctgacctccgctctcatgggtgcctgcgtcactgcctcggccatgcccagcagactgatgatggagcatgttctcttagtcagcatccttcaccacacagttggaatcgaggtcggtgcccactttctggaggcagtggtgaggaagttcgatgccatctataaatacggaagcgaagggaaagagtgtgacaacctgttcaccgtcattgcccatttatacaacttccacgtggtacagtctctcctcatcttcgacattttgaaaaaactgattggaactttcaccgaaaaagatattgaactgatcttgttaatgctgaaaaacgtgggtttttcattgaggaaagatgatgctttatcacttaaggaattgatcactgaagcccagaccaaagccagcggggcaggcagcgagtttcaggaccagaccaggattcggtttatgctagagacgatgttggccctgaagaacaatgacatgcgcaaaattccaggctatgaccccgagcccgtggagaagctgaggaaactgcagagagctttggtccgcaacgccggctcaggttctgagacgcagcttcgcgtctcctgggacagtgtcttgagtgcggagcagacgggtcgctggtggattgtggggtccgcctggagtggggccccgatgatcgacaacagtcaccatacgcacctgcagaagcagcttgtggggacggtcagttcaaagatcctagaactcgcccggaagcagaggatgaacacagacatccggagaaacatattctgcacaataatgacaagtgaagattttttggatgcttttgaaaagcttctgaagcttggacttaaggatcagcaggagagagaaatcattcacgttctcatggattgctgccttcaagagaaaacttacaatcccttctatgctttcctggctagcaaattctgtgaatatgaaaggagatttcagatgactttccagttcagcatatgggacaaatttcgggacttggaaaacttgccagctacgaatttctctaatttggttcatctggtggcccacttgttgaagacaaaatcgctttccctttccatcttaaaggtagttgaattcagtgaattggacaaacccagagtccgttttttacgaaaagtattaagtatcctattaatggaaacagaagttgaagacctcagtttaattttcacaagagtatctgacaacccaaagctgggggtgttacgtgagggtttgaagcttttcatcagccacttcttgctaaagaacgcacaggcccacagaagcgccgacgaagccaacgtgctgagagagaaagctgaccttgcaacgaagtgtctgcaaggaaaagcttccctgagaatgtagtcagggaaggaaggagggcaggtggccctttgactgtaaaatgtccttggtaaacccaaaggcttattctgttgcctgcgtgtgaatgtttggtagagctatatcattgtctgttaatgtattatattttgagattttttttgatctaaggttttattgtttgtatttcaagccattttcaaataactatcttgggggtgagaggagaaggagggagggaaaaggggtcaggcacactggacagggttctctaagcagtgaggctggtgtgtatgattgtcttaaaattttttaatagatatggccgagcgtgatggctcacccctgtaatcccagcactttgtgaggccaaggtgggcggatcacttgaggccaggaatttgaaaccagcctgggcaaaaccctgtctctactaaaaatataaaaattagccaggcatgatggcacatgctggtaatagcagctactgaggtggctgaggcacaagaattgcttggaccctggaggtagaggctgcagtgagccaagattgtaccactgtactccagcctgggctggacagtgagacttttgacagtgagactgtcaaaaaaaaaaaaaaaattaatagataaaacaggccactagagggtgcagttataaagaaattgatgaggtttttacctttttaaaatattggttagaagttcaaaaaccatcccttaaaggtgattgtttttttgagacagagtcttgctctgtcacccagagtggagtgcagtgtcctgtaatctcagctcactgcaacctctacctcccgggttcaagcgattctcctgcctcagcctctttagctgggactacaggcgcacgccaccacgcccggctaatttttgtattttagtagagatgggtttcaccatgttggcaaggctggtcttgaactcctgacctcaggtgatacacccatctcggcctcccaaagtgctgggattacaggcttgagccaccacgcccagcttaaatgtgattcttgatactgttttaagtatttaggttgcaattaactttggcaaagtcagtcgacataagccctgtggatatggccttatgtacactgtaatgcagacaggtgcttttcatcattcatgtaacattctcacacagttgaggatattcatctcctcaccaattccagattgtaaatgtaccatcttaaacaactctgaggtcaccaaacagtagttatttgactgttaataggtgctacttgcttgcaaggatttggagatgtaaacatgaagaaaatatagttactgcctgcaaagaattaacatccgtctagtgggagaaacaaacacaccccactcactaagtatggaaaactgattctgggaggaagcagaaatgtccctagataacagcatgtattgcagatacccaaatgtttattgttttctcagcccttcaattttgcttttctctctcaaatgctacagactcaatttaaatcttacctttgattgttgaaaaaagtcactaagatgtgaatacagaatagacattgagaggttatatatgtccaaaactcatctgtccagcagtcaccgtcctcttcagagtggtcacgttgggcagatgggcacaggtgctggtgatgcctctcctgggcaaaacgccccatttgtggcactttcagatactatttatttactttttaagagagagacaggctcactctgtcacccaggccagagtgcagtggcacgatcatagttaccgcagcatcaaattcctggactgaagcggtccttttgcctcagcctcgcggatagctaggaccacaagcagtagagacaagatctccgtatgttatacaggctggcctcaagtgatcctcttaccttggcctcccaaacaccgggattataggcgtgagcccccgtgcctggcctcaaattttattttagctcgaccctatggcagtttgtgtttggaaatcgtgatgtgaagtcatcagtatctgtgcatatccctaaactaatggtttaagctttgaagcatgcgcaagcaacatgaacaactgaatacagaaagtaactgaaagcagcacagagactgtgtcgtccctacagacttctaaccctgcattcagcaacatcattcgacccgaagccagattcaaaccctatgtcttctagcaggttctgaatttagaggacaaataaggtgacaggtactaagagaagagtgaattaagtgaaaatcttccctttgttaaggagctttttaacaagagtgtctttgctgggtggtgattgggatgtaacagatcagttctactggacttgtagcttgatagtgaaataaggagcttgggctaaggtataaatcaacacactgcttccttcctccagaaggtcttactgtgaaggaaaaaatgtcagttgaactaaattgtgcttcacgcctcggtagatttgcattctgatgcaagcccccaacctcacggaccaagaggatccctggctgcctgtgaatggcccacatttgagtggtgctaacttgatgtgagtaggcattaattatgggtgcggctactaagatgggaaaaactatcacgacagtggcaccacctgatttcatgatgtaccatatgcagtaacccatgtttgaggtacagaattgaagctgatttttctgcaaaagatgaatttctataaacaatcccatttttatattttattattaaaacaaaaatacctctctttgctagagagttatatgtatgacttaaattattagctatggtttgcatttagtacatggcagattgcctgtaagtctgttcattttaacaacatacagggctgggcacggtggctcacgcctgtaatcccagcactttgggaggttgcgggtggatcacttgaggtcaggagttcgagaccagcctggccaacatggcaaaaccccgtctctatgaaaaatataaaaattagctgggcatggtggcaggcacctgtaatcccagctactcgggaggctgaggcaggagaatcgcttgaacctgggaggcggatgttgcagtgagcagagatcgtgccattgcactccagcctgggaacaagagtgaaactctcaaaagcagaaacaaaaacccaacatatatgggctgttagatagtaattgtaatttcgtataaatagtaaatgagtacatcttgattaaaagctatgaattcagaattgcttttaaatatatagggggttttttgaaatttattacagtgcaattgaaaatacacttaaaatactgcaggatgcttagtgctcagtgttatgtatgaacttgtggactttacaatgcaggttgagaactgctaatgtatagaatgactaaacagctgtctttcagggtatcatttttaaaggtataaggaacaaactttaatgtattgaaatgcataaataaaatttattttttatattttgtttaga

SEQ ID NO: 161217 - DNA, 4034 bp, Homo sapiens
  Payload ID: 11485
  Gene Symbol: NCL
  Gene Name: nucleolin
  Uniprot ID: P19338
  ENST ID: ENST00000322723
  CDS Start-End: 242-2374
gattggctcatggggacggccgcgagctttggttggtcggcgcggagtcacgagggcgccgtcgtcgcctttccacaggcgattactgggcaggctcagtctttcgcctcagtctcgagctctcgctggccttcgggtgtacgtgctccgggatcttcagcacccgcggccgccatcgccgtcgcttggcttcttctggactcatctgcgccacttgtccgcttcacactccgccgccatcatggtgaagctcgcgaaggcaggtaaaaatcaaggtgaccccaagaaaatggctcctcctccaaaggaggtagaagaagatagtgaagatgaggaaatgtcagaagatgaagaagatgatagcagtggagaagaggtcgtcatacctcagaagaaaggcaagaaggctgctgcaacctcagcaaagaaggtggtcgtttccccaacaaaaaaggttgcagttgccacaccagccaagaaagcagctgtcactccaggcaaaaaggcagcagcaacacctgccaagaagacagttacaccagccaaagcagttaccacacctggcaagaagggagccacaccaggcaaagcattggtagcaactcctggtaagaagggtgctgccatcccagccaagggggcaaagaatggcaagaatgccaagaaggaagacagtgatgaagaggaggatgatgacagtgaggaggatgaggaggatgacgaggacgaggatgaggatgaagatgaaattgaaccagcagcgatgaaagcagcagctgctgcccctgcctcagaggatgaggacgatgaggatgacgaagatgatgaggatgacgatgacgatgaggaagatgactctgaagaagaagctatggagactacaccagccaaaggaaagaaagctgcaaaagttgttcctgtgaaagccaagaacgtggctgaggatgaagatgaagaagaggatgatgaggacgaggatgacgacgacgacgaagatgatgaagatgatgatgatgaagatgatgaggaggaggaagaagaggaggaggaagagcctgtcaaagaagcacctggaaaacgaaagaaggaaatggccaaacagaaagcagctcctgaagccaagaaacagaaagtggaaggcacagaaccgactacggctttcaatctctttgttggaaacctaaactttaacaaatctgctcctgaattaaaaactggtatcagcgatgtttttgctaaaaatgatcttgctgttgtggatgtcagaattggtatgactaggaaatttggttatgtggattttgaatctgctgaagacctggagaaagcgttggaactcactggtttgaaagtctttggcaatgaaattaaactagagaaaccaaaaggaaaagacagtaagaaagagcgagatgcgagaacacttttggctaaaaatctcccttacaaagtcactcaggatgaattgaaagaagtgtttgaagatgctgcggagatcagattagtcagcaaggatgggaaaagtaaagggattgcttatattgaatttaagacagaagctgatgcagagaaaacctttgaagaaaagcagggaacagagatcgatgggcgatctatttccctgtactatactggagagaaaggtcaaaatcaagactatagaggtggaaagaatagcacttggagtggtgaatcaaaaactctggttttaagcaacctctcctacagtgcaacagaagaaactcttcaggaagtatttgagaaagcaacttttatcaaagtaccccagaaccaaaatggcaaatctaaagggtatgcatttatagagtttgcttcattcgaagacgctaaagaagctttaaattcctgtaataaaagggaaattgagggcagagcaatcaggctggagttgcaaggacccaggggatcacctaatgccagaagccagccatccaaaactctgtttgtcaaaggcctgtctgaggataccactgaagagacattaaaggagtcatttgacggctccgttcgggcaaggatagttactgaccgggaaactgggtcctccaaagggtttggttttgtagacttcaacagtgaggaggatgccaaagctgccaaggaggccatggaagacggtgaaattgatggaaataaagttaccttggactgggccaaacctaagggtgaaggtggcttcgggggtcgtggtggaggcagaggcggctttggaggacgaggtggtggtagaggaggccgaggaggatttggtggcagaggccggggaggctttggagggcgaggaggcttccgaggaggcagaggaggaggaggtgaccacaagccacaaggaaagaagacgaagtttgaatagcttctgtccctctgctttcccttttccatttgaaagaaaggactctggggtttttactgttacctgatcaatgacagagccttctgaggacattccaagacagtatacagtcctgtggtctccttggaaatccgtctagttaacatttcaagggcaataccgtgttggttttgactggatattcatataaactttttaaagagttgagtgatagagctaacccttatctgtaagttttgaatttatattgtttcatcccatgtacaaaaccattttttcctacaaatagtttgggttttgttgttgtttcttttttttgttttgtttttgttttttttttttttgcgttcgtggggttgtaaaagaaaagaaagcagaatgttttatcatggtttttgcttcagcggctttaggacaaattaaaagtcaactctggtgccagacgtgttacttcctaaagagtgtttcccctggaatgtcactggagagcatggcaaagccagctctgccacttgcttcacccatcccaatggaaatggcttagtgcgtgtttccagtatcccagccctaactaacttggttgaaatgctggtgaggggacctgctcctgcagccctggtgctgacttgaaggctgctgcagcttctcctacttttagcaggtctgaggattatgtcctgaagaccactctggaaagaggtgcaggaacagattagtcaggtttcctaggacaaggaagagcttcagggaagagcagtggctaactcctgtaatcccaacacttggggaggccgaggcaggcagatcaactgaggtcaggagttgaagaccagcctggccaacatggtgaaagcccatctctactaaaaatacaaaaattagctgggcatggtggtgtactcctgtagtcccagctactcaggaggctgaagcgggagagtcacgtgaacccgggaagcagagtgagctgagcacacactactatactccaggctgggtaacaaagcgagactcccatctcccaaaaagcagttctggaatagaactcacgctagatggatagaccagtggacactttggaaccttggggctggggaggaaactgcccatccagtaaacccccaaaaagccatttgttctgcactacgtatattgcttattctttctggtcttaagtacttgcctctcaacctccctttttagtaaaagacaaggccacgtgagaggcgggactatcaacattgtgatgaatttacttgaaacccagtgcccaaaatcaatgtaggtagccaagtccaaaaacctgttctagtccaactagtgaaatcaaactgtgatacttggataagcttagaaggaaacgtgaagaatacgtagctgctttgggtttactctggttcagttgggctgttgaaatcttaacatccttgggcttatcacctactgcttgtcagccctgttccatgtccaggggatgggggtggtgacaatccagttccaagaccctcatgctctagagaggaaggtggccagccagggttgtaactacgatgaaaaagcagtgggagggtctcctatgaggcaagcctaaggacaaaaaggaaggccttgcagcctgtattctggataaggaattaaaagctcagttaattgaagccca

SEQ ID NO: 161218 - DNA, 890 bp, Homo sapiens
  Payload ID: 11485
  Gene Symbol: NCL
  Gene Name: nucleolin
  ENST ID: ENST00000356936
  CDS Start-End: 1-890
ctcccttacaaagtcactcaggatgaattgaaagaagtgtttgaagatgctgcggagatcagattagtcagcaaggatgggaaaagtaaagggattgcttatattgaatttaagacagaagctgatgcagagaaaacctttgaagaaaagcagggaacagagatcgatgggcgatctatttccctgtactatactggagagaaaggtcaaaatcaagactatagaggtggaaagaatagcacttggagtgatgattctaggaaaacagaccagtcatcagcctatgtaagaacaaccagcaggacattgcaacacgtactaggtgaatcaaaaactctggttttaagcaacctctcctacagtgcaacagaagaaactcttcaggaagtatttgagaaagcaacttttatcaaagtaccccagaaccaaaatggcaaatctaaagggtatgcatttatagagtttgcttcattcgaagacgctaaagaagctttaaattcctgtaataaaagggaaattgagggcagagcaatcaggctggagttgcaaggacccaggggatcacctaatgccagaagccagccatccaaaactctgtttgtcaaaggcctgtctgaggataccactgaagagacattaaaggagtcatttgacggctccgttcgggcaaggatagttactgaccgggaaactgggtcctccaaagggtttggttttgtagacttcaacagtgaggaggatgccaaagctgccaaggaggccatggaagacggtgaaattgatggaaataaagttaccttggactgggccaaacctaagggtgaaggtggcttcgggggtcgtggtggaggcagaggcggctttggaggacgaggtggtggtagaggagg

SEQ ID NO: 161219 - DNA, 568 bp, Homo sapiens
  Payload ID: 11485
  Gene Symbol: NCL
  Gene Name: nucleolin
  ENST ID: ENST00000417652
  CDS Start-End: 71-568
agtggggaggtctcgcggcttctggctacttggtggcgaggcaggtaaaaatcaaggtgaccccaagaaaatggctcctcctccaaaggaggtagaagaagatagtgaagatgaggaaatgtcagaagatgaagaagatgatagcagtggagaagaggtcgtcatacctcagaagaaaggcaagaaggctgctgcaacctcagcaaagaaggtggtcgtttccccaacaaaaaaggttgcagttgccacaccagccaagaaagcagctgtcactccaggcaaaaaggcagcagcaacacctgccaagaagacagttacaccagccaaagcagttaccacacctggcaagaagggagccacaccaggcaaagcattggtagcaactcctggtaagaagggtgctgccatcccagccaagggggcaaagaatggcaagaatgccaagaaggaagacagtgatgaagaggaggatgatgacagtgaggaggatgaggaggatgacgaggacgaggatgaggatgaagatgaaattgaaccagcagcgatgaaagcagcagctgctgcccct

SEQ ID NO: 161220 - DNA, 562 bp, Homo sapiens
  Payload ID: 11485
  Gene Symbol: NCL
  Gene Name: nucleolin
  ENST ID: ENST00000436894
  CDS Start-End: 139-562
tttttttaagtgccttaatgatcttcaccgttaatttggattcagatgagggtggtagaataaagtaccgggatttgtagtattaaaacacggttgtgcttaactaaggcaggtaaaaatcaaggtgaccccaagaaaatggctcctcctccaaaggaggtagaagaagatagtgaagatgaggaaatgtcagaagatgaagaagatgatagcagtggagaagaggtcgtcatacctcagaagaaaggcaagaaggctgctgcaacctcagcaaagaaggtggtcgtttccccaacaaaaaaggttgcagttgccacaccagccaagaaagcagctgtcactccaggcaaaaaggcagcagcaacacctgccaagaagacagttacaccagccaaagcagttaccacacctggcaagaagggagccacaccaggcaaagcattggtagcaactcctggtaagaagggtgctgccatcccagccaagggggcaaagaatggcaagaatgccaagaaggaagacagtgatgaagaggaggatgatgacagtgaggaggatgagg

SEQ ID NO: 161221 - DNA, 606 bp, Homo sapiens
  Payload ID: 11485
  Gene Symbol: NCL
  Gene Name: nucleolin
  ENST ID: ENST00000454824
  CDS Start-End: 96-606
gcgcgattagtggggaggtctcgcggcttctggctacttggtggcgaggtgaagagcttctgcaggcaggtaaaaatcaaggtgaccccaagaaaatggctcctcctccaaaggaggtagaagaagatagtgaagatgaggaaatgtcagaagatgaagaagatgatagcagtggagaagaggtcgtcatacctcagaagaaaggcaagaaggctgctgcaacctcagcaaagaaggtggtcgtttccccaacaaaaaaggttgcagttgccacaccagccaagaaagcagctgtcactccaggcaaaaaggcagcagcaacacctgccaagaagacagttacaccagccaaagcagttaccacacctggcaagaagggagccacaccaggcaaagcattggtagcaactcctggtaagaagggtgctgccatcccagccaagggggcaaagaatggcaagaatgccaagaaggaagacagtgatgaagaggaggatgatgacagtgaggaggatgaggaggatgacgaggacgaggatgaggatgaagatgaaattgaaccagcagcgatgaaagcagcagctgctgcccctgcctcagaggatg

SEQ ID NO: 161222 - DNA, 964 bp, Homo sapiens
  Payload ID: 11485
  Gene Symbol: NCL
  Gene Name: nucleolin
  ENST ID: ENST00000453992
  CDS Start-End: 511-964
ttctggctacttggtggcgaggtgaagagcttctgcaggtgctgggggcggcgaacgcggcgggaaagacagagtcactgagcgcggggagggggcgctgggcctcggggtggagagatgagaccaaacttttgcgacgcgtacgagctgggactcgactcctgacgcacgtgcccgggagcgcggcctgccacgtgggccgcgccgcgtgggtcctggaatctccagagggaccgggtgccttgggccgggaaatggcggtatcggccctagtcggagtcccggctgcgctcggatgtctccgccccggcctggcaagccgacacgtggtgggccccggaaggtggctctgccgcgtgccttttgcgctgtgtttcgggcacgtggtggcctaccaggtacccccacgtggccgcgccgcctctttaaggggcggggttgtctcgctgggaaaggcataagcttcatgagaaaatcaaggcaggtaaaaatcaaggtgaccccaagaaaatggctcctcctccaaaggaggtagaagaagatagtgaagatgaggaaatgtcagaagatgaagaagatgatagcagtggagaagaggtcgtcatacctcagaagaaaggcaagaaggctgctgcaacctcagcaaagaaggtggtcgtttccccaacaaaaaaggttgcagttgccacaccagccaagaaagcagctgtcactccaggcaaaaaggcagcagcaacacctgccaagaagacagttacaccagccaaagcagttaccacacctggcaagaagggagccacaccaggcaaagcattggtagcaactcctggtaagaagggtgctgccatcccagccaagggggcaaagaatggcaagaatgccaagaaggaagacagtgatgaagaggaggatgatgacagtgaggaggatgaggaggatgacgaggacgaggatgaggatgaag

SEQ ID NO: 161223 - DNA, 1758 bp, Homo sapiens
  Payload ID: 11486
  Gene Symbol: NPM1
  Gene Name: nucleophosmin (nucleolar phosphoprotein B23, numatrin)
  Uniprot ID: P06748
  ENST ID: ENST00000296930
  CDS Start-End: 302-1186
agtgcgcgtgctcggtgggagcccgcggagtacctggaaggaggtgggggcgaggtagaaaggagtggggttgaaaagcgcttgcgcaggacggctacggtacgggggtgggagggcttcggagcacgcgcgcggaggcgggacttgggaagcgctcgcgagatcttcagggtctatatataagcgcggggagcctgcgtcctttccctggtgtgattccgtcctgcgcggttgttctctggagcagcgttcttttatctccgtccgccttctctcctacctaagtgcgtgccgccacccgatggaagattcgatggacatggacatgagccccctgaggccccagaactatcttttcggttgtgaactaaaggccgacaaagattatcactttaaggtggataatgatgaaaatgagcaccagttatctttaagaacggtcagtttaggggctggtgcaaaggatgagttgcacattgttgaagcagaggcaatgaattacgaaggcagtccaattaaagtaacactggcaactttgaaaatgtctgtacagccaacggtttcccttgggggctttgaaataacaccaccagtggtcttaaggttgaagtgtggttcagggccagtgcatattagtggacagcacttagtagctgtggaggaagatgcagagtcagaagatgaagaggaggaggatgtgaaactcttaagtatatctggaaagcggtctgcccctggaggtggtagcaaggttccacagaaaaaagtaaaacttgctgctgatgaagatgatgacgatgatgatgaagaggatgatgatgaagatgatgatgatgatgattttgatgatgaggaagctgaagaaaaagcgccagtgaagaaatctatacgagatactccagccaaaaatgcacaaaagtcaaatcagaatggaaaagactcaaaaccatcatcaacaccaagatcaaaaggacaagaatccttcaagaaacaggaaaaaactcctaaaacaccaaaaggacctagttctgtagaagacattaaagcaaaaatgcaagcaagtatagaaaaaggtggttctcttcccaaagtggaagccaaattcatcaattatgtgaagaattgcttccggatgactgaccaagaggctattcaagatctctggcagtggaggaagtctctttaagaaaatagtttaaacaatttgttaaaaaattttccgtcttatttcatttctgtaacagttgatatctggctgtcctttttataatgcagagtgagaactttccctaccgtgtttgataaatgttgtccaggttctattgccaagaatgtgttgtccaaaatgcctgtttagtttttaaagatggaactccaccctttgcttggttttaagtatgtatggaatgttatgataggacatagtagtagcggtggtcagacatggaaatggtggggagacaaaaatatacatgtgaaataaaactcagtattttaataaagtagcacggtttctattgacttatttaactgctttatactttgtcaaagaaataattaatgtagttaggaatggcaaatagtcttgtaaaattctatgagaatgtccctgccctccccttcaatattctctctggagctaaccactttttcatcataaggatttagtgctgtgttcccacctcctgatgatagttaacaattattataactatgcaacatgtttccaaatgttccattagacctcctatctgccta

SEQ ID NO: 161224 - DNA, 1237 bp, Homo sapiens
  Payload ID: 11486
  Gene Symbol: NPM1
  Gene Name: nucleophosmin (nucleolar phosphoprotein B23, numatrin)
  Uniprot ID: P06748
  ENST ID: ENST00000351986
  CDS Start-End: 121-918
aagcgcggggagcctgcgtcctttccctggtgtgattccgtcctgcgcggttgttctctggagcagcgttcttttatctccgtccgccttctctcctacctaagtgcgtgccgccacccgatggaagattcgatggacatggacatgagccccctgaggccccagaactatcttttcggttgtgaactaaaggccgacaaagattatcactttaaggtggataatgatgaaaatgagcaccagttatctttaagaacggtcagtttaggggctggtgcaaaggatgagttgcacattgttgaagcagaggcaatgaattacgaaggcagtccaattaaagtaacactggcaactttgaaaatgtctgtacagccaacggtttcccttgggggctttgaaataacaccaccagtggtcttaaggttgaagtgtggttcagggccagtgcatattagtggacagcacttagtagctgtggaggaagatgcagagtcagaagatgaagaggaggaggatgtgaaactcttaagtatatctggaaagcggtctgcccctggaggtggtagcaaggttccacagaaaaaagtaaaacttgctgctgatgaagatgatgacgatgatgatgaagaggatgatgatgaagatgatgatgatgatgattttgatgatgaggaagctgaagaaaaagcgccagtgaagaaaggacaagaatccttcaagaaacaggaaaaaactcctaaaacaccaaaaggacctagttctgtagaagacattaaagcaaaaatgcaagcaagtatagaaaaaggtggttctcttcccaaagtggaagccaaattcatcaattatgtgaagaattgcttccggatgactgaccaagaggctattcaagatctctggcagtggaggaagtctctttaagaaaatagtttaaacaatttgttaaaaaattttccgtcttatttcatttctgtaacagttgatatctggctgtcctttttataatgcagagtgagaactttccctaccgtgtttgataaatgttgtccaggttctattgccaagaatgtgttgtccaaaatgcctgtttagtttttaaagatggaactccaccctttgcttggttttaagtatgtatggaatgttatgataggacatagtagtagcggtggtcagacatggaaatggtggggagacaaaaatatacatgtgaaataaaactcagtattttaataaagta

SEQ ID NO: 161225 - DNA, 1598 bp, Homo sapiens
  Payload ID: 11486
  Gene Symbol: NPM1
  Gene Name: nucleophosmin (nucleolar phosphoprotein B23, numatrin)
  Uniprot ID: P06748
  ENST ID: ENST00000393820
  CDS Start-End: 99-878
ttccctggtgtgattccgtcctgcgcggttgttctctggagcagcgttcttttatctccgtccgccttctctcctacctaagtgcgtgccgccacccgatggaagattcgatggacatggacatgagccccctgaggccccagaactatcttttcggttgtgaactaaaggccgacaaagattatcactttaaggtggataatgatgaaaatgagcaccagttatctttaagaacggtcagtttaggggctggtgcaaaggatgagttgcacattgttgaagcagaggcaatgaattacgaaggcagtccaattaaagtaacactggcaactttgaaaatgtctgtacagccaacggtttcccttgggggctttgaaataacaccaccagtggtcttaaggttgaagtgtggttcagggccagtgcatattagtggacagcacttagtagctgtggaggaagatgcagagtcagaagatgaagaggaggaggatgtgaaactcttaagtatatctggaaagcggtctgcccctggaggtggtagcaaggttccacagaaaaaagtaaaacttgctgctgatgaagatgatgacgatgatgatgaagaggatgatgatgaagatgatgatgatgatgattttgatgatgaggaagctgaagaaaaagcgccagtgaagaaatctatacgagatactccagccaaaaatgcacaaaagtcaaatcagaatggaaaagactcaaaaccatcatcaacaccaagatcaaaaggacaagaatccttcaagaaacaggaaaaaactcctaaaacaccaaaaggacctagttctgtagaagacattaaagcaaaaatgcaagcaagtatagaaaaagcgcattgaacagtcctgggcactacatgtaaattaagcccaaagatggggagaaaggaaaaggagagacaaatatagtccatactgagtgtcatcaacaatccagactgaagtcttctattttaatctcaatccccttttctgatttgccacccatgcctcttcaggctggaaacaatctcttggttccctaaagcactttcttctgactgctgtgattcagtgaaccttgccctttgctttctattacttgtgcatttgcctcacctgacaatgttttaaatcgcctttgtatctccttagctgctcaataaatatttgaatgcatcaattaagaatgtatgtgacaataattttgaaatggaaattgtgaggtttattttactaggttattggaggcagttaagtttcttaatgctatacctgattctgccaaagtcccttggacatttgaaaaccttttcaatcttttaaaaatgcataaaagatacttagagggaaaggtattaattaaatttagtaaaaacaaatatattcaatgctttaaattccaaagtagtgataaatacaaacatttcaagatatttgcaatagtaatgttttgaaattttggttacaaagtcacaggtcttgccaatactgttgtagtttcttgcctatatccgtaatttgaaggaaatggtgagagtgattagagaagtgtaattactgtaattttttcccctattg

SEQ ID NO: 161226 - DNA, 247 bp, Homo sapiens
  Payload ID: 11486
  Gene Symbol: NPM1
  Gene Name: nucleophosmin (nucleolar phosphoprotein B23, numatrin)
  ENST ID: ENST00000523622
  CDS Start-End: 69-247
gttctctggagcagcgttcttttatctccgtccgccttctctcctacctaagtgcgtgccgccacccgatggaagattcgatggacatggacatgagccccctgaggccccagaactatcttttcgattatcactttaaggtggataatgatgaaaatgagcaccagttatctttaagaacggtcagtttaggggctggtgcaaaggatgagttgcacattgttgaagcagaggcaatgaattacga

SEQ ID NO: 161227 - DNA, 1338 bp, Homo sapiens
  Payload ID: 11486
  Gene Symbol: NPM1
  Gene Name: nucleophosmin (nucleolar phosphoprotein B23, numatrin)
  Uniprot ID: P06748
  ENST ID: ENST00000517671
  CDS Start-End: 136-1020
gggcgatgtccttgctaatttggagactgattcagtccccttttggcccccaagttacgtaaagataaggactttggagatgttttctcaggaaggacagagctgaaaaacaaagttcctgcgtgccgccacccgatggaagattcgatggacatggacatgagccccctgaggccccagaactatcttttcggttgtgaactaaaggccgacaaagattatcactttaaggtggataatgatgaaaatgagcaccagttatctttaagaacggtcagtttaggggctggtgcaaaggatgagttgcacattgttgaagcagaggcaatgaattacgaaggcagtccaattaaagtaacactggcaactttgaaaatgtctgtacagccaacggtttcccttgggggctttgaaataacaccaccagtggtcttaaggttgaagtgtggttcagggccagtgcatattagtggacagcacttagtagctgtggaggaagatgcagagtcagaagatgaagaggaggaggatgtgaaactcttaagtatatctggaaagcggtctgcccctggaggtggtagcaaggttccacagaaaaaagtaaaacttgctgctgatgaagatgatgacgatgatgatgaagaggatgatgatgaagatgatgatgatgatgattttgatgatgaggaagctgaagaaaaagcgccagtgaagaaatctatacgagatactccagccaaaaatgcacaaaagtcaaatcagaatggaaaagactcaaaaccatcatcaacaccaagatcaaaaggacaagaatccttcaagaaacaggaaaaaactcctaaaacaccaaaaggacctagttctgtagaagacattaaagcaaaaatgcaagcaagtatagaaaaaggtggttctcttcccaaagtggaagccaaattcatcaattatgtgaagaattgcttccggatgactgaccaagaggctattcaagatctctggcagtggaggaagtctctttaagaaaatagtttaaacaatttgttaaaaaattttccgtcttatttcatttctgtaacagttgatatctggctgtcctttttataatgcagagtgagaactttccctaccgtgtttgataaatgttgtccaggttctattgccaagaatgtgttgtccaaaatgcctgtttagtttttaaagatggaactccaccctttgcttggttttaagtatgtatggaatgttatgataggacatagtagtagcggtggtcagacatggaaatggtggggagacaaaaatatacatgtgaaataaaactcagtattttaataaagt

SEQ ID NO: 161228 - DNA, 597 bp, Homo sapiens
  Payload ID: 11486
  Gene Symbol: NPM1
  Gene Name: nucleophosmin (nucleolar phosphoprotein B23, numatrin)
  ENST ID: ENST00000521672
  CDS Start-End: 263-597
gcgctcgcgagatcttcagggtctatatataagcgcggggagcctgcgtcctttccctggtgtgattccgtcctgcgcggttgttctctggagcagcgttcttttatctccgtccgccttctctcctacctaagtgcgtgccgccacccgatggaagattcgatggacatggacatgagccccctgaggccccagaactatcttttcggtcagtttaggggctggtgcaaaggatgagttgcacattgttgaagcagaggcaatgaattacgaaggcagtccaattaaagtaacactggcaactttgaaaatgtctgtacagccaacggtttcccttgggggctttgaaataacaccaccagtggtcttaaggttgaagtgtggttcagggccagtgcatattagtggacagcacttagtagctgtggaggaagatgcagagtcagaagatgaagaggaggaggatgtgaaactcttaagtatatctggaaagcggtctgcccctggaggtggtagcaaggttccacagaaaaaagtaaaacttgctgctgatgaagatgatgacgatgatgatgaagaggatgatgatgaagatga

SEQ ID NO: 161229 - DNA, 1100 bp, Homo sapiens
  Payload ID: 11487
  Gene Symbol: NPM2
  Gene Name: nucleophosmin/nucleoplasmin 2
  Uniprot ID: Q86SE8
  ENST ID: ENST00000289820
  CDS Start-End: 241-885
ggggggagctgggacctaagccgcgcgcacacccctttctctgcgtctggtggaggtgcacagaggcttttgagtcaggcccaagcgcagccaggtgacctccccgcggcctttcaagcctgagctcggtggacagctccctctcccgtgagtcccgctgtcctgtacgcgcccggtcgagccccgggctgcgcaccccgctaggagctgcccggccagcccgcttctctgcccggagccatgaatctcagtagcgccagtagcacggaggaaaaggcagtgacgaccgtgctctggggctgcgagctcagtcaggagaggcggacttggaccttcagaccccagctggaggggaagcagagctgcaggctgttgcttcatacgatttgcttgggggagaaagccaaagaggagatgcatcgcgtggagatcctgcccccagcaaaccaggaggacaagaagatgcagccggtcaccattgcctcactccaggcctcagtcctccccatggtctccatggtaggagtgcagctttctcccccagttactttccagctccgggctggctcaggacccgtgttcctcagtggccaggaacgttatgaagcatcagacctaacctgggaggaggaggaggaagaagaaggggaggaggaggaagaggaagaggaagatgatgaggatgaggatgcagatatatctctggaggagcaaagccctgtcaaacaagtcaaaaggctggtgccccagaagcaggcgagcgtggctaagaaaaaaaagctggaaaaagaagaagaggaaataagagccagcgttagagacaagagccctgtgaaaaaggccaaagccacagccagagccaagaagccaggattcaagaaatgaggagccacgccttggggggcacggtgcaaagtgggccttccctgggctgtgctgcaggcacagggtgcccctgtccagcccctccacctgtgtctgaatgcaacaggggtgttgcgggggcaacatgagagcccctcacccccaactctccactttcaggaggcccccagtgaagagccccacctcggggtcacaataaagttgcctggtcagga

SEQ ID NO: 161230 - DNA, 925 bp, Homo sapiens
  Payload ID: 11487
  Gene Symbol: NPM2
  Gene Name: nucleophosmin/nucleoplasmin 2
  Uniprot ID: Q86SE8
  ENST ID: ENST00000381530
  CDS Start-End: 233-643
ctgggacctaagccgcgcgcacacccctttctctgcgtctggtggaggtgcacagaggcttttgagtcaggcccaagcgcagccaggtgacctccccgcggcctttcaagcctgagctcggtggacagctccctctcccgtgagtcccgctgtcctgtacgcgcccggtcgagccccgggctgcgcaccccgctaggagctgcccggccagcccgcttctctgcccggagccatgaatctcagtagcgccagtagcacggaggaaaaggcagtgacgaccgtgctctggggctgcgagctcagtcaggagaggcggacttggaccttcagaccccagctggaggggaagcagagctgcaggctgttgcttcatacgatttgcttgggggagaaagccaaagaggagatgcatcgcgtggagatcctgcccccagcaaaccaggaggacaagaagatgcagccggtcaccattgcctcactccaggcctcagtcctccccatggtctccatggtaggagtgcagctttctcccccagttactttccagctccgggctggctcaggacccgtgttcctcagtggccaggaacgttatgaaaaaaaagctggaaaaagaagaagaggaaataagagccagcgttagagacaagagccctgtgaaaaaggccaaagccacagccagagccaagaagccaggattcaagaaatgaggagccacgccttggggggcacggtgcaaagtgggccttccctgggctgtgctgcaggcacagggtgcccctgtccagcccctccacctgtgtctgaatgcaacaggggtgttgcgggggcaacatgagagcccctcacccccaactctccactttcaggaggcccccagtgaagagccccacctcggggtcacaataaagttgcctggtcagga

SEQ ID NO: 161231 - DNA, 1874 bp, Homo sapiens
  Payload ID: 11487
  Gene Symbol: NPM2
  Gene Name: nucleophosmin/nucleoplasmin 2
  Uniprot ID: Q86SE8
  ENST ID: ENST00000397940
  CDS Start-End: 1016-1660
agtgtgctccccgccccctgccgcggcgcctcgcctcccggctcacctccccaccccacctgcccgctgcggctctccgcgggagatctcaccgttctggagacagggctcgctcgctctcacggtaggctggaagaacgggctgtctgggccttaggaaaggcccatgctgtataaggcatggggaaaggaaaggaagaaaggcaacgaacaagaaggagggcttccaactgcagcttcctgccggctgcaggcctcccttcctaagctgagctgaggcttcctctccatgggctggggagggggcgccaggaggcctcggcgggtccgcaattggccgggacagcttctcacgaaaggtcctgggccggcatcatcagcctcacctgggaactggttagaactacaaattccctcggccccacccagaccgacgccaagggcagctgtggagtggggcgcggcaatgcgccccttaacagccctccaggcttcttagcccgggcttggacagccgccttccggccagaggggatgaggttgcgctgcgctccgggagcgccgatggcgtgactggccccgcgcggagcagcgacagtaaggctgtgtggggggagctgggacctaagccgcgcgcacacccctttctctgcgtctggtggaggtgcacagaggcttttgagtcaggcccaagcgcagccaggtgacctccccgcggcctttcaagcctgagctcggtggacagctccctctcccgtgagtcccgctgtcctgtacgcgcccggtcgagccccgggctgcgcaccccgctaggaggtgggtactcgtcctccaggagttgccggtgagcccttgaccgtggcaggtcccctccagccgcgagcgacccctcagtacctgccgatgcctgctggtctctggcatcctccagtcgagggtcagggtcagggagcaaggcctcacgcgggcgccctccttgcagctgcccggccagcccgcttctctgcccggagccatgaatctcagtagcgccagtagcacggaggaaaaggcagtgacgaccgtgctctggggctgcgagctcagtcaggagaggcggacttggaccttcagaccccagctggaggggaagcagagctgcaggctgttgcttcatacgatttgcttgggggagaaagccaaagaggagatgcatcgcgtggagatcctgcccccagcaaaccaggaggacaagaagatgcagccggtcaccattgcctcactccaggcctcagtcctccccatggtctccatggtaggagtgcagctttctcccccagttactttccagctccgggctggctcaggacccgtgttcctcagtggccaggaacgttatgaagcatcagacctaacctgggaggaggaggaggaagaagaaggggaggaggaggaagaggaagaggaagatgatgaggatgaggatgcagatatatctctggaggagcaaagccctgtcaaacaagtcaaaaggctggtgccccagaagcaggcgagcgtggctaagaaaaaaaagctggaaaaagaagaagaggaaataagagccagcgttagagacaagagccctgtgaaaaaggccaaagccacagccagagccaagaagccaggattcaagaaatgaggagccacgccttggggggcacggtgcaaagtgggccttccctgggctgtgctgcaggcacagggtgcccctgtccagcccctccacctgtgtctgaatgcaacaggggtgttgcgggggcaacatgagagcccctcacccccaactctccactttcaggaggcccccagtgaagagccccacctcggggtcacaataaagttgcctggtcagg

SEQ ID NO: 161232 - DNA, 1190 bp, Homo sapiens
  Payload ID: 11487
  Gene Symbol: NPM2
  Gene Name: nucleophosmin/nucleoplasmin 2
  Uniprot ID: Q86SE8
  ENST ID: ENST00000518119
  CDS Start-End: 331-975
agggggcgccaggaggcctcggcgggtccgcaattggccgggacagcttctcacgaaaggtcctgggccggcatcatcagcctcacctgggaactggttagaactacaaattccctcggccccacccagaccgacgccaagggcagctgtggagtggggcgcggcaatgcgccccttaacagccctccaggcttcttagcccgggcttggacagccgccttccggccagaggggatgaggttgcgctgcgctccgggagcgccgatggcgtgactggccccgcgcggagcagcgacactgcccggccagcccgcttctctgcccggagccatgaatctcagtagcgccagtagcacggaggaaaaggcagtgacgaccgtgctctggggctgcgagctcagtcaggagaggcggacttggaccttcagaccccagctggaggggaagcagagctgcaggctgttgcttcatacgatttgcttgggggagaaagccaaagaggagatgcatcgcgtggagatcctgcccccagcaaaccaggaggacaagaagatgcagccggtcaccattgcctcactccaggcctcagtcctccccatggtctccatggtaggagtgcagctttctcccccagttactttccagctccgggctggctcaggacccgtgttcctcagtggccaggaacgttatgaagcatcagacctaacctgggaggaggaggaggaagaagaaggggaggaggaggaagaggaagaggaagatgatgaggatgaggatgcagatatatctctggaggagcaaagccctgtcaaacaagtcaaaaggctggtgccccagaagcaggcgagcgtggctaagaaaaaaaagctggaaaaagaagaagaggaaataagagccagcgttagagacaagagccctgtgaaaaaggccaaagccacagccagagccaagaagccaggattcaagaaatgaggagccacgccttggggggcacggtgcaaagtgggccttccctgggctgtgctgcaggcacagggtgcccctgtccagcccctccacctgtgtctgaatgcaacaggggtgttgcgggggcaacatgagagcccctcacccccaactctccactttcaggaggcccccagtgaagagccccacctcggggtcacaataaagttgcctggtcagga

SEQ ID NO: 161233 - DNA, 565 bp, Homo sapiens
  Payload ID: 11487
  Gene Symbol: NPM2
  Gene Name: nucleophosmin/nucleoplasmin 2
  ENST ID: ENST00000522813
  CDS Start-End: 155-565
gtgctccccgccccctgccgcggcgcctcgcctcccggctcacctccccaccccacctgcccgctgcggctctccgcgggagatctcaccgttctggagacagggctcgctcgctctcacgctgcccggccagcccgcttctctgcccggagccatgaatctcagtagcgccagtagcacggaggaaaaggcagtgacgaccgtgctctggggctgcgagctcagtcaggagaggcggacttggaccttcagaccccagctggaggggaagcagagctgcaggctgttgcttcatacgatttgcttgggggagaaagccaaagaggagatgcatcgcgtggagatcctgcccccagcaaaccaggaggacaagaagatgcagccggtcaccattgcctcactccaggcctcagtcctccccatggtctccatggtaggagtgcagctttctcccccagttactttccagctccgggctggctcaggacccgtgttcctcagtggccaggaacgttatgaagcatcagacctaacctgggaggaggaggaggaagaagaaggggag

SEQ ID NO: 161234 - DNA, 1484 bp, Homo sapiens
  Payload ID: 11487
  Gene Symbol: NPM2
  Gene Name: nucleophosmin/nucleoplasmin 2
  Uniprot ID: Q86SE8
  ENST ID: ENST00000521157
  CDS Start-End: 659-1303
gtgctcctcagtgtgctccccgccccctgccgcggcgcctcgcctcccggctcacctccccaccccacctgcccgctgcggctctccgcgggagatctcaccgttctggagacagggctcgctcgctctcacggcttcttagcccgggcttggacagccgccttccggccagaggggatgaggttgcgctgcgctccgggagcgccgatggcgtgactggccccgcgcggagcagcgacagtaaggctgtgtggggggagctgggacctaagccgcgcgcacacccctttctctgcgtctggtggaggtgcacagaggcttttgagtcaggcccaagcgcagccaggtgacctccccgcggcctttcaagcctgagctcggtggacagctccctctcccgtgagtcccgctgtcctgtacgcgcccggtcgagccccgggctgcgcaccccgctaggaggtgggtactcgtcctccaggagttgccggtgagcccttgaccgtggcaggtcccctccagccgcgagcgacccctcagtacctgccgatgcctgctggtctctggcatcctccagtcgagggtcagggtcagggagcaaggcctcacgcgggcgccctccttgcagctgcccggccagcccgcttctctgcccggagccatgaatctcagtagcgccagtagcacggaggaaaaggcagtgacgaccgtgctctggggctgcgagctcagtcaggagaggcggacttggaccttcagaccccagctggaggggaagcagagctgcaggctgttgcttcatacgatttgcttgggggagaaagccaaagaggagatgcatcgcgtggagatcctgcccccagcaaaccaggaggacaagaagatgcagccggtcaccattgcctcactccaggcctcagtcctccccatggtctccatggtaggagtgcagctttctcccccagttactttccagctccgggctggctcaggacccgtgttcctcagtggccaggaacgttatgaagcatcagacctaacctgggaggaggaggaggaagaagaaggggaggaggaggaagaggaagaggaagatgatgaggatgaggatgcagatatatctctggaggagcaaagccctgtcaaacaagtcaaaaggctggtgccccagaagcaggcgagcgtggctaagaaaaaaaagctggaaaaagaagaagaggaaataagagccagcgttagagacaagagccctgtgaaaaaggccaaagccacagccagagccaagaagccaggattcaagaaatgaggagccacgccttggggggcacggtgcaaagtgggccttccctgggctgtgctgcaggcacagggtgcccctgtccagcccctccacctgtgtctgaatgcaacaggggtgttgcgggggcaacatgagagcccctcacccccaactctccactttcaggaggcccccagtgaagagcccc

SEQ ID NO: 161235 - DNA, 570 bp, Homo sapiens
  Payload ID: 11487
  Gene Symbol: NPM2
  Gene Name: nucleophosmin/nucleoplasmin 2
  ENST ID: ENST00000520125
  CDS Start-End: 274-570
gtgctcctcagtgtgctccccgccccctgccgcggcgcctcgcctcccggctcacctccccaccccacctgcccgctgcggctctccgcgggagatctcaccgttctggagacagggctcgctcgctctcacggcttcttagcccgggcttggacagccgccttccggccagaggggatgaggttgcgctgcgctccgggagcgccgatggcgtgactggccccgcgcggagcagcgacactgcccggccagcccgcttctctgcccggagccatgaatctcagtagcgccagtagcacggaggaaaaggcagtgacgaccgtgctctggggctgcgagctcagtcaggagaggcggacttggaccttcagaccccagctggaggggaagcagagctgcaggctgttgcttcatacgatttgcttgggggagaaagccaaagaggagatgcatcgcgtggagatcctgcccccagcaaaccaggaggacaagaagatgcagccggtcaccattgcctcactccaggcctcagtcctccccatggtctccatggtaggagtgcagctttct

SEQ ID NO: 161236 - DNA, 411 bp, Homo sapiens
  Payload ID: 11487
  Gene Symbol: NPM2
  Gene Name: nucleophosmin/nucleoplasmin 2
  Uniprot ID: Q86SE8
  ENST ID: ENST00000615914
  CDS Start-End: 1-411
atgaatctcagtagcgccagtagcacggaggaaaaggcagtgacgaccgtgctctggggctgcgagctcagtcaggagaggcggacttggaccttcagaccccagctggaggggaagcagagctgcaggctgttgcttcatacgatttgcttgggggagaaagccaaagaggagatgcatcgcgtggagatcctgcccccagcaaaccaggaggacaagaagatgcagccggtcaccattgcctcactccaggcctcagtcctccccatggtctccatggtaggagtgcagctttctcccccagttactttccagctccgggctggctcaggacccgtgttcctcagtggccaggaacgttatgaaaaaaaagctggaaaaagaagaagaggaaataagagccagcgttag

SEQ ID NO: 161237 - DNA, 645 bp, Homo sapiens
  Payload ID: 11487
  Gene Symbol: NPM2
  Gene Name: nucleophosmin/nucleoplasmin 2
  Uniprot ID: Q86SE8
  ENST ID: ENST00000621538
  CDS Start-End: 1-645
atgaatctcagtagcgccagtagcacggaggaaaaggcagtgacgaccgtgctctggggctgcgagctcagtcaggagaggcggacttggaccttcagaccccagctggaggggaagcagagctgcaggctgttgcttcatacgatttgcttgggggagaaagccaaagaggagatgcatcgcgtggagatcctgcccccagcaaaccaggaggacaagaagatgcagccggtcaccattgcctcactccaggcctcagtcctccccatggtctccatggtaggagtgcagctttctcccccagttactttccagctccgggctggctcaggacccgtgttcctcagtggccaggaacgttatgaagcatcagacctaacctgggaggaggaggaggaagaagaaggggaggaggaggaagaggaagaggaagatgatgaggatgaggatgcagatatatctctggaggagcaaagccctgtcaaacaagtcaaaaggctggtgccccagaagcaggcgagcgtggctaagaaaaaaaagctggaaaaagaagaagaggaaataagagccagcgttagagacaagagccctgtgaaaaaggccaaagccacagccagagccaagaagccaggattcaagaaatga

SEQ ID NO: 161238 - DNA, 877 bp, Homo sapiens
  Payload ID: 11488
  Gene Symbol: NPM3
  Gene Name: nucleophosmin/nucleoplasmin 3
  Uniprot ID: O75607
  ENST ID: ENST00000370110
  CDS Start-End: 24-560
agtttgaagaaggctcttacagcatggccgccggtactgcagctgccttagcgtttttgagtcaggagagccgaacgcgggccgggggtgtcgggggcctacgggtcccggccccggtcactatggacagttttttcttcggctgtgagctctccggccacacccgctccttcacctttaaggtagaggaagaggatgatgcggagcacgtgctggcactaaccatgctctgcctcaccgagggagccaaagacgagtgtaatgtggtagaagttgtggcccggaaccatgaccatcaggagatcgcagtccctgtggccaacctcaagctgtcctgccaacccatgctcagtctggatgacttccagctccaaccacctgtaaccttccgcctgaagtcgggctctggccctgtgcggatcactgggcggcaccagattgttacgatgagcaatgatgtttctgaggaggagagcgaggaagaggaagaggacagtgatgaggaagaagttgagctgtgccccatccttcctgccaaaaagcaggggggcaggccctagccctcctaggtcagctccatgtgccatgcaccgccatgcaccctgttccctgacaagtttcaacaattgtaaatatttcttccttgaagaggagagcttgggtgggggttgggtgggagggacttgggtctttggtgctaggagagggcctgtgctccacacagccgtggttttctgattttcaccatgcccggggcctcccttcccacctgcctgtgagaattggaggttagtgcctgaagctcagagctacacatttttaatagtttttacatttttggataaaggttgaaataaagtggtgtggagtttttgca

SEQ ID NO: 161239 - DNA, 6457 bp, Homo sapiens
  Payload ID: 11489
  Gene Symbol: NUP107
  Gene Name: nucleoporin 107kDa
  Uniprot ID: P57740
  ENST ID: ENST00000229179
  CDS Start-End: 333-3110
tacttcattcttcccagtaggagaacccagggcctgttccacgcccacagactttggtcaggcaaagcggccgcagggcgtctgggctaaacgcaaccaggaacacattggcaaacttttgcgcctgcgcccaccgggcgtgcacctgtaggctgaagtcgcgcatgcgctagatgggaacgttgtttcttctcccctaccccttttctgtgggtctgttttagggacagactgcttccgggtcgaagggcttgcttccggagagcgggaaggctaaaacgcggtagctaaactgcagccaactttggttgtgtgtggaaaaggctttagccatggacaggagtggctttggagagatatcatcccctgtaatccgggaggcagaggtgacacggactgcacggaaacagagtgctcagaaaagagttttacttcaggcatctcaagatgaaaattttggtaatactacaccaagaaaccaggttatccctcgaactcctagctcatttcgacagccttttaccccaacaagccgaagcttactaaggcagccagatatttcctgcattcttggaacaggagggaagtcgccccgacttacgcagtcttcagggttctttggaaatctctccatggttactaatctggatgacagtaactgggcagctgcattttcatcacagcgttccgggctgttcacaaacacagagccccacagtataacagaagatgtaactatcagtgctgttatgttacgtgaggatgatcctggagaagctgcatccatgagtatgttttctgatttcctgcagtcttttctgaagcactcttcgagtacagtttttgatcttgtggaagagtatgaaaacatctgtggtagtcaggtgaatatactgagtaaaatagtgagtcgagcaacacctggacttcaaaaattttcaaaaacagccagtatgctctggcttcttcaacaggagatggtcacatggaggctgctggcttctttgtatagagacagaatacagtctgcattagaagaggaaagtgtattcgcagttactgctgttaatgccagtgaaaaaacagttgtggaagcgttatttcagagggattcacttgttcgacaaagtcagctggtggtagattggttagagagtattgccaaagatgaaattggagaattttctgataatattgagttttatgcaaaatcagtatattgggaaaatactctgcataccttaaaacaacggcagctgacttcttacgttggaagtgttcgtccgcttgtcactgaattggaccctgatgctcccataagacagaaaatgccccttgatgatctggatagagaagatgaagttagattactcaaatatctctttactctaatccgtgctggaatgacagaagaggcacaacgactctgtaaacgctgtggtcaagcatggagagctgcaacacttgaaggctggaaactgtaccatgaccctaatgttaatggaggaacagaattagaacctgttgaagggaatccatatagacgcatttggaaaataagttgctggagaatggcagaagatgagctttttaatagatacgagagagcaatttatgcagctttaagtgggaatcttaagcagctgcttcctgtctgtgacacctgggaagacacagtttgggcctacttccgggtgatggtggacagtctggtagaacaggagatccagacatcagtagcaactctggatgaaactgaagaactccctagagaatatctgggagcaaactggacgttagaaaaggtttttgaggaacttcaagctactgacaaaaagagagttctggaagagaatcaagaacattatcatatagttcaaaagtttcttatcctgggagacattgatggtttgatggatgagtttagcaaatggctttccaaaagcagaaacaatctacctggacacctgcttcgctttatgactcaccttattttgtttttccgtactctgggactacagaccaaggaggaagtttctattgaagttttaaagacatacatacagcttttaataagagagaaacatacaaatcttatagcattttatacctgtcatttgcctcaagacctagctgttgcccagtatgcattatttttggaaagtgttacagaatttgaacagcgccaccattgcctggagttggctaaagaagcagatttggatgttgcaacaataacaaaaactgtagttgagaatattcgaaagaaagataatggtgaatttagtcatcatgacctggccccagccctagatactggcactactgaggaggatcgtttaaaaattgatgtaattgactggttggtatttgacccagcgcagagggcagaagcactgaaacaaggcaatgcaattatgagaaaattcttggcatcaaaaaagcacgaagctgcaaaagaagtatttgtgaaaattcctcaggattctatagcagaaatctataatcagtgcgaggaacaaggaatggaaagtccacttcctgctgaagatgataatgctatccgagaacatttgtgcatcagagcttatttggaagcccatgaaacctttaatgagtggtttaagcatatgaattcagttccacaaaaacctgctttgatacctcaaccaacttttactgagaaagtggctcatgaacacaaagaaaagaaatatgaaatggattttggtatttggaaagggcatttggatgccctaactgctgatgtgaaggagaaaatgtataacgtcttgttgtttgttgatggagggtggatggtggatgttagagaggatgccaaagaagaccatgaaagaacacatcaaatggtcttactgagaaagctttgtctgccaatgttgtgttttctgcttcatacgatattgcacagtactggtcagtatcaggaatgcctacagttagcagatatggtatcctctgagcgccacaaactgtacctggtattttctaaggaagagctaaggaagttgctgcagaagctcagagagtcctctctaatgctcctagaccagggacttgacccattagggtatgaaattcagttatagtttaatctttgtaatctcactaattttcatgataaatgaagtttttaataaaatatacttgttattagtaattttttcttttgcattaccatgtaaaatttagacatttgaattttgtacttttcagaatattatcgtgacactttcaacatgtagggatatcagcgtttctctgtgtgcttgttaataaaactatataaaaattaaaattttctgtttttacaaattccagggttgtctctttttcatgtaataagaaaattaaattttctgttctagttttttctgtaatcataagcattctgatattttaaaatcataaagatgatggaaagtagatttatttttaagccaggtacgtaattttttatttatcataaaatttagtatttttgaatattaaaattaagaagatgactataacaagaatttttctaacataacatgctattattattttagttattttgaagacatttctagtttaactttcatttagcaaacttcctatcaaaataagagcatataaagacttagcgtagtacctggcacacagtaagcactgaatatattggagattacagatcccgctcttctaataggggaaataccataagtacatttaaaaggtgtcatttaaaaatacaagtagtggctgggtgcagtggctcacgtctgtaaccccagcacttcgggaggccgaggcaggtggatcacctgtcgtcaggagtttgagaccagcctggccaacatggtgaaaccctgtctctactaaaaaaatacaaaaattagccgggcatggtggcaggtgcctgtaatcccagctactcaggggaggctgaggcatgagaatctcttgaacctggaaggcagaggttgcagtgagccgagatcacgccactgcactccagccttggggacagagcgagacactgtctccaaaaaaagaaagaattacaagtagtctgagcaggaagaacctctctccagctgaaaagactctcaggaagtagtattggtttggggtttgagtaatgcactgaatttgcaaaggcaaagagtgacacaagaaggatgaggctctatagattaagaaatcagtatgagcaagaaatgataaatgctgggcattattatgaaccaacaaatacaccaaataggctagagtgtagggcttataaacaggagacaactaaaagaatgtgattctaatagaaaacagtaattccccaaacttgctaatcatctaaggaatttcttgaatatgtatttatagatgccacccctagagacagctggcttgggaagcctgagatgggatcatagaatttgatcagttctatattatgtgctttttttgttttatttctctaaagaattcatcttgtcttcctgttttctttattcttactaatatgcaaatgatttttacagctcatgcagtcctgtaatcatgattattgctatgctactttgcaaaaaataaaaacaaaaaattcataccaaaacaaatacagactagatttggggtggggaggggaaataagtgagtcttaaaagtagttttgttacttgcaacaaactgtatatatagaaactttgtacaacccagggtgactatttccaaagactgttacctatttgttgaacaacagtgggaaaactacttagcctaaatgaggaggaggaatattgtatgcttccatcgtaaccgtatgtgggtaaatggacaaggtctgtcatctatttaggaacttgttttgcatgtcccccactctgtatttgtcttttgttgtgccttgttttttgaatgtcctttaaaaaacacagcacagaaacccactaaggttgtggaattacaaaattccttcaaccttagactcttaattaggatgccctcaaatggacttgtttttaatttttatttatttatttatttttgagacatggtcttgctctgtctcccaggccggagtgcagtggcatgatatctcactgcaaacctccgcctcctgggttcaagcgattctcctgcctcagcctccctagtagctgggattacaggcgcctgccaccacgcctggctaatttttgtatttttagtagagacggggttttgccatgttggccaggctggtctcaaactcttgacctcaagtgatccactcgcctcgatctctcaaagtgctgggattacaggcataagccactgcacccagccaattggactcctttgagtccttagggagtcaatgtgtgtgttgctgcttatttaaatacagttcagttggagccccaagagtgccaatgtgctcctcacaattcccaaatgcctctcttcctgaacaccagaagtggtgggcacctgagtgggaaatttcaggcaacttaatttagttcctcagtgcctactcttgaagaactgggttttcattctagagaggaaactcagggaagggcgtgttgcctatcacaggttcgcatactaagttttaaaaacttttcttggtgtgacttatgccaaggaattatgaagactttttccttgagcattgcatgaaggctacaaagttggaacaggcatgtcctgggtgtgaaagttttaatttccctacctcatttatttatttaatttagagatgggggtctcactatgttgcccatcccggcttccaactcctgggctcaagcaatcctcccacgtcagtctctcaaatagctgggactacaggcccacgccaccatgccctacttcctcatttattttaaattttttgtaccacagtctctctttttaattttatgactgctgaattaatcctagactctgtcttaaaactaagaattgatgtattggcaggaacagctggacattcaagatgtttttgtgattccttttttaaaaatctccttttgtacctgtaatatctacaatatataatctttctttatcgacttaaggaggaaggagaaaggaagaacctgacttctgtgtgaaggaccttactgtcgatcaagactgttactcaaagttctatctcttagtcattgcacctgacctgatccaaaacatatatatatatttgtatgcacccctagagacagctgtatatatatacggttttgccaggttgtacgtttttttctcgagttgtaagtgaacacagtagcactcgtttacattgtcaaggggacatctttagagaacacattttctcactgttgagctaataatgctttgtgaatgtatgatctaaggagaaacccttgtagttatacccgatgatgctgtctgttggaaagtaaattttgaatgtctttttccaaaaataaaaaataaaaacatg

SEQ ID NO: 161240 - DNA, 2859 bp, Homo sapiens
  Payload ID: 11489
  Gene Symbol: NUP107
  Gene Name: nucleoporin 107kDa
  Uniprot ID: P57740
  ENST ID: ENST00000378905
  CDS Start-End: 569-2629
gttttagggacagactgcttccgggtcgaagggcttgcttccggagagcgggaaggctaaaacgcggtagctaaactgcagccaactttggttgtgtgtggaaaaggctttagccatggacaggagtggctttggagagatatcatcccctgtaatccgggaggcagaggtgacacggactgcacggaaacagagtgctcagaaaagagttttacttcaggcatctcaagatgaaaattttggtaatactacaccaagaaaccaggttatccctcgaactcctagctcatttcgacagccttttaccccaacaagccgaagcttactaaggcagccagatatttcctgcattcttggaacaggagggaagtcgccccgacttacgcagtcttcagggttctttggaaatctctccatggttactaatctggatgacagtaactgggcagctgcattttcatcacagcgttccgggctgttcacaaacacagagccccacagtataacagaagatgtaactatcagtgctgttatgttacgtgaggatgatcctggagaagctgcatccatgagtatgttttctgatttcctgcagtcttttctgaagcactcttcgagtacagtttttgatcttgtggaagagtatgaaaacatctgtggtagtcaggtgaatatactgagtaaaatagtgagtcgagcaacacctggacttcaaaaattttcaaaaacagccagtatgctctggcttcttcaacaggagatggtcacatggaggctgctggcttctttgtatagagacagaatacagtctgcattagaagaggaaagtgtattcgcagttactgctgttaatgccagtgaaaaaacagttgtggaagcgttatttcagagggattcacttgttcgacaaagtcagctggtggtagattggttagagagtattgccaaagatgaaattggagaattttctgataatattgagttttatgcaaaatcagtatattgggaaaatactctgcataccttaaaacaacggcagctgacttcttacgttggaagtgttcgtccgcttgtcactgaattggaccctgatgctcccataagacagaaaatgccccttgatgatctggatagagaagatgaagttagattactcaaatatctctttactctaatccgtgctggaatgacagaagaggcacaacgactctgtaaacgctgtggtcaagcatggagagctgcaacacttgaaggctggaaactgtaccatgaccctaatgttaatggaggaacagaattagaacctgttgaagggaatccatatagacgcatttggaaaataagttgctggagaatggcagaagatgagctttttaatagatacgagagagcaatttatgcagctttaagtgggaatcttaagcagctgcttcctgtctgtgacacctgggaagacacagtttgggcctacttccgggtgatggtggacagtctggtagaacaggagatccagacatcagtagcaactctggatgaaactgaagaactccctagagaatatctgggagcaaactggacgttagaaaaggtttttgaggaacttcaagctactgacaaaaagagagttctggaagagaatcaagaacattatcatatagttcaaaagtttcttatcctgggagacattgatggtttgatggatgagtttagcaaatggctttccaaaagcagaaacaatctacctggacacctgcttcgctttatgactcaccttattttgtttttccgtactctgggactacagaccaaggaggaagtttctattgaagttttaaagacatacatacaggaggatcgtttaaaaattgatgtaattgactggttggtatttgacccagcgcagagggcagaagcactgaaacaaggcaatgcaattatgagaaaattcttggcatcaaaaaagcacgaagctgcaaaagaagtatttgtgaaaattcctcaggattctatagcagaaatctataatcagtgcgaggaacaaggaatggaaagtccacttcctgctgaagatgataatgctatccgagaacatttgtgcatcagagcttatttggaagcccatgaaacctttaatgagtggtttaagcatatgaattcagttccacaaaaacctgctttgatacctcaaccaacttttactgagaaagtggctcatgaacacaaagaaaagaaatatgaaatggattttggtatttggaaagggcatttggatgccctaactgctgatgtgaaggagaaaatgtataacgtcttgttgtttgttgatggagggtggatggtggatgttagagaggatgccaaagaagaccatgaaagaacacatcaaatggtcttactgagaaagctttgtctgccaatgttgtgttttctgcttcatacgatattgcacagtactggtcagtatcaggaatgcctacagttagcagatatggtatcctctgagcgccacaaactgtacctggtattttctaaggaagagctaaggaagttgctgcagaagctcagagagtcctctctaatgctcctagaccagggacttgacccattagggtatgaaattcagttatagtttaatctttgtaatctcactaattttcatgataaatgaagtttttaataaaatatacttgttattagtaattttttcttttgcattaccatgtaaaatttagacatttgaattttgtacttttcagaatattatcgtgacactttcaacatgtagggatatcagcgtttctctgtgtgcttgttaataaaactatataaaaattaaaattttctgtttttacaaattcc

SEQ ID NO: 161241 - DNA, 678 bp, Homo sapiens
  Payload ID: 11489
  Gene Symbol: NUP107
  Gene Name: nucleoporin 107kDa
  ENST ID: ENST00000538549
  CDS Start-End: 423-678
agcatcagattctgagttccctctatgatctgggtactgtgctagccgcctacaacaaagatcagttattcaagatccttcccctcggggaattagttgtgtaatggagacaaccaagcagtgtaaagtggagtggctttggagagatatcatcccctgtaatccgggaggcagaggtgacacggactgcacggaaacagagtgctcagaaaagagttttacttcaggcatctcaagatgaaaattttggtaatactacaccaagaaaccaggttatccctcgaactcctagctcatttcgacagccttttaccccaacaagccgaagcttactaaggcagccagatatttcctgcattcttggaacaggagggaagtcgccccgacttacgcagtcttcagggttctttggaaatctctccatggttactaatctggatgacagtaactgggcagctgcattttcatcacagcgttccgggctgttcacaaacacagagccccacagtataacagaagatgtaactatcagtgctgttatgttacgtgaggatgatcctggagaagctgcatccatgagtatgttttctgatttcctgcagtcttttctgaagcactcttcgagtacagtttttgatcttgtggaagagtatgaaaacatctgtggtagtcaggtaa

SEQ ID NO: 161242 - DNA, 836 bp, Homo sapiens
  Payload ID: 11489
  Gene Symbol: NUP107
  Gene Name: nucleoporin 107kDa
  ENST ID: ENST00000538993
  CDS Start-End: 1-243
gagagagcaatttatgcagctttaagtgggaatcttaagcagctgcttcctgtctgtgacacctgggaagacacagtttgggcctacttccgggtgatggtggacagtctggtagaacaggagatccagacatcagtagcaactctggatgaaactgaagaactccctagagaatatctgggagcaaactggacgttagaaaaggtttttgaggaacttcaagctactgacaaaaaggtttgatggatgagtttagcaaatggctttccaaaagcagaaacaatctacctggacacctgcttcgctttatgactcaccttattttgtttttccgtactctgggactacagaccaaggaggaagtttctattgaagttttaaagacatacatacagcttttaataagagagaaacatacaaatcttatagcattttatacctgtcatttgcctcaagacctagctgttgcccagtatgcattatttttggaaagtgttacagaatttgaacagcgccaccattgcctggagttggctaaagaagcagatttggatgttgcaacaataacaaaaactgtagttgagaatattcgaaagaaagataatggtgaatttagtcatcatgacctggccccagccctagatactggcactactgaggaggatcgtttaaaaattgatgtaattgactggttggtatttgacccagcgcagagggcagaagcactgaaacaaggcaatgcaattatgagaaaattcttggcatcaaaaaagcacgaagctgcaaaagaagtatttgtgaaaattcctcaggattctatagcagaaatctataat

SEQ ID NO: 161243 - DNA, 3004 bp, Homo sapiens
  Payload ID: 11489
  Gene Symbol: NUP107
  Gene Name: nucleoporin 107kDa
  Uniprot ID: P57740
  ENST ID: ENST00000539906
  CDS Start-End: 245-2935
aagtgccagcatcagattctgagttccctctatgatctgggtactgtgctagccgcctacaacaaagatcagttattcaagatccttcccctcggggaattagttgtgtaatggagacaaccaagcagtgtaaagtggagtggctttggagagatatcatcccctgtaatccgggaggcagaggtgacacggactgcacggaaacagagtgctcagaaaagagttttacttcaggcatctcaagatgaaaattttggtaatactacaccaagaaaccaggttatccctcgaactcctagctcatttcgacagccttgttctttctaccaaccttttgtttatagttaccccaacaagccgaagcttactaaggcagccagatatttcctgcattcttggaacaggagggaagtcgccccgacttacgcagtcttcagggttctttggaaatctctccatggttactaatctggatgacagtaactgggcagctgcattttcatcacagcgttccgggctgttcacaaacacagagccccacagtataacagaagatgtaactatcagtgctgttatgttacgtgaggatgatcctggagaagctgcatccatgagtatgttttctgatttcctgcagtcttttctgaagcactcttcgagtacagtttttgatcttgtggaagagtatgaaaacatctgtggtagtcaggtgaatatactgagtaaaatagtgagtcgagcaacacctggacttcaaaaattttcaaaaacagccagtatgctctggcttcttcaacaggagatggtcacatggaggctgctggcttctttgtatagagacagaatacagtctgcattagaagaggaaagtgtattcgcagttactgctgttaatgccagtgaaaaaacagttgtggaagcgttatttcagagggattcacttgttcgacaaagtcagctggtggtagattggttagagagtattgccaaagatgaaattggagaattttctgataatattgagttttatgcaaaatcagtatattgggaaaatactctgcataccttaaaacaacggcagctgacttcttacgttggaagtgttcgtccgcttgtcactgaattggaccctgatgctcccataagacagaaaatgccccttgatgatctggatagagaagatgaagttagattactcaaatatctctttactctaatccgtgctggaatgacagaagaggcacaacgactctgtaaacgctgtggtcaagcatggagagctgcaacacttgaaggctggaaactgtaccatgaccctaatgttaatggaggaacagaattagaacctgttgaagggaatccatatagacgcatttggaaaataagttgctggagaatggcagaagatgagctttttaatagatacgagagagcaatttatgcagctttaagtgggaatcttaagcagctgcttcctgtctgtgacacctgggaagacacagtttgggcctacttccgggtgatggtggacagtctggtagaacaggagatccagacatcagtagcaactctggatgaaactgaagaactccctagagaatatctgggagcaaactggacgttagaaaaggtttttgaggaacttcaagctactgacaaaaagagagttctggaagagaatcaagaacattatcatatagttcaaaagtttcttatcctgggagacattgatggtttgatggatgagtttagcaaatggctttccaaaagcagaaacaatctacctggacacctgcttcgctttatgactcaccttattttgtttttccgtactctgggactacagaccaaggaggaagtttctattgaagttttaaagacatacatacagcttttaataagagagaaacatacaaatcttatagcattttatacctgtcatttgcctcaagacctagctgttgcccagtatgcattatttttggaaagtgttacagaatttgaacagcgccaccattgcctggagttggctaaagaagcagatttggatgttgcaacaataacaaaaactgtagttgagaatattcgaaagaaagataatggtgaatttagtcatcatgacctggccccagccctagatactggcactactgaggaggatcgtttaaaaattgatgtaattgactggttggtatttgacccagcgcagagggcagaagcactgaaacaaggcaatgcaattatgagaaaattcttggcatcaaaaaagcacgaagctgcaaaagaagtatttgtgaaaattcctcaggattctatagcagaaatctataatcagtgcgaggaacaaggaatggaaagtccacttcctgctgaagatgataatgctatccgagaacatttgtgcatcagagcttatttggaagcccatgaaacctttaatgagtggtttaagcatatgaattcagttccacaaaaacctgctttgatacctcaaccaacttttactgagaaagtggctcatgaacacaaagaaaagaaatatgaaatggattttggtatttggaaagggcatttggatgccctaactgctgatgtgaaggagaaaatgtataacgtcttgttgtttgttgatggagggtggatggtggatgttagagaggatgccaaagaagaccatgaaagaacacatcaaatggtcttactgagaaagctttgtctgccaatgttgtgttttctgcttcatacgatattgcacagtactggtcagtatcaggaatgcctacagttagcagatatggtatcctctgagcgccacaaactgtacctggtattttctaaggaagagctaaggaagttgctgcagaagctcagagagtcctctctaatgctcctagaccagggacttgacccattagggtatgaaattcagttatagtttaatctttgtaatctcactaattttcatgataaatgaagtttttaataaaatatacttgttattagt

SEQ ID NO: 161244 - DNA, 2655 bp, Homo sapiens
  Payload ID: 11489
  Gene Symbol: NUP107
  Gene Name: nucleoporin 107kDa
  ENST ID: ENST00000535718
  CDS Start-End: 61-372
gctaaaacgcggtagctaaactgcagccaactttggttgtgtgtggaaaaggctttagccatggacaggagtggctttggagagatatcatcccctgtaatccgggaggcagaggtgacacggactgcacggaaacagagtgctcagaaaagagttttacttcaggcatctcaagatgaaaattttggtaatactacaccaagaaaccaggttatccctcgaactcctagctcatttcgacagccttttaccccaacaagccgaagcttactaaggcagccagatatttcctgcattcttggaacaggagggaagtcgccccgacttacgcagtcttcagggttctttggaaatctctccatgcatccatgagtatgttttctgatttcctgcagtcttttctgaagcactcttcgagtacagtttttgatcttgtggaagagtatgaaaacatctgtggtagtcaggtgaatatactgagtaaaatagtgagtcgagcaacacctggacttcaaaaattttcaaaaacagccagtatgctctggcttcttcaacaggagatggtcacatggaggctgctggcttctttgtatagagacagaatacagtctgcattagaagaggaaagtgtattcgcagttactgctgttaatgccagtgaaaaaacagttgtggaagcgttatttcagagggattcacttgttcgacaaagtcagctggtggtagattggttagagagtattgccaaagatgaaattggagaattttctgataatattgagttttatgcaaaatcagtatattgggaaaatactctgcataccttaaaacaacggcagctgacttcttacgttggaagtgttcgtccgcttgtcactgaattggaccctgatgctcccataagacagaaaatgccccttgatgatctggatagagaagatgaagttagattactcaaatatctctttactctaatccgtgctggaatgacagaagaggcacaacgactctgtaaacgctgtggtcaagcatggagagctgcaacacttgaaggctggaaactgtaccatgaccctaatgttaatggaggaacagaattagaacctgttgaagggaatccatatagacgcatttggaaaataagttgctggagaatggcagaagatgagctttttaatagatacgagagagcaatttatgcagctttaagtgggaatcttaagcagctgcttcctgtctgtgacacctgggaagacacagtttgggcctacttccgggtgatggtggacagtctggtagaacaggagatccagacatcagtagcaactctggatgaaactgaagaactccctagagaatatctgggagcaaactggacgttagaaaaggtttttgaggaacttcaagctactgacaaaaagagagttctggaagagaatcaagaacattatcatatagttcaaaagtttcttatcctgggagacattgatggtttgatggatgagtttagcaaatggctttccaaaagcagaaacaatctacctggacacctgcttcgctttatgactcaccttattttgtttttccgtactctgggactacagaccaaggaggaagtttctattgaagttttaaagacatacatacaggaggatcgtttaaaaattgatgtaattgactggttggtatttgacccagcgcagagggcagaagcactgaaacaaggcaatgcaattatgagaaaattcttggcatcaaaaaagcacgaagctgcaaaagaagtatttgtgaaaattcctcaggattctatagcagaaatctataatcagtgcgaggaacaaggaatggaaagtccacttcctgctgaagatgataatgctatccgagaacatttgtgcatcagagcttatttggaagcccatgaaacctttaatgagtggtttaagcatatgaattcagttccacaaaaacctgctttgatacctcaaccaacttttactgagaaagtggctcatgaacacaaagaaaagaaatatgaaatggattttggtatttggaaagggcatttggatgccctaactgctgatgtgaaggagaaaatgtataacgtcttgttgtttgttgatggagggtggatggtggatgttagagaggatgccaaagaagaccatgaaagaacacatcaaatggtcttactgagaaagctttgtctgccaatgttgtgttttctgcttcatacgatattgcacagtactggtcagtatcaggaatgcctacagttagcagatatggtatcctctgagcgccacaaactgtacctggtattttctaaggaagagctaaggaagttgctgcagaagctcagagagtcctctctaatgctcctagaccagggacttgacccattagggtatgaaattcagttatagtttaatctttgtaatctcactaattttcatgataaatgaagtttttaataaaatatacttgttattagtaattttttcttttgcattaccatgtaaaatttagacatttgaattttgtacttttcagaatattatcgtgacactttcaacatgtagggatatcagcgtttctctgtgtgcttgttaataaaactatataaaaattaaaattttctgtttttacaaa

SEQ ID NO: 161245 - DNA, 5207 bp, Homo sapiens
  Payload ID: 11490
  Gene Symbol: NUP133
  Gene Name: nucleoporin 133kDa
  Uniprot ID: Q8WUM0
  ENST ID: ENST00000261396
  CDS Start-End: 93-3563
ctcttcccttaggtgtttaagttccgcgcgcaggccaggctgcaacctgacggccagatccctcgctgtcctagtcgctgctccttggagtcatgttcccagccgccccttctccgcggaccccgggtaccgggtcccgaaggggcccgctggccggactcgggcccggctccacgccccggacggctagcaggaagggtctgcccctggggtctgcagtcagctccccagtgctcttctcgccggtcggccggcgtagctcgctaagctcgcggggaacaccaacacgaatgttcccacaccactccataactgagtctgtgaactatgatgtgaaaacgtttggatcttctcttcctgttaaagtcatggaagccctaacattggctgaagtcgatgaccagctgaccattaacatagatgaaggtggatgggcttgtctggtgtgcaaagagaagctcattatttggaagattgctctgtcacctattactaagttatccgtttgcaaagaacttcagctgccacctagtgatttccactggagtgccgacttagtggctctttcttactcttctccctcaggtgaagcacattctactcaggctgttgctgtcatggttgccaccagagaaggatctatccgctattggccaagccttgctggtgaagatacctacacagaggcttttgtagattcgggaggtgataagacttacagtttcctaacagcagtgcagggaggaagttttattttgtcttcatcaggaagccaactaattcggttgatacctgagagctcaggaaagattcatcagcatatcctgcctcaggggcaaggcatgctttcaggaattggtcgaaaagtttcttctctttttggaattttatctcctagtagtgatctcacactttcaagtgttctctgggatagagagagatcaagcttttatagcctgacgagttcaaacatcagtaaatgggaattagatgattcttcagaaaagcatgcatacagttgggatataaatagagccctgaaggaaaacattaccgatgctatttggggatctgaaagtaactatgaagctattaaagaaggagtcaacattcgatatttggacttgaagcaaaactgtgatgggctggtgattttggcagcagcatggcactcagcagacaatccatgtctcatctattactctctgataacaatagaagataatggttgccaaatgtcagatgcagttactgtagaagtcactcaatataatccaccttttcagtctgaagacctgattttgtgtcagttgacggtcccaaacttttcaaaccagactgcctatctgtataacgaaagtgctgtctatgtgtgctccacaggaactgggaaattttctcttccccaggagaaaattgtctttaatgcacaaggagatagtgttttaggtgctggtgcctgtggtggtgttcctatcattttttctagaaacagtggactggtgtctattacttcaagggaaaatgtgtctatattggcagaagacttggaagggtctttagcatcttcagttgctggaccaaacagtgagagtatgatttttgagaccactacaaagaatgaaactatagcccaggaagataaaatcaagttgctgaaagctgcctttctgcaatactgcagaaaagatttaggtcatgctcaaatggtggttgatgagctcttttcctctcactctgatttggattctgattctgaactagacagggcagttacccaaatcagtgtagacctgatggatgactacccagcatctgacccacggtgggctgagtctgtccctgaggaagcacctgggttcagcaatacgtcactgattatccttcaccagctagaagacaagatgaaagctcactcttttcttatggactttattcatcaagttggcttatttggacgtctaggcagttttccagttagagggacaccgatggccactcgactgttgctctgtgagcatgccgaaaagctgtcagccgccattgttctcaagaaccaccactcccggctttctgaccttgtcaacacagccatattgattgctttgaacaagagggagtatgaaatcccatccaacctgactcctgcagatgtctttttcagggaggtatcccaagtagataccatctgtgagtgcttactggagcatgaggagcaagtcttgagggatgcacctatggattccattgaatgggctgaagtggtgatcaatgtgaacaatattctcaaggatatgctgcaggctgctagtcattatcgccaaaatagaaactctttgtatagaagagaagaatcactagaaaaagaacctgaatatgttccatggacggcaacaagtggtcctggtggcatccgaacggtaataatacgccagcatgagattgtcctgaaggtggcttatccacaggcagacagcaacctccgaaacatcgtgaccgagcagctggtagccctgatcgattgcttcctggatggttatgtttctcagcttaagtctgtggataaatccagtaatcgggaaagatatgacaatctggagatggaatacctacagaaaagatcagatctcttatctcctcttctttcactaggccagtacctgtgggctgcttctctagcagagaaatactgtgactttgatatattggtacaaatgtgtgagcagactgacaaccagagccgactccagcgctacatgacccagtttgctgatcagaatttttcagactttctcttccgttggtatctggagaaaggaaagcgaggcaaattattatctcagcccatttctcagcatggacagttggcaaattttttgcaagctcatgaacatctcagctggttacatgaaattaatagccaagaattagaaaaggctcatgcaacacttctgggtttggcaaatatggaaactcgttactttgcaaagaagaaaacccttcttggcttgagtaaattggctgcattagcttcagacttttcagaggatatgctacaagaaaaaattgaagaaatggctgagcaggagcgctttctactgcatcaggagaccctacctgaacagctgctggcggagaaacagctaaatctcagtgcgatgccagtattgactgcaccacaactcattggtctatatatctgtgaagaaaatagaagagctaatgaatatgatttcaagaaagctttggacttgttggaatatattgatgaggaagaagatataaatataaatgatctaaaactggaaatcctttgcaaagctcttcagagagataactggtccagttctgatggcaaagatgatccaattgaagtatctaaagacagtatatttgtgaagatcttacagaaacttttaaaagatggcattcagctcagtgagtacttaccggaggtgaaagacctgctacaagcggatcagcttggaagcttaaagtccaatccttacttcgagtttgttttgaaagcaaattatgaatattatgttcagggacaaatataactttttctaaaaatggccattgtttatgaaatctgtataagtgtgtccttatacaaattttaggccataaacaagtgtaagtttgtacaatttcataacatgtatagctgagtttttatactttatatgtaggaagctaatataaaatagttatgtaactgtgattttggttttcagttatgtgacttgttttttccacctgaaatgtgtcagttgttgttcctgtactcggtgccctttctttttactctcacgtggtcccaggttctggagttcttgtcctggttctagctgctcacatgtacaaatcacttctaggcctcagtttctgcgactatgaaaattactagattgcactagcttgtctctaaaattgctgtgactccagatactttgcactgaagagaatctagggtgtttgatatctgtttcagttagggctaatgggaaatgtctagtaagataaatgtcaacttttgctgacttattatgagatgaaaaaccaaaggagagtgggcctaactcatgtgagcttgataactgatgaactcattgggagcattttaaacttttctacataaataataaatgagcactaatgaaagtattttagtgaatgaaacgtttatgtggttttctaacctatctagaaattactgttgatgtttagttctaatctttcagtgtggggattcagccagcctcatgtattttcagaatgactcatgaatctttaccacagtctgcctagctagtcaaaagcatgaatgatactagaaaccattataggttttcctaatatggcaattgatgtgactgaaaggtactgtactctcagagctttgtcctgaccagtgtcatcactcactcaatgtttatctgggttttaaataaaggccagaggttggacagggagttgctggcatgtccgcggcttggcccagtagaatgcccactaaccatcttgctccagcagctgaaaaggtcagaagttaaacatggtgaagagtccggttcctggattcacagagcccagcatcaggccgtctcccccgcaggctgcaaggccagcccttgagtatgtttggaagagcaggttaatggagctgtttgtaaatcaaagggaagaaattagcagcctgttctttttctctttgcagcttgtatgttaggacagcattagggtctgggttaggaacatgttggaaggtactaagagaagttaggaagagcagcttgtcagatggccagtaagaaaccgctgagtacttgtatcgtaagatgaggctttgcttttacgtggaggtcagctgtcagtgttcacgtctcacctgtaggaccctgtcgggtgataatgtgctgcgagacacacaggctcccatctccctcccgtgctgctgcaaacctggtgatccctggtgtatgggacagtaccgcaggaaagcccatctgatcatgccccagaacccactgatcgcgtggacgtagaacgactgctcttaccgtgtgaagtagagtcatcctgttcaagggaagaaaaagctccctcttttaatcctgtttctctctaagttagtagctattacacccaaatggttgagtttttaaaaattattttaacagtaaaaatgaaattaagaccta

SEQ ID NO: 161246 - DNA, 5487 bp, Homo sapiens
  Payload ID: 11491
  Gene Symbol: NUP153
  Gene Name: nucleoporin 153kDa
  Uniprot ID: P49790
  ENST ID: ENST00000262077
  CDS Start-End: 1-4428
atggcctcgggagccggaggagtcggagggggcggtggcggcaagatccggacgcggcgttgccaccaggggccaattaagccttaccagcaggggcgacaacagcatcagggcattcttagcagggttacagaatctgttaagaatattgtgccagggtggctacaaagatacttcaacaagaatgaagatgtatgcagctgttcaacagacacaagcgaggttccacgctggccagaaaataaagaggaccatctggtatatgccgatgaggagagctctaatattactgatgggagaatcacacctgagccagcagtcagtaatacagaagaaccttcaacaactagtactgcttcaaattatccagatgtgttaacaaggccttctcttcatcggagccatctgaatttttccatgttggaatcccctgcattacactgtcagccatctacatcctcggcattcccaattggcagttcgggattttcccttgtaaaggaaattaaagattctacctctcagcatgatgatgataacatctcaactaccagtggtttttcttcaagagcttctgataaagatataactgtttcaaagaacacttcattgccacctctgtggtccccagaagctgaacgttctcactcactctcacagcacactgccaccagctcaaaaaaaccagcattcaacttgtctgcctttggaacactttccccttcacttgggaattcttcaatccttaaaaccagtcagcttggagattctcctttttatcctggaaaaacaacatacggtggggcagcagctgctgtaagacagtctaaactacgaaatacaccttatcaggcaccagttagaagacaaatgaaagctaagcaactcagtgcacaatcttacggtgtgaccagttcaacagctcggcgaatattgcagtctttagagaagatgtcaagccctttagcggatgcaaaaagaattccatccattgtttcttctcctctgaattctcctcttgataggagtgggatagatatcacagattttcaggccaaaagagaaaaggtggattctcaatatcctcctgttcagagacttatgaccccaaagccagtttccatagcaacaaatcgaagtgtttattttaaaccatctctgactccttctggtgaattcaggaagactaatcaaagaatagataacaagtgcagtactggatatgaaaaaaatatgacacccggacaaaatagagaacaacgagaaagtggcttttcatatccaaatttcagtttgcctgcagccaatggtttatcttctggagtaggtggtggaggtggcaagatgagacgagaaagaacacgctttgttgcttctaaacctctggaggaggaggaaatggaagttccagtattaccgaaaatctctctaccgatcaccagttcttcactgcctacctttaattttagttcccctgagatcacaacttcctctccatcacccatcaattcgtctcaagcattaacaaacaaggtacaaatgacctctccgagcagcactggcagtcccatgtttaaattttcatctccaatcgtaaaatctactgaggcaaatgtactacctccatcatctattggatttacatttagtgtgcctgttgcaaaaacagcagaactttctggttctagtagtactttagaaccaattataagtagttcagctcatcatgtcactacagtgaacagtacaaattgtaagaagacaccacctgaagattgtgagggtccttttagacctgcagaaatcctgaaagaaggaagtgttctagatattctgaaaagccctggtttcgcatcgccgaagatagattctgttgctgctcagcccaccgcaacaagcccagtagtttatacaagaccagcaataagtagcttttcttctagtggaattgggtttggggagagtttaaaagctgggtcatcatggcagtgtgatacatgtctactccagaacaaagttacagacaacaaatgcatagcctgtcaagcagcaaaattgtcacccagagatactgctaaacagactggaattgaaacaccaaataaaagtggcaaaacaactctttctgcatcagggacaggctttggagacaaatttaaaccagtgataggcacttgggattgtgatacctgtttagtgcaaaataaacctgaagcaataaaatgtgtagcctgtgaaacaccgaaacctggaacttgtgtgaagcgagcccttacattgacagtggtttcggaaagtgctgagactatgactgcttcatcttccagctgcactgtaaccactggtaccttaggatttggagataaattcaaaaggcccattggatcttgggagtgttcagtatgctgtgtttctaataatgcagaagacaataagtgtgtgtcctgtatgtctgagaaaccaggaagttcagtacctgcttcaagtagcagcactgtacctgtctctctgccttctggaggctctctaggattggaaaagttcaagaaacccgagggaagctgggactgtgaattgtgcctagtgcagaataaggcagactctaccaaatgtttggcatgtgaaagtgcaaagccaggcacaaaatctgggtttaaaggctttgacacatcttcctcatcttcgaactcagcagcctcctcatccttcaaatttggtgtctcatcatcctcttctgggccttctcagactttaacaagcactggaaattttaaatttggagatcagggaggattcaaaataggtgtgtcatccgattctgggtctataaaccccatgagtgaaggctttaaattttctaaaccaataggagattttaaatttggagtttcatctgaatctaagcccgaagaagttaaaaaagatagtaagaatgataattttaagtttggactttcttctggtttaagcaacccagtttctttaactccatttcaatttggggtatctaatcttggacaggaagaaaagaaagaggaactgcccaaatcttcctctgcaggttttagctttggtacaggtgttattaactccacccctgctcctgctaacaccatagtgacctctgagaacaagagcagcttcaaccttggaaccatagaaaccaagagtgcttcagtggctcctttcacatgtaagacatcagaagctaaaaaagaagaaatgcctgccaccaaaggaggattctcttttggcaacgtggagcctgcctctctgccatctgcctcagtgtttgttttgggaaggacagaagagaaacagcaagagcctgtcacttctacttccctagtttttgggaagaaagctgacaatgaagagccaaagtgtcaaccagtgttttcctttgggaattcagagcaaaccaaagatgagaattcttcaaagtccacatttagttttagtatgacaaaaccatctgagaaggaatctgaacagccagcaaaagccacttttgcctttggagctcaaactagtactacagctgatcaaggtgcagcaaagccagtttttagtttcttgaacaacagttcctctagttcaagtacaccagccacttctgctggtggtggcatatttggtagttccacctcttcctccaatccacctgtggctacctttgtgtttggacagtccagcaatcctgtgagcagctctgcctttggtaacactgctgaatccagcacctctcagtctttgctattttctcaagatagcaaactagcaaccacatccagcacaggtacagctgtcaccccatttgtctttggtccaggagccagcagtaataatactaccacctctggtttcggctttggagccacaaccacatctagctctgcaggatcctcctttgtatttggaactggaccctcagcaccatctgccagtccagcatttggtgctaaccagaccccaacatttggacaaagtcaaggtgccagccagcccaatcccccaggctttggatctatatcatcttccacagcattatttcccactggttctcagcctgcaccacctacttttgggacagtgtcaagcagtagccagccccctgtgtttggacagcaacctagtcagtctgcatttggctctggaacaactcctaattctagttcggctttccagtttggcagcagcactacaaatttcaacttcacaaacaacagtccatcaggagtgttcacatttggtgcaaattctagcacacctgcagcctcagcccagccttcaggctcggggggctttccatttaaccagtctccagcagcatttacagtggggtcaaatgggaaaaatgtgttctcttcttctggaacttcattctctggtcgcaagataaagactgctgttagacgcaggaaataaaggtcacattggtgttgtactcaattttaacaacagctggtgccctgctttcagatactggattgtactttgtgctggggttatctgaagtcagatctgcctaaggacttctttaattttggaattttcctcctttctctttcgttacagaagccccaccctgcctcacccacccttttttaaataaataaatagctagactggtgactgattcttcagcaaaaatattttatgatccagcagattattcactgatttgacatagtctggctgtacccaggaatggagcctgcacggtgaatggctttgtatagaacctctttgtctacaccattatgtgcgctgataagcgttcatggaacgcgttgaaattgtaattatatctgaggaattctgtatagattagaattctgtatagattagagagtgttgaaacggatgatttctatgctgagtttgtgctggtgtatgtgtgaagtgagtgagttgggtgtattgtgcgctaaacttttctgatagaggaagcctgattaaagaatggtccgtgctaaggacttgttagatctagttcactctccatttaataattatatgctatttctatattttcattctcctatcacctgtcttgcctttttcattattttattatgaaacttgtgtaaatacaattttgtttctgtactttttggcataacataaatctgtgaacttgaaatttgaattttgtgttagagatttttttgttgtttgtttagtcttgtctcagattttattatgtaaatcccattattcaaagttgcctaaatccatttggaaatctttaaaaaaaaaattggggattcttaaagttgaatttattggcttttctgatccagttttgtttggaccaaaaaccagtattgtacaaagtattaagcatatatttttatatttactaaaatggactgtggtgactttggataataaggaaaagtttaatattaaagccatgtttattacagtataattaacatgttaaaccatgggataaatgccatcaataaaaaattatgacat

SEQ ID NO: 161247 - DNA, 6030 bp, Homo sapiens
  Payload ID: 11491
  Gene Symbol: NUP153
  Gene Name: nucleoporin 153kDa
  Uniprot ID: P49790
  ENST ID: ENST00000537253
  CDS Start-End: 448-4968
gggcgggcgctgtgcgcacaggggaggggtaggcgggcgtcgccagcggcttcaactgcggcagctacggctagggcgacggaagaactcccaccagtcggcggtcgagttaggcctcagcaccgcggggaactgttcgtgctgtcctctgcgggagatctccatagagaccgtgacacacacagaggcgggggtccgcagaggcggccggaccggagcctcctcggcctctgcggccgccacccccttccccgctgccagcactcaccctctctccgctcctgctcgcaacctcgcggttcctggggtgcttgtgcccactgtgtggacagcgcgggcggacttttgggccggggccgggcggcgggggaggctctctaaggcctccgcctctgcctctcccgcccccttacccgccccggagcgggaagcggcggaggctccgccatggcctcgggagccggaggagtcggagggggcggtggcggcaagatccggacgcggcgttgccaccaggggccaattaagccttaccagcaggggcgacaacagcatcagggcattcttagcagggttacagaatctgttaagaatattgtgccagggtggctacaaagatacttcaacaagaatgaagatgtatgcagctgttcaacagacacaagcgaggttccacgctggccagaaaataaagaggaccatctggtatatgccgatgaggagagctctaatattactgatgggagaatcacacctgagccagcagtcagtaatacagaagaaccttcaacaactagtactgcttcaaattatccagatgtgttaacaaggccttctcttcatcggagccatctgaatttttccatgttggaatcccctgcattacactgtcagccatctacatcctcggcattcccaattggcagttcgggattttcccttgtaaaggaaattaaagattctacctctcagcatgatgatgataacatctcaactaccagtggtttttcttcaagagcttctgataaagatataactgtttcaaagaacacttcattgccacctctgtggtccccagaagctgaacgttctcactcactctcacagcacactgccaccagctcaaaaaaaccagcattcaacttgtctgcctttggaacactttccccttcacttgggaattcttcaatccttaaaaccagtcagcttggagattctcctttttatcctggaaaaacaacatacggtggggcagcagctgctgtaagacagtctaaactacgaaatacaccttatcaggcaccagttagaagacaaatgaaagctaagcaactcagtgcacaatcttacggtgtgaccagttcaacagctcggcgaatattgcagtctttagagaagatgtcaagccctttagcggatgcaaaaagaattccatccattgtttcttctcctctgaattctcctcttgataggagtgggatagatatcacagattttcaggccaaaagagaaaaggtggattctcaatatcctcctgttcagagacttatgaccccaaagccagtttccatagcaacaaatcgaagtgtttattttaaaccatctctgactccttctggtgaattcaggaagactaatcaaagaatagataacaagtgcagtactggatatgaaaaaaatatgacacccggacaaaatagagaacaacgagaaagtggcttttcatatccaaatttcagtttgcctgcagccaatggtttatcttctggagtaggtggtggaggtggcaagatgagacgagaaagaacacgctttgttgcttctaaacctctggaggaggagagacaaggtctcaccgtattgcccaagctgatctcgagctcctgcgctcaagcgatcatcccatcttggcctctcaaagtgctgagattacaggaaatggaagttccagtattaccgaaaatctctctaccgatcaccagttcttcactgcctacctttaattttagttcccctgagatcacaacttcctctccatcacccatcaattcgtctcaagcattaacaaacaaggtacaaatgacctctccgagcagcactggcagtcccatgtttaaattttcatctccaatcgtaaaatctactgaggcaaatgtactacctccatcatctattggatttacatttagtgtgcctgttgcaaaaacagcagaactttctggttctagtagtactttagaaccaattataagtagttcagctcatcatgtcactacagtgaacagtacaaattgtaagaagacaccacctgaagattgtgagggtccttttagacctgcagaaatcctgaaagaaggaagtgttctagatattctgaaaagccctggtttcgcatcgccgaagatagattctgttgctgctcagcccaccgcaacaagcccagtagtttatacaagaccagcaataagtagcttttcttctagtggaattgggtttggggagagtttaaaagctgggtcatcatggcagtgtgatacatgtctactccagaacaaagttacagacaacaaatgcatagcctgtcaagcagcaaaattgtcacccagagatactgctaaacagactggaattgaaacaccaaataaaagtggcaaaacaactctttctgcatcagggacaggctttggagacaaatttaaaccagtgataggcacttgggattgtgatacctgtttagtgcaaaataaacctgaagcaataaaatgtgtagcctgtgaaacaccgaaacctggaacttgtgtgaagcgagcccttacattgacagtggtttcggaaagtgctgagactatgactgcttcatcttccagctgcactgtaaccactggtaccttaggatttggagataaattcaaaaggcccattggatcttgggagtgttcagtatgctgtgtttctaataatgcagaagacaataagtgtgtgtcctgtatgtctgagaaaccaggaagttcagtacctgcttcaagtagcagcactgtacctgtctctctgccttctggaggctctctaggattggaaaagttcaagaaacccgagggaagctgggactgtgaattgtgcctagtgcagaataaggcagactctaccaaatgtttggcatgtgaaagtgcaaagccaggcacaaaatctgggtttaaaggctttgacacatcttcctcatcttcgaactcagcagcctcctcatccttcaaatttggtgtctcatcatcctcttctgggccttctcagactttaacaagcactggaaattttaaatttggagatcagggaggattcaaaataggtgtgtcatccgattctgggtctataaaccccatgagtgaaggctttaaattttctaaaccaataggagattttaaatttggagtttcatctgaatctaagcccgaagaagttaaaaaagatagtaagaatgataattttaagtttggactttcttctggtttaagcaacccagtttctttaactccatttcaatttggggtatctaatcttggacaggaagaaaagaaagaggaactgcccaaatcttcctctgcaggttttagctttggtacaggtgttattaactccacccctgctcctgctaacaccatagtgacctctgagaacaagagcagcttcaaccttggaaccatagaaaccaagagtgcttcagtggctcctttcacatgtaagacatcagaagctaaaaaagaagaaatgcctgccaccaaaggaggattctcttttggcaacgtggagcctgcctctctgccatctgcctcagtgtttgttttgggaaggacagaagagaaacagcaagagcctgtcacttctacttccctagtttttgggaagaaagctgacaatgaagagccaaagtgtcaaccagtgttttcctttgggaattcagagcaaaccaaagatgagaattcttcaaagtccacatttagttttagtatgacaaaaccatctgagaaggaatctgaacagccagcaaaagccacttttgcctttggagctcaaactagtactacagctgatcaaggtgcagcaaagccagtttttagtttcttgaacaacagttcctctagttcaagtacaccagccacttctgctggtggtggcatatttggtagttccacctcttcctccaatccacctgtggctacctttgtgtttggacagtccagcaatcctgtgagcagctctgcctttggtaacactgctgaatccagcacctctcagtctttgctattttctcaagatagcaaactagcaaccacatccagcacaggtacagctgtcaccccatttgtctttggtccaggagccagcagtaataatactaccacctctggtttcggctttggagccacaaccacatctagctctgcaggatcctcctttgtatttggaactggaccctcagcaccatctgccagtccagcatttggtgctaaccagaccccaacatttggacaaagtcaaggtgccagccagcccaatcccccaggctttggatctatatcatcttccacagcattatttcccactggttctcagcctgcaccacctacttttgggacagtgtcaagcagtagccagccccctgtgtttggacagcaacctagtcagtctgcatttggctctggaacaactcctaattctagttcggctttccagtttggcagcagcactacaaatttcaacttcacaaacaacagtccatcaggagtgttcacatttggtgcaaattctagcacacctgcagcctcagcccagccttcaggctcggggggctttccatttaaccagtctccagcagcatttacagtggggtcaaatgggaaaaatgtgttctcttcttctggaacttcattctctggtcgcaagataaagactgctgttagacgcaggaaataaaggtcacattggtgttgtactcaattttaacaacagctggtgccctgctttcagatactggattgtactttgtgctggggttatctgaagtcagatctgcctaaggacttctttaattttggaattttcctcctttctctttcgttacagaagccccaccctgcctcacccacccttttttaaataaataaatagctagactggtgactgattcttcagcaaaaatattttatgatccagcagattattcactgatttgacatagtctggctgtacccaggaatggagcctgcacggtgaatggctttgtatagaacctctttgtctacaccattatgtgcgctgataagcgttcatggaacgcgttgaaattgtaattatatctgaggaattctgtatagattagaattctgtatagattagagagtgttgaaacggatgatttctatgctgagtttgtgctggtgtatgtgtgaagtgagtgagttgggtgtattgtgcgctaaacttttctgatagaggaagcctgattaaagaatggtccgtgctaaggacttgttagatctagttcactctccatttaataattatatgctatttctatattttcattctcctatcacctgtcttgcctttttcattattttattatgaaacttgtgtaaatacaattttgtttctgtactttttggcataacataaatctgtgaacttgaaatttgaattttgtgttagagatttttttgttgtttgtttagtcttgtctcagattttattatgtaaatcccattattcaaagttgcctaaatccatttggaaatctttaaaaaaaaaattggggattcttaaagttgaatttattggcttttctgatccagttttgtttggaccaaaaaccagtattgtacaaagtattaagcatatatttttatatttactaaaatggactgtggtgactttggataataaggaaaagtttaatattaaagccatgtttattacagtataattaacatgttaaaccatgggataaatgccatcaataaaaaattatgacatact

SEQ ID NO: 161248 - DNA, 5811 bp, Homo sapiens
  Payload ID: 11491
  Gene Symbol: NUP153
  Gene Name: nucleoporin 153kDa
  Uniprot ID: P49790
  ENST ID: ENST00000613258
  CDS Start-End: 448-4749
gggcgggcgctgtgcgcacaggggaggggtaggcgggcgtcgccagcggcttcaactgcggcagctacggctagggcgacggaagaactcccaccagtcggcggtcgagttaggcctcagcaccgcggggaactgttcgtgctgtcctctgcgggagatctccatagagaccgtgacacacacagaggcgggggtccgcagaggcggccggaccggagcctcctcggcctctgcggccgccacccccttccccgctgccagcactcaccctctctccgctcctgctcgcaacctcgcggttcctggggtgcttgtgcccactgtgtggacagcgcgggcggacttttgggccggggccgggcggcgggggaggctctctaaggcctccgcctctgcctctcccgcccccttacccgccccggagcgggaagcggcggaggctccgccatggcctcgggagccggaggagtcggagggggcggtggcggcaagatccggacgcggcgttgccaccaggggccaattaagccttaccagcaggggcgacaacagcatcagggcattcttagcagggttacagaatctgttaagaatattgtgccagggtggctacaaagatacttcaacaagaatgaagatgtatgcagctgttcaacagacacaagcgaggttccacgctggccagaaaataaagaggaccatctggtatatgccgatgaggagagctctaatattactgatgggagaatcacacctgagccagcagtcagtaatacagaagaaccttcaacaactagtactgcttcaaattatccagatgtgttaacaaggccttctcttcatcggagccatctgaatttttccatgttggaatcccctgcattacactgtcagccatctacatcctcggcattcccaattggcagttcgggattttcccttgtaaaggaaattaaagattctacctctcagcatgatgatgataacatctcaactaccagtggtttttcttcaagagcttctgataaagatataactgtttcaaagaacacttcattgccacctctgtggtccccagaagctgaacgttctcactcactctcacagcacactgccaccagctcaaaaaaaccagcattcaacttgtctgcctttggaacactttccccttcacttgggaattcttcaatccttaaaaccagtcagcttggagattctcctttttatcctggaaaaacaacatacggtggggcagcagctgctgtaagacagtctaaactacgaaatacaccttatcaggcaccagttagaagacaaatgaaagctaagcaactcagtgcacaatcttacggtgtgaccagttcaacagctcggcgaatattgcagtctttagagaagatgtcaagccctttagcggatgcaaaaagaattccatccattgtttcttctcctctgaattctcctcttgataggagtgggatagatatcacagattttcaggccaaaagagaaaaggtggattctcaatatcctcctgttcagagacttatgaccccaaagccagtttccatagcaacaaatcgaagtgtttattttaaaccatctctgactccttctggtgaattcaggaagactaatcaaagaatagataacaagtgcagtactggatatgaaaaaaatatgacacccggacaaaatagagaacaacgagaaagtggcttttcatatccaaatttcagtttgcctgcagccaatggtttatcttctggagtaggtggtggaggtggcaagatgagacgagaaagaacacgctttgttgcttctaaacctctggaggaggaggaaatggaagttccagtattaccgaaaatctctctaccgatcaccagttcttcactgcctacctttaattttagttcccctgagatcacaacttcctctccatcacccatcaattcgtctcaagcattaacaaacaaggtacaaatgacctctccgagcagcactggcagtcccatgtttaaattttcatctccaatcgtaaaatctactgaggcaaatgtactacctccatcatctattggatttacatttagtgtgcctgttgcaaaaacagcagaactttctggttctagtagtactttagaaccaattataagtagttcaggtttcgcatcgccgaagatagattctgttgctgctcagcccaccgcaacaagcccagtagtttatacaagaccagcaataagtagcttttcttctagtggaattgggtttggggagagtttaaaagctgggtcatcatggcagtgtgatacatgtctactccagaacaaagttacagacaacaaatgcatagcctgtcaagcagcaaaattgtcacccagagatactgctaaacagactggaattgaaacaccaaataaaagtggcaaaacaactctttctgcatcagggacaggctttggagacaaatttaaaccagtgataggcacttgggattgtgatacctgtttagtgcaaaataaacctgaagcaataaaatgtgtagcctgtgaaacaccgaaacctggaacttgtgtgaagcgagcccttacattgacagtggtttcggaaagtgctgagactatgactgcttcatcttccagctgcactgtaaccactggtaccttaggatttggagataaattcaaaaggcccattggatcttgggagtgttcagtatgctgtgtttctaataatgcagaagacaataagtgtgtgtcctgtatgtctgagaaaccaggaagttcagtacctgcttcaagtagcagcactgtacctgtctctctgccttctggaggctctctaggattggaaaagttcaagaaacccgagggaagctgggactgtgaattgtgcctagtgcagaataaggcagactctaccaaatgtttggcatgtgaaagtgcaaagccaggcacaaaatctgggtttaaaggctttgacacatcttcctcatcttcgaactcagcagcctcctcatccttcaaatttggtgtctcatcatcctcttctgggccttctcagactttaacaagcactggaaattttaaatttggagatcagggaggattcaaaataggtgtgtcatccgattctgggtctataaaccccatgagtgaaggctttaaattttctaaaccaataggagattttaaatttggagtttcatctgaatctaagcccgaagaagttaaaaaagatagtaagaatgataattttaagtttggactttcttctggtttaagcaacccagtttctttaactccatttcaatttggggtatctaatcttggacaggaagaaaagaaagaggaactgcccaaatcttcctctgcaggttttagctttggtacaggtgttattaactccacccctgctcctgctaacaccatagtgacctctgagaacaagagcagcttcaaccttggaaccatagaaaccaagagtgcttcagtggctcctttcacatgtaagacatcagaagctaaaaaagaagaaatgcctgccaccaaaggaggattctcttttggcaacgtggagcctgcctctctgccatctgcctcagtgtttgttttgggaaggacagaagagaaacagcaagagcctgtcacttctacttccctagtttttgggaagaaagctgacaatgaagagccaaagtgtcaaccagtgttttcctttgggaattcagagcaaaccaaagatgagaattcttcaaagtccacatttagttttagtatgacaaaaccatctgagaaggaatctgaacagccagcaaaagccacttttgcctttggagctcaaactagtactacagctgatcaaggtgcagcaaagccagtttttagtttcttgaacaacagttcctctagttcaagtacaccagccacttctgctggtggtggcatatttggtagttccacctcttcctccaatccacctgtggctacctttgtgtttggacagtccagcaatcctgtgagcagctctgcctttggtaacactgctgaatccagcacctctcagtctttgctattttctcaagatagcaaactagcaaccacatccagcacaggtacagctgtcaccccatttgtctttggtccaggagccagcagtaataatactaccacctctggtttcggctttggagccacaaccacatctagctctgcaggatcctcctttgtatttggaactggaccctcagcaccatctgccagtccagcatttggtgctaaccagaccccaacatttggacaaagtcaaggtgccagccagcccaatcccccaggctttggatctatatcatcttccacagcattatttcccactggttctcagcctgcaccacctacttttgggacagtgtcaagcagtagccagccccctgtgtttggacagcaacctagtcagtctgcatttggctctggaacaactcctaattctagttcggctttccagtttggcagcagcactacaaatttcaacttcacaaacaacagtccatcaggagtgttcacatttggtgcaaattctagcacacctgcagcctcagcccagccttcaggctcggggggctttccatttaaccagtctccagcagcatttacagtggggtcaaatgggaaaaatgtgttctcttcttctggaacttcattctctggtcgcaagataaagactgctgttagacgcaggaaataaaggtcacattggtgttgtactcaattttaacaacagctggtgccctgctttcagatactggattgtactttgtgctggggttatctgaagtcagatctgcctaaggacttctttaattttggaattttcctcctttctctttcgttacagaagccccaccctgcctcacccacccttttttaaataaataaatagctagactggtgactgattcttcagcaaaaatattttatgatccagcagattattcactgatttgacatagtctggctgtacccaggaatggagcctgcacggtgaatggctttgtatagaacctctttgtctacaccattatgtgcgctgataagcgttcatggaacgcgttgaaattgtaattatatctgaggaattctgtatagattagaattctgtatagattagagagtgttgaaacggatgatttctatgctgagtttgtgctggtgtatgtgtgaagtgagtgagttgggtgtattgtgcgctaaacttttctgatagaggaagcctgattaaagaatggtccgtgctaaggacttgttagatctagttcactctccatttaataattatatgctatttctatattttcattctcctatcacctgtcttgcctttttcattattttattatgaaacttgtgtaaatacaattttgtttctgtactttttggcataacataaatctgtgaacttgaaatttgaattttgtgttagagatttttttgttgtttgtttagtcttgtctcagattttattatgtaaatcccattattcaaagttgcctaaatccatttggaaatctttaaaaaaaaaattggggattcttaaagttgaatttattggcttttctgatccagttttgtttggaccaaaaaccagtattgtacaaagtattaagcatatatttttatatttactaaaatggactgtggtgactttggataataaggaaaagtttaatattaaagccatgtttattacagtataattaacatgttaaaccatgggataaatgccatcaataaaaaattatgacatact

SEQ ID NO: 161249 - DNA, 8143 bp, Homo sapiens
  Payload ID: 11492
  Gene Symbol: NUP155
  Gene Name: nucleoporin 155kDa
  Uniprot ID: O75694
  ENST ID: ENST00000231498
  CDS Start-End: 205-4380
ctcccaacagcttcctcttcccaggccagaacggcgtcttccagttccccaccggatgaagcggaagtgcgtcatgtcgaggcgccaaggcgctcgtttggcgcgcgcgccctaggcggcggatctaagctaacttcttggatcttttcttgtttctccttggtttttgactttttctggaccctggtgtctacgatttccgagatgccgtcttctttgttgggcgcggcgatgccggcctctacatctgccgcagccctgcaggaagctctggaaaatgctggacggctcatcgaccgtcagttgcaagaggaccgcatgtacccggacctttccgagctgcttatggtgtctgccccaaataatcccaccgtttctggcatgtcagatatggattatcctttgcaaggacctggtttgctgtccgtacccaaccttccagagatcagttccatccgaagagttcctctcccacctgaacttgttgagcagtttggacatatgcagtgtaattgcatgatgggtgtgttccctcctatcagcagagcttggctcacaattgacagtgatatattcatgtggaactatgaggatggaggagaccttgcctattttgatggacttagtgagactattcttgctgtggggcttgtgaagccaaaagcaggcatctttcaacctcatgtgcgacacctcctggttttggcgacccctgtagacatagtaattcttggactcagctatgctaatttgcaaacaggttctggagttcttaatgatagtttgtctggtggaatgcagttgcttccagatcctttatattctcttcctactgataatacttaccttttaacaataacttccactgataatggcagaattttcttggctggaaaggatggctgtttatatgaagtagcctaccaggctgaagcagggtggtttagccaaagatgtaggaaaataaaccactcaaagagctcactttctttccttgttccttccttgctacaattcacgttctcagaagatgatcctattcttcaaattgcaattgataattctagaaatattttatatacacgatctgagaaaggagtaatacaggtgtatgatttgggacaagatggacaaggaatgagcagagttgcctctgtgtcacagaatgccattgtctctgctgctggtaacattgctaggaccatcgatcgttctgtttttaaaccaattgtccaaatagcagtgattgaaaattctgaatcactggactgtcagttattggctgtcacacatgcaggtgttaggttatattttagcacttgtccattcagacagccattagcacggcctaatacactgacgctggttcatgtccgcttacctcctggattctcagcatcttcaaccgtggaaaagccttcaaaagtacatagagctctttatagtaaaggtattctattgatggcagcctcagaaaatgaggataatgatattttatggtgtgtcaaccatgatacttttcctttccaaaagccaatgatggaaacccagatgacagctggtgttgatggtcattcctgggctctttctgcgatagatgaattgaaagtagataaaataattacacctttaaacaaggatcatattccaataactgattcaccagttgttgtacagcagcacatgttacctccgaagaaatttgttctcctctcagcacaggggagccttatgtttcataaacttagacctgtagatcaactgaggcatctacttgtgagtaatgtgggaggagatggagaagagattgaaagattctttaaattacatcaggaagaccaggcttgtgcaacttgccttattcttgcttgctccactgctgcctgtgatagagaagtatctgcctgggctactcgggctttctttaggtatggtggtgaagcacagatgagatttccaaccactcttccgcctccaagtaatgttggtcccatcttggggtctcctgtctattctagttctcctgttcctagtggtagtccctatccaaatccatcctttttgggaacaccgtctcatggtatacagcctcctgccatgtcaactccagtgtgtgctctgggaaacccagcaactcaggccacaaatatgagttgtgtgactggaccagagattgtgtactctggaaaacacaatggtatttgcatttacttttctcggatcatgggaaacatttgggatgcaagcttagttgtggagagaatattcaagagtggcaacagagagatcactgcaattgaaagtagtgttccctgccaactgctagagtcagtgctacaagaactaaagggtttgcaggaatttctagacagaaactcccagtttgcaggaggaccattaggaaatccaaatactactgctaaagtgcagcagaggctgataggattcatgcgtcctgaaaacggaaatccccagcaaatgcaacaggaactgcagaggaagtttcatgaggctcaactaagtgaaaagatttcacttcaggcaattcagcagttggttcgaaaatcatatcaggctctggctttatggaaacttctttgtgaacatcaattcactatcattgtggcagaacttcagaaggaacttcaagagcagctgaagatcaccacctttaaagatcttgtaatcagggacaaagaactcacaggggcattaattgcttctcttatcaactgctacatcagagataatgccgctgttgatggcattagtttacatttacaggatatctgcccacttctatatagcactgatgatgcaatttgttctaaggcaaatgagcttctccagcgttcccgacaagttcaaaataagactgaaaaagaaagaatgttaagggaatcattaaaggaatatcaaaaaattagcaatcaagtggacctttccaatgtttgtgctcagtatagacaagtgagattttatgagggtgtggtggaactttctcttacggctgcagagaaaaaagatcctcaaggtcttgggcttcatttctataaacatggagaaccagaagaagacatagttggacttcaggccttccaagaaagattaaacagttacaaatgcattacagacacacttcaagaactggtaaatcaaagtaaggccgctcctcagtctcccagtgtacccaaaaaacctggtcctccagtgttgtcatctgatccaaatatgctgagtaatgaagaagcaggacatcattttgaacaaatgcttaaattgtcacagcgatccaaggatgagctctttagtattgccctttataattggctaatacaagtcgaccttgcagataagctgctacaggttgcttctccatttctggagccacatctagtccgaatggccaaagttgatcaaaacagagttcgttatatggatttactctggcggtattacgagaagaacagaagtttcagtaatgctgctcgtgtactgtccagactggctgacatgcatagcacagaaatttcacttcagcagcgactagagtacattgctcgagccattcttagtgccaaaagttccactgccatttcatcaatagctgccgatggtgaatttcttcatgaattagaagaaaaaatggaggttgctaggatccaacttcagatacaggagacactacaaaggcagtattcccatcattcttctgtacaggatgcagtttctcagctggattctgagctgatggacataactaagctttatggggaatttgctgacccatttaaacttgcagagtgcaaacttgcaataattcattgtgccggttattcagaccctatattggtgcagacactttggcaagatatcatagagaaagaattgagtgacagtgtgacattgagctcctcggatagaatgcatgctcttagtctcaagattgttctccttggcaaaatttatgctggcacaccacgcttctttcctttagattttattgtacagtttttagaacagcaggtttgtactttgaactgggatgtgggcttcgtaatacagacaatgaatgaaattggagtaccattacctagactactagaagtttatgatcagttgttcaaatcacgggatccattctggaacagaatgaagaagccactgcaccttttggattgtatacatgtattattgataagatatgttgagaatcccagccaagttttaaattgtgaaaggagaagatttacaaatctctgcctggatgctgtttgtggttaccttgttgagctccagtctatgagctcgtcagtagcagtacaagccatcactgggaattttaaatctcttcaagctaaattagaacggcttcattaattactgtgatatactttcatccgttttatgatctgtaaaataaaaactcagctgggtccagatatcaggtgttctaaatctaagaatgtaagaacaatcttaatagaaatatgtttttaataagtggctaatatctacaaatagtacctttgctaaatgaattcttttttatgactattttgttttttagtaattgggtgaaaaaacaactgaaatgagattatttattattttaacataaggattaaaaaaatttagaaactcttattttgaattgtactgcaggcagaaatttcgaatttatattattcattttcaagttagtccaaggatattggcattaaaactccactaggcggccaggcacagtgacttacacctgtaatcccagcactttgggaggccaaggtgggcgaatcacgaggccaagagtttgagaccaacctggccaacatggtgaaaccccatctctactaaaaatacaaaaaaaaatagccaggcgtggtggcgggcgcctgtaatcccagctactcgggaggctgagggaggcgaatcacttgaacccgggaggcagaggtttcagtgagtcaaaatcgcaccattgcactccagcccaggcaacagggcgagactctgtctcaaaaaacaaaaaaacctcaaataggctaagcagatccattcccataatagtggattctaaaaccgtccttaaataggcaaataactgactttttcaaaactttttttaggtgttgggttcacccttgaaagaactgtcctctaacaactggttttgtcagttaaagcccttgagaattgacatagctatatacctggttgagcaggtgataaaacttgtaactaatgttgtgtcctgaaaacctacacagggaggtactgttttcccttagtgtctacctggctgcttggccttgtgactactgattccattagagcagtggttctcaaagtatgtgctccaaaccagaagcatcagcatcagcatcagcatcacctaggaatttgttagaaatgcaaattctcgagccccaacccagacctactgaatcaaaaacgtgggggatgaggccctgctttctatgttttaacaagctctccaggagattttggtgcatgtcaaatttgaaagccactgcagtaaaggatactgctaccttccatagtttatggactgagctacctatctggctcctcctctgtgaataaccacacacacaaattttgcccaaggcacacaatatataaagcaaaactgttagtaatgtactttttaattattccttaacaaaatagaataaccaaaccaaatgcttcaaagtaatagcaacaagagagaagaagagtgggaatgaccagagctaacaaaacactctattcctttctctcttttttttttttttggagacagaatctcaccctgtagcccagcctggagtgcagtggtgcgatcccggctcactgcaacctctgcctcacaggtttgaagcaatttgcctgcctcagcctctcgagtagctgggattgcaggtgtgcgccaccatacccagctaatttttgtatttttagtagagatgggtttcaccatgttggccaggctggtcttgaactcctgacctcaagtgatctgcccgcctccacctcccaaagtgttgagattacagacgtgagccaatgtgcctggcctattcccttctctctttatgctaccacaaataattaccttctgtttattgtaagtgatgcatgtctaacaatttgtacaatacattttgaatatatttttccttccattattgtcttttcccaagaccatagggttgccttctctacatttgttctcttagaattcagctcccttttccctataatcttctaatgtagaatatttaatagaatgccagaacgtcactcagtgggtactactacctcttatttttcaacttttcagtttcttaagtttagcgttttttgaatatgtaaagtgaatgtatgcgatacattaattcgttttataaatttaaaattctgtcatgtctacttaaaaggaaggccttgtctgaatgttgtaatttaggtgtgactccagttctgctagagataagaacttcatttttgttttaagcacatttacatactagcaatatgttgttatatatactcagctcacaacattgaaagtacatgttttaaaagggctgtaggcttccatggttagatggtctgttagagtcagaaatctgaacactgtccttttattcacacagcatgctttgagaggttttaggaattccagccccacaacagatgcttgcaataccttttggggggtaagattcctaagagagaagaaattaggtcccctcatttttacccttggaacagtgtttctaaaactttcacattcagaacaatcagccggatagcctgttatgacagattcttgagttccatctgtagtgtcatgctgatcctggcagtcagtggatcagagttggagtagcatttatccactgtattagtatactttgtacttggtgtttgttcaacgcattacttttttgaatttttttgttttttgaagacaagggcttgccctggagtgcagtggcatgatcttggctcactgcagcctcgagctcctgggctcaactcagtcttcccacctcatcctcttaaatagctgggactacaggcacgtgctgctacaccctgctattgtctgtttgtttgtttgagactgagttttgctcttgttgcccaggctggagtgcaatggcacaatcttggctcaccacagccttttttatgagactgagttttgctcttgttgcccaggctggagtgcaatggcacgatcttggctcaccacaacctccacttcctgggttcaagcaattcttctgcctcagcctcccgagtagctgagattacaggcatgcgccaccatgcctggctaattttttttttttgtatttttagtagagatggggtttcaccgtgttggtcaggctggtcttgaactcctgacctcaggtgatccaccccccttggcctcccaaagagctgggattacaggcatgagccactgcgcctagccccaccccccctactttttttttttttttttttttaattttttgtgtagccaaaagatctcactctgttgcccagactgctctcaaaactcctggccttaagtgattcccctgcctcagtctcccaaagtgctgggattataggcatgagccaccatgcctgtccattatttctttatagtgactattatatgtaggcaatgtataattggtagaacatagtctatgaaacagtgcgttaattgtgggcagtgaagaatcattgaagttgtgaaatttgtattttaactagatcattgtagtatggcaaaacggttaggaaagagaaagctatcttgactaactgtttatgctatgagatactgactgatgtacatgtacatttagtgtttctttaggtatacctgacttattcattgaacacctatccactgatctcaaaagtattcctcagggtagtctccattcctgtcatttttcctcctattcatgagacggaaaaattatgaccatggtacagagttgtatcaaggaaatgaagaactagaacattgaattgaaaggttttgaaagggttcacaatttcttttcattttctattaatgtcttcttttaaattctcttaagaataaaacttttttctaata

SEQ ID NO: 161250 - DNA, 4200 bp, Homo sapiens
  Payload ID: 11492
  Gene Symbol: NUP155
  Gene Name: nucleoporin 155kDa
  Uniprot ID: O75694
  ENST ID: ENST00000381843
  CDS Start-End: 141-4139
gactctcgcctgacttcctaatttgctacttatccccagcgttggtcccggcgaggatatgctgagatttatggcactgttggctgcatttttggagaacagcaagcagcttcttttcagataatcccaccgtttctggcatgtcagatatggattatcctttgcaaggacctggtttgctgtccgtacccaaccttccagagatcagttccatccgaagagttcctctcccacctgaacttgttgagcagtttggacatatgcagtgtaattgcatgatgggtgtgttccctcctatcagcagagcttggctcacaattgacagtgatatattcatgtggaactatgaggatggaggagaccttgcctattttgatggacttagtgagactattcttgctgtggggcttgtgaagccaaaagcaggcatctttcaacctcatgtgcgacacctcctggttttggcgacccctgtagacatagtaattcttggactcagctatgctaatttgcaaacaggttctggagttcttaatgatagtttgtctggtggaatgcagttgcttccagatcctttatattctcttcctactgataatacttaccttttaacaataacttccactgataatggcagaattttcttggctggaaaggatggctgtttatatgaagtagcctaccaggctgaagcagggtggtttagccaaagatgtaggaaaataaaccactcaaagagctcactttctttccttgttccttccttgctacaattcacgttctcagaagatgatcctattcttcaaattgcaattgataattctagaaatattttatatacacgatctgagaaaggagtaatacaggtgtatgatttgggacaagatggacaaggaatgagcagagttgcctctgtgtcacagaatgccattgtctctgctgctggtaacattgctaggaccatcgatcgttctgtttttaaaccaattgtccaaatagcagtgattgaaaattctgaatcactggactgtcagttattggctgtcacacatgcaggtgttaggttatattttagcacttgtccattcagacagccattagcacggcctaatacactgacgctggttcatgtccgcttacctcctggattctcagcatcttcaaccgtggaaaagccttcaaaagtacatagagctctttatagtaaaggtattctattgatggcagcctcagaaaatgaggataatgatattttatggtgtgtcaaccatgatacttttcctttccaaaagccaatgatggaaacccagatgacagctggtgttgatggtcattcctgggctctttctgcgatagatgaattgaaagtagataaaataattacacctttaaacaaggatcatattccaataactgattcaccagttgttgtacagcagcacatgttacctccgaagaaatttgttctcctctcagcacaggggagccttatgtttcataaacttagacctgtagatcaactgaggcatctacttgtgagtaatgtgggaggagatggagaagagattgaaagattctttaaattacatcaggaagaccaggcttgtgcaacttgccttattcttgcttgctccactgctgcctgtgatagagaagtatctgcctgggctactcgggctttctttaggtatggtggtgaagcacagatgagatttccaaccactcttccgcctccaagtaatgttggtcccatcttggggtctcctgtctattctagttctcctgttcctagtggtagtccctatccaaatccatcctttttgggaacaccgtctcatggtatacagcctcctgccatgtcaactccagtgtgtgctctgggaaacccagcaactcaggccacaaatatgagttgtgtgactggaccagagattgtgtactctggaaaacacaatggtatttgcatttacttttctcggatcatgggaaacatttgggatgcaagcttagttgtggagagaatattcaagagtggcaacagagagatcactgcaattgaaagtagtgttccctgccaactgctagagtcagtgctacaagaactaaagggtttgcaggaatttctagacagaaactcccagtttgcaggaggaccattaggaaatccaaatactactgctaaagtgcagcagaggctgataggattcatgcgtcctgaaaacggaaatccccagcaaatgcaacaggaactgcagaggaagtttcatgaggctcaactaagtgaaaagatttcacttcaggcaattcagcagttggttcgaaaatcatatcaggctctggctttatggaaacttctttgtgaacatcaattcactatcattgtggcagaacttcagaaggaacttcaagagcagctgaagatcaccacctttaaagatcttgtaatcagggacaaagaactcacaggggcattaattgcttctcttatcaactgctacatcagagataatgccgctgttgatggcattagtttacatttacaggatatctgcccacttctatatagcactgatgatgcaatttgttctaaggcaaatgagcttctccagcgttcccgacaagttcaaaataagactgaaaaagaaagaatgttaagggaatcattaaaggaatatcaaaaaattagcaatcaagtggacctttccaatgtttgtgctcagtatagacaagtgagattttatgagggtgtggtggaactttctcttacggctgcagagaaaaaagatcctcaaggtcttgggcttcatttctataaacatggagaaccagaagaagacatagttggacttcaggccttccaagaaagattaaacagttacaaatgcattacagacacacttcaagaactggtaaatcaaagtaaggccgctcctcagtctcccagtgtacccaaaaaacctggtcctccagtgttgtcatctgatccaaatatgctgagtaatgaagaagcaggacatcattttgaacaaatgcttaaattgtcacagcgatccaaggatgagctctttagtattgccctttataattggctaatacaagtcgaccttgcagataagctgctacaggttgcttctccatttctggagccacatctagtccgaatggccaaagttgatcaaaacagagttcgttatatggatttactctggcggtattacgagaagaacagaagtttcagtaatgctgctcgtgtactgtccagactggctgacatgcatagcacagaaatttcacttcagcagcgactagagtacattgctcgagccattcttagtgccaaaagttccactgccatttcatcaatagctgccgatggtgaatttcttcatgaattagaagaaaaaatggaggttgctaggatccaacttcagatacaggagacactacaaaggcagtattcccatcattcttctgtacaggatgcagtttctcagctggattctgagctgatggacataactaagctttatggggaatttgctgacccatttaaacttgcagagtgcaaacttgcaataattcattgtgccggttattcagaccctatattggtgcagacactttggcaagatatcatagagaaagaattgagtgacagtgtgacattgagctcctcggatagaatgcatgctcttagtctcaagattgttctccttggcaaaatttatgctggcacaccacgcttctttcctttagattttattgtacagtttttagaacagcaggtttgtactttgaactgggatgtgggcttcgtaatacagacaatgaatgaaattggagtaccattacctagactactagaagtttatgatcagttgttcaaatcacgggatccattctggaacagaatgaagaagccactgcaccttttggattgtatacatgtattattgataagatatgttgagaatcccagccaagttttaaattgtgaaaggagaagatttacaaatctctgcctggatgctgtttgtggttaccttgttgagctccagtctatgagctcgtcagtagcagtacaagccatcactgggaattttaaatctcttcaagctaaattagaacggcttcattaattactgtgatatactttcatccgttttatgatctgtaaaataaaaactcagctgggtccag

SEQ ID NO: 161251 - DNA, 4088 bp, Homo sapiens
  Payload ID: 11492
  Gene Symbol: NUP155
  Gene Name: nucleoporin 155kDa
  ENST ID: ENST00000513532
  CDS Start-End: 105-4088
gcgcgcgcgccctaggcggcggatctaagctaacttcttggatcttttcttgtttctccttggtttttgactttttctggaccctggtgtctacgatttccgagatgccgtcttctttgttgggcgcggcgatgccggcctctacatctgccgcagccctgcaggaagctctggaaaatgctggacggctcatcgaccgtcagttgcaagaggaccgcatgtacccggacctttccgagctgcttatggtgtctgccccaaataatcccaccgtttctggcatgtcagatatggattatcctttgcaaggacctggtttgctgtccgtacccaaccttccagagatcagttccatccgaagagttcctctcccacctgaacttgttgagcagtttggacatatgcagtgtaattgcatgatgggtgtgttccctcctatcagcagagcttggctcacaattgacagtgatatattcatgtggaactatgaggatggaggagaccttgcctattttgatggacttagtgagactattcttgctgtggggcttgtgaagccaaaagcaggcatctttcaacctcatgtgcgacacctcctggttttggcgacccctgtagacatagtaattcttggactcagctatgctaatttgcaaacaggttctggagttcttaatgatagtttgtctggtggaatgcagttgcttccagatcctttatattctcttcctactgataatacttaccttttaacaataacttccactgataatggcagaattttcttggctggaaaggatggctgtttatatgaagtagcctaccaggctgaagcagggtggtttagccaaagatgtaggaaaataaaccactcaaagagctcactttctttccttgttccttccttgctacaattcacgttctcagaagatgatcctattcttcaaattgcaattgataattctagaaatattttatatacacgatctgagaaaggagtaatacaggtgtatgatttgggacaagatggacaaggaatgagcagagttgcctctgtgtcacagaatgccattgtctctgctgctggtaacattgctaggaccatcgatcgttctgtttttaaaccaattgtccaaatagcagtgattgaaaattctgaatcactggactgtcagttattggctgtcacacatgcaggtgttaggttatattttagcacttgtccattcagacagccattagcacggcctaatacactgacgctggttcatgtccgcttacctcctggattctcagcatcttcaaccgtggaaaagccttcaaaagtacatagagctctttatagtaaaggtattctattgatggcagcctcagaaaatgaggataatgatattttatggtgtgtcaaccatgatacttttcctttccaaaagccaatgatggaaacccagatgacagctggtgttgatggtcattcctgggctctttctgcgatagatgaattgaaagtagataaaataattacacctttaaacaaggatcatattccaataactgattcaccagttgttgtacagcagcacatgttacctccgaagaaatttgttctcctctcagcacaggggagccttatgtttcataaacttagacctgtagatcaactgaggcatctacttgtgagtaatgtgggaggagatggagaagagattgaaagattctttaaattacatcaggaagaccaggcttgtgcaacttgccttattcttgcttgctccactgctgcctgtgatagagaagtatctgcctgggctactcgggctttctttaggtatggtggtgaagcacagatgagatttccaaccactcttccgcctccaagtaatgttggtcccatcttggggtctcctgtctattctagttctcctgttcctagtggtagtccctatccaaatccatcctttttgggaacaccgtctcatggtatacagcctcctgccatgtcaactccagtgtgtgctctgggaaacccagcaactcaggccacaaatatgagttgtgtgactggaccagagattgtgtactctggaaaacacaatggtatttgcatttacttttctcggatcatgggaaacatttgggatgcaagcttagttgtggagagaatattcaagagtggcaacagagagatcactgcaattgaaagtagtgttccctgccaactgctagagtcagtgctacaagaactaaagggtttgcaggaatttctagacagaaactcccagtttgcaggaggaccattaggaaatccaaatactactgctaaagtgcagcagaggctgataggattcatgcgtcctgaaaacggaaatccccagcaaatgcaacaggaactgcagaggaagtttcatgaggctcaactaagtgaaaagatttcacttcaggcaattcagcagttggttcgaaaatcatatcaggctctggctttatggaaacttctttgtgaacatcaattcactatcattgtggcagaacttcagaaggcaaatgagcttctccagcgttcccgacaagttcaaaataagactgaaaaagaaagaatgttaagggaatcattaaaggaatatcaaaaaattagcaatcaagtggacctttccaatgtttgtgctcagtatagacaagtgagattttatgagggtgtggtggaactttctcttacggctgcagagaaaaaagatcctcaaggtcttgggcttcatttctataaacatggagaaccagaagaagacatagttggacttcaggccttccaagaaagattaaacagttacaaatgcattacagacacacttcaagaactggtaaatcaaagtaaggccgctcctcagtctcccagtgtacccaaaaaacctggtcctccagtgttgtcatctgatccaaatatgctgagtaatgaagaagcaggacatcattttgaacaaatgcttaaattgtcacagcgatccaaggatgagctctttagtattgccctttataattggctaatacaagtcgaccttgcagataagctgctacaggttgcttctccatttctggagccacatctagtccgaatggccaaagttgatcaaaacagagttcgttatatggatttactctggcggtattacgagaagaacagaagtttcagtaatgctgctcgtgtactgtccagactggctgacatgcatagcacagaaatttcacttcagcagcgactagagtacattgctcgagccattcttagtgccaaaagttccactgccatttcatcaatagctgccgatggtgaatttcttcatgaattagaagaaaaaatggaggttgctaggatccaacttcagatacaggagacactacaaaggcagtattcccatcattcttctgtacaggatgcagtttctcagctggattctgagctgatggacataactaagctttatggggaatttgctgacccatttaaacttgcagagtgcaaacttgcaataattcattgtgccggttattcagaccctatattggtgcagacactttggcaagatatcatagagaaagaattgagtgacagtgtgacattgagctcctcggatagaatgcatgctcttagtctcaagattgttctccttggcaaaatttatgctggcacaccacgcttctttcctttagattttattgtacagtttttagaacagcaggtttgtactttgaactgggatgtgggcttcgtaatacagacaatgaatgaaattggagtaccattacctagactactagaagtttatgatcagttgttcaaatcacgggatccattctggaacagaatgaagaagccactgcaccttttggattgtatacatgtattattgataagatatgttgagaatcccagccaagttttaaattgtgaaaggagaagatttacaaatctctgcctggatgctgtttgtggttaccttgttgagctccagtctatgagctcgtcagtagcagtacaagccatcactgggaattttaaatctcttcaagctaaattagaacggcttcattaa

SEQ ID NO: 161252 - DNA, 673 bp, Homo sapiens
  Payload ID: 11492
  Gene Symbol: NUP155
  Gene Name: nucleoporin 155kDa
  ENST ID: ENST00000507675
  CDS Start-End: 127-291
gaggcgccaaggcgctcgtttggcgcgcgcgccctaggcggcggatctaagctaacttcttggatcttttcttgtttctccttggtttttgactttttctggaccctggtgtctacgatttccgagatgccgtcttctttgttgggcgcggcgatgccggcctctacatctgccgcagccctgcaggaagctctggaaaatgctggacggctcatcgaccgtcagttgcaagaggaccgcatgtacccggacctttccgagctgcttatggtgtctgccccaagtgagtgatagtgaccctgctttctcaacctaaaggactctcgcctgacttcctaatttgctacttatccccagcgttggtcccggcgaggatatgctgagatttatggcactgttggctgcatttttggagaacagcaagcagcttcttttcagataatcccaccgtttctggcatgtcagatatggattatcctttgcaaggacctggtttgctgtccgtacccaaccttccagagatcagttccatccgaagagttcctctcccacctgaacttgttgagcagtttggacatatgcagtgtaattgcatgatgggtgtgttccctcctatcagcagagcttggctcacaattgacagtgatatattcatgtggaactatgaggatgg

SEQ ID NO: 161253 - DNA, 5376 bp, Homo sapiens
  Payload ID: 11493
  Gene Symbol: NUP160
  Gene Name: nucleoporin 160kDa
  Uniprot ID: Q12769
  ENST ID: ENST00000378460
  CDS Start-End: 48-4358
gtggaagcctcgcaacgaagggccggagccgcctttctgctcccggaatgcttcacctgtccgcagctccgcccgccccacccccggaagtgacggcgaccgcgcggccctgcctttgttccgttgggcgtcgcggcgacggcgggaagatggcggcggcgggagccctggaacggagcttcgtggagctaagcggagctgagcgcgaaaggccgaggcactttcgggaattcacagtctgcagcattgggactgcaaatgccgtggctggcgccgtaaaatacagtgaaagcgcgggaggcttttactacgtggagagtggcaagttgttctccgtaaccagaaacaggttcattcattggaagacctctggagatacattggagctgatggaggagtcactggacataaatctgttgaataatgccattcgcctaaaattccaaaattgcagtgttttacctggaggggtttatgtctctgagactcagaatcgtgtgataatcttgatgttaaccaatcaaacagtgcacaggttacttttaccacacccctcccggatgtataggagtgagttggtagttgacagtcagatgcagtcaatattcactgacattggaaaagttgatttcacagatccttgcaactatcagttaattccagcagtacctggaatatctcctaattccaccgcctctacagcctggctcagcagtgatggggaggccctgtttgccttaccatgtgcttctgggggaatctttgttcttaagctacctccttatgacatacctggtatggtgtcagtcgtggaactgaaacagagttcagtaatgcaacgattgcttacaggctggatgccaacagctatcaggggtgaccagtcgccttcagatcgtcccctcagtcttgctgttcattgtgtggagcatgatgccttcatctttgctttgtgtcaggatcataaactacgaatgtggtcttacaaggagcaaatgtgcctaatggtagctgacatgctggagtatgtccctgtgaagaaagaccttcggcttactgctggaactggacacaaattacggcttgcttattcccccaccatgggactctacctggggatatacatgcatgcaccaaaacgaggacagttctgcattttccagttggtgagcactgagagtaatcgctatagtctcgatcatatttcttcactgttcacttctcaggagacactgattgactttgccttaacttccacggatatctgggccctgtggcatgatgctgagaaccaaacagtagtgaaatacatcaactttgaacataatgttgcaggtcagtggaatccagtttttatgcagcctctgccagaggaagagattgtcatcagagatgatcaagaccccagagagatgtatctgcaaagtctttttacaccaggacaattcacaaatgaagctttatgtaaggctttacagattttctgccgaggaactgagaggaatttggatctttcctggagtgaactgaagaaagaagttactttagctgttgaaaatgagcttcaaggaagtgtaacagagtatgaattctcccaggaggagtttcgaaatttacaacaagaattctggtgcaagttctatgcctgttgtcttcagtatcaagaagccctctctcaccctcttgccctacatttgaatccacacacaaacatggtgtgcctgctgaaaaaagggtacctgtctttccttattccctcatccttagtggatcatttgtatctcctgccttatgagaaccttttgacagaagatgagacaaccatatctgatgatgtggacatcgctcgggatgtcatatgtcttataaaatgcctccggctgattgaagagtcagtaactgtggatatgtcagttataatggaaatgagttgttataacctacagtctccggaaaaggctgcagagcagattctggaagatatgatcactattgatgtagaaaatgtgatggaggatatttgtagtaaactgcaagagattaggaacccaatccatgcaattggactacttatacgggaaatggattatgaaacagaagtggaaatggaaaagggattcaatccagctcagcctttgaatattcgaatgaatcttacccagctctatggtagtaacacagcagggtatattgtgtgcagaggggtgcataaaatcgccagtactcgtttcctgatctgcagagatcttttgatcttacagcagctgttaatgaggcttggagatgctgtgatttggggaactggtcagctctttcaagctcagcaagacctactacatcgaacagctcccctactcttatcttattacctcattaaatggggaagtgagtgcttggcaactgatgttccacttgacacactggagtctaatctccaacacttatcagtactggaattaacagactctggtgctttaatggcaaataggtttgtatctagtcctcagactattgtggagttattcttccaagaagttgcaagaaaacacattatatctcacctcttctctcagccaaaggcacctctgagccaaactggattgaattggcctgaaatgattactgcaattaccagttatttattgcagcttttatggcctagcaatcctggttgtctctttctagaatgtttgatgggaaattgccaatatgtacaattgcaggattatattcaactgctacatccctggtgtcaagtcaatgttggttcctgtcgatttatgctgggaaggtgttacctagttacaggagaaggacagaaggctctggaatgtttttgtcaggcagcatctgaagtaggcaaagaggaattcttggatcgcttgattcgctcagaggatggggagatcgtgtctacccccaggctgcagtattatgacaaggttttacgactactagatgtcattggtttgcctgaactggttattcagttggctacatcagccataactgaagcaggtgatgactggaaaagtcaggctactctaaggacatgtattttcaaacatcatttggatttgggtcacaatagccaagcatatgaagccttaacccaaattcctgattccagcaggcaattagattgtttacggcagttggtggtagttctttgtgaacgctcacagctacaggatcttgtagagtttccctatgtgaatctgcataatgaggttgtgggaataattgagtcacgtgctagagctgtggaccttatgactcacaattactatgaacttctgtatgcctttcacatctatcgccacaattaccgcaaggctggcacagtgatgtttgagtatggaatgcggcttggcagagaagttcgaactctccggggacttgagaaacaaggcaactgttatctggctgctctcaattgtttacgacttattcgtccagaatatgcgtggattgtgcagccagtgtctggtgcagtgtatgatcgccctggagcatcccctaagaggaatcatgatggagaatgcacagctgcccccacaaatcgacaaattgaaatcctggaactggaagatctggagaaagagtgttccttggctcgcatccgcctcactttggctcagcatgatccatcagcggttgcagttgctggaagttcatcagcagaggaaatggtcactctcttggttcaggcgggcctctttgacactgccatatcactctgtcagacttttaagcttcccttaacgccagtctttgaagggcttgccttcaaatgcatcaaattgcaatttggaggagaggcagcacaagcagaagcctgggcctggctagcagccaatcagctctcatctgtcatcactactaaggagtctagtgctacagatgaagcatggcgactattatccacttacctggagaggtacaaagtccagaataacttgtatcaccactgtgtaatcaacaagctcttgtctcatggagtgcctctgcctaattggcttataaacagttacaagaaggttgatgctgctgaattgcttcgtttatacttaaactatgaccttttagaagaagctgtggatttggtgtcagaatatgtggatgctgtattgggaaaaggacatcaatacttcggaattgagtttccactgtccgcaacagccccaatggtgtggcttccatactcctctattgatcagcttctccaagctctgggagagaacagtgccaacagtcacaacatcgcactgtcccagaaaatacttgacaaattggaggactaccagcaaaaagttgataaggcaacacgggatttattatatcgtcggaccttgtgatttggattgtcacctagcctttgtaaccgcttggtgcctcttaggacttaagactaccctacaggaaccctgtactcaaggccgatttttgtaactgtaaatgatgtgtacaacattcaagtctgcattctgcacaagataggagggcggaagagtcagaggaccctgtgcttgctggtggtgctaacacaatttctggtgttcaaccttggtctcaaatagctgcttttgtatatgattcacgagcttttttagagtttatatttttttaaactaccgaagacattcattatctgcaaattaagactcaccttcactttccaaaatagctgagggttgttggcttgttgtagctgaccaccaaaagcagtcactgcaaatcttttaattcttccctatcaccttttgtattttaatgcaattattttggtccagaactgacctgtattttctgtattgtacacaaaagctaataattttgtgtactttttatttattttggaggttttatatgatcttcaattgagtattaaataatttgcctagattaagcctaaaatgatgaccagctaattaaagaagatattttgaatctggttctgagctaaagttgagtaaattcttagctaagaaaaaattggaaatccatcatctatattagcaacagattctcagagtaaattgttaacttctatgatttatgataatcaagctggacttgatcatacaagttagtctcataatgtattggaccaaaatgtaaacttcattggtcagatttagaagcattcatgctcacaagttttgggaaagtgaaaaataataaaatcatcttggattttattctgtatattaaaatttatcttttaaggaaacaatctgtatactacttgcttgtatagccttttgacccttcttgagtttttcagaagcctttaatttttatactttcaataccatatttacattatatactttaattaacaatgtgagtttctctgtggtactgttgttgata

SEQ ID NO: 161254 - DNA, 1537 bp, Homo sapiens
  Payload ID: 11493
  Gene Symbol: NUP160
  Gene Name: nucleoporin 160kDa
  Uniprot ID: Q12769
  ENST ID: ENST00000526870
  CDS Start-End: 136-810
ccggccactggaaggttcccgcagatagagtctgcctcccctgcccccttctcttctggattcctcgctgcccaccctcattctcccggtggaagcctcgcaacgaagggccggagccgcctttctgctcccggaatgcttcacctgtccgcagctccgcccgccccacccccggaagtgacggcgaccgcgcggccctgcctttgttccgttgggcgtcgcggcgacggcgggaagatggcggcggcgggagccctggaacggagcttcgtggagctaagcggagctgagcgcgaaaggccgaggcactttcgggaattcacagtctgcagcattgggactgcaaatgccgtggctggcgccgtaaaatacagtgaaagcgcgggaggcttttactacgtggagagtggcaagttgttctccgtaaccagaaacaggttcattcattggaagacctctggagatacattggagctgatggaggagtcactggacataaatctgttgaataatgccattcgcctaaaattccaaaattgcagtgttttacctggaggggtttatgtctctgagactcagaatcgtgtgataatcttgatgttaaccaatcaaacagtgcacaggttacttttaccacacccctcccggatgtataggagtgtaagttggctaagtgcaatatcttttatttcccaaattactctgggtgtcacaaatgtagtgctggagcgatgtcttttggaattgaaggaaatttggattctcgttatccctcaccaagcatactttgatagctaccgcttaaaatgatcaggcatacattttaagttgagaattagttttcattaagaagaatagctttcttaaacttgacagttttttactttaaaaacttttttagcaatagagaggaactgagcaaaattctggttattttgatttaatagatttttctttttaattactcaacaggagttggtagttgacagtcagatgcagtcaatattcactgacattggaaaagttgatttcacagatccttgcaactatcagttaattccagcagtacctggaatatctcctaattccaccgcctctacagcctggctcagcagtgatggggaggccctgtttgccttaccatgtgcttctgggggaatctttgttcttaagctacctccttatgacatacctggtaagaatgggaactgagcatggatttaactttaaacaaggaatgttaacattgaaacagttcaacctcgtcatccaatgcagggattgcatctctactgccccggaactggtcattcattattgcttgcctaatgagtccctaatgctttacttttatacagtggataaggaactataaagcatattggagcacggaaaaacaaatagacaagtataagacagcctattctaaatcttgtagtagagatgggttgcctaattgtctgccctgagatggaggcattataacattataattaaattaattgaaacaaagacattaaataccctgcaccaagtt

SEQ ID NO: 161255 - DNA, 4138 bp, Homo sapiens
  Payload ID: 11493
  Gene Symbol: NUP160
  Gene Name: nucleoporin 160kDa
  ENST ID: ENST00000528071
  CDS Start-End: 1-3370
cggcgacggcgggaagatggcggcggcgggagccctggaacggagcttcgtggagctaagcggagctgagcgcgaaaggccgaggcactttcgggaattcacagtctgcagcattgggactgcaaatgccgtggctggcgccgtaaaatacagtgaaagcgcgggaggcttttactacgtggagagtggcaagttgttctccgtaaccagaaacaggttcattcattggaagacctctggagatacattggagctgatggaggagtcactggacataaatctgttgaataatgccattcgcctaaaattccaaaattgcagtgttttacctggaggggtttatgtctctgagactcagaatcgtgtgataatcttgatgttaaccaatcaaacagtgcacaggttacttttaccacacccctcccggatgtataggagtgagttggtagttgacagtcagatgcagtcaatattcactgacattggaaaagttgatttcacagatccttgcaactatcagttaattccagcagtacctggaatatctcctaattccaccgcctctacagcctggctcagcagtgatggggaggccctgtttgccttaccatgtgcttctgggggaatctttgttcttaagctacctccttatgacatacctggtatggtgtcagtcgtggaactgaaacagagttcagtaatgcaacgattgcttacaggctggatgccaacagctatcaggggtgaccagtcgccttcagatcgtcccctcagtcttgctgttcattgtgtggagcatgatgccttcatctttgctttgtgtcaggatcataaactacgaatgtggtcttacaaggagcaaatgtgcctaatggtagctgacatgctggagtatgtccctgtgaagaaagaccttcggcttactgctggaactggacacaaattacggcttgcttattcccccaccatgggactctacctggggatatacatgcatgcaccaaaacgaggacagttctgcattttccagttggtgagcactgagagtaatcgctatagtctcgatcatatttcttcactgttcacttctcaggagacactgattgactttgccttaacttccacggatatctgggccctgtggcatgatgctgagaaccaaacagtagtgaaatacatcaactttgaacataatgttgcaggtcagtggaatccagtttttatgcagcctctgccagaggaagagattgtcatcagagatgatcaagaccccagagagatgtatctgcaaagtctttttacaccaggacaattcacaaatgaagctttatgtaaggctttacagattttctgccgaggaactgagaggaatttggatctttcctggagtgaactgaagaaagaagttactttagctgttgaaaatgagcttcaaggaagtgtaacagagtatgaattctcccaggaggagtttcgaaatttacaacaagaattctggtgcaagttctatgcctgttgtcttcagtatcaagaagccctctctcaccctcttgccctacatttgaatccacacacaaacatggtgtgcctgctgaaaaaagggtacctgtctttccttattccctcatccttagtggatcatttgtatctcctgccttatgagaaccttttgacagaagatgagacaaccatatctgatgatgtggacatcgctcgggatgtcatatgtcttataaaatgcctccggctgattgaagagtcagtaactgtggatatgtcagttataatggaaatgagttgttataacctacagtctccggaaaaggctgcagagcagattctggaagatatgatcactattgatgtagaaaatgtgatggaggatatttgtagtaaactgcaagagattaggaacccaatccatgcaattggactacttatacgggaaatggattatgaaacagaagtggaaatggaaaagggattcaatccagctcagcctttgaatattcgaatgaatcttacccagctctatggtagtaacacagcagggtatattgtgtgcagaggggtgcataaaatcgccagtactcgtttcctgatctgcagagatcttttgatcttacagcagctgttaatgaggcttggagatgctgtgatttggggaactggtcagctctttcaagctcagcaagacctactacatcgaacagctcccctactcttatcttattacctcattaaatggggaagtgagtgcttggcaactgatgttccacttgacacactggagtctaatctccaacacttatcagtactggaattaacagactctggtgctttaatggcaaataggtttgtatctagtcctcagactattgtggagttattcttccaagaagttgcaagaaaacacattatatctcacctcttctctcagccaaaggcacctctgagccaaactggattgaattggcctgaaatgattactgcaattaccagttatttattgcagcttttatggcctagcaatcctggttgtctctttctagaatgtttgatgggaaattgccaatatgtacaattgcaggattatattcaactgctacatccctggtgtcaagtcaatgttggttcctgtcgatttatgctgggaaggtgttacctagttacaggagaaggacagaaggctctggaatgtttttgtcaggcagcatctgaagtaggcaaagaggaattcttggatcgcttgattcgctcagaggatggggagatcgtgtctacccccaggctgcagtattatgacaaggttttacgactactagatgtcattggtttgcctgaactggttattcagttggctacatcagccataactgaagcaggtgatgactggaaaagtcaggctactctaaggacatgtattttcaaacatcatttggatttgggtcacaatagccaagcatatgaagccttaacccaaattcctgattccagcaggcaattagattgtttacggcagttggtggtagttctttgtgaacgctcacagctacaggatcttgtagagtttccctatgtgaatctgcataatgaggttgtgggaataattgagtcacgtgctagagctgtggaccttatgactcacaattactatgaacttctgtatgcctttcacatctatcgccacaattaccgcaaggctggcacagtgatgtttgagtatggaatgcggcttggcagagaagttcgaactctccggggacttgagaaacaaggcaactgttatctggctgctctcaattgtttacgacttattcgtccagaatatgcgtggattgtgcagccagtgtctggtgcagtggtatgaaaacatttcatcctggaatttgggggttcatcctggaacaagtaaatctacttgttttggtcctttcaaaactattgtgtcattttgcttcttttgatttacaatttctactgagatatttgtgaaaaaaatctatgtttacaattcaattgttgtatattactacccctttagttttcaagttcagaattattgtaggaagaaatattgcagagtggttttggagttagacctgacccaattcagacaagttacttaatcttttgtcattctctggcataaaatacggataatatctactttataggattgtttgggtattaatgagataattcaagtcgattgcttagaacagtaacagtgcctggcccacaaactgtgctcagtaaatggtagctgcttttatttctattgtgtttgttaatgcagtctacagttactgttttaaaggacacacactttgagtttttcctatcatactgatgggtcagatacatgcagctgtttctgttatatataactctggagccgagaaaaattagttgatttacatggagatcaaatccctgtccttggactcagtaatatgttatggttaagttaacaacttggcaaagaacttctttctttgtctcatagttacagtacctctgtaagaagagctctgctggtcgaaacaaaaataatttccattgagaaaatttaagcataaaagctatgaatcaccgttaatgatatcagaataaaatactgattttcacagttaaa

SEQ ID NO: 161256 - DNA, 4811 bp, Homo sapiens
  Payload ID: 11493
  Gene Symbol: NUP160
  Gene Name: nucleoporin 160kDa
  ENST ID: ENST00000530326
  CDS Start-End: 1-3943
ggcggcgggagccctggaacggagcttcgtggagctaagcggagctgagcgcgaaaggccgaggcactttcgggaattcacagtctgcagcattgggactgcaaatgccgtggctggcgccgtaaaatacagtgaaagcgcgggaggcttttactacgtggagagtggcaagttgttctccgtaaccagaaacaggttcattcattggaagacctctggagatacattggagctgatggaggagtcactggacataaatctgttgaataatgccattcgcctaaaattccaaaattgcagtgttttacctggaggggtttatgtctctgagactcagaatcgtgtgataatcttgatgttaaccaatcaaacagtgcacaggttacttttaccacacccctcccggatgtataggagtgagttggtagttgacagtcagatgcagtcaatattcactgacattggaaaagttgatttcacagatccttgcaactatcagttaattccagcagtacctggaatatctcctaattccaccgcctctacagcctggctcagcagtgatggggaggccctgtttgccttaccatgtgcttctgggggaatctttgttcttaagctacctccttatgacatacctggtatggtgtcagtcgtggaactgaaacagagttcagtaatgcaacgattgcttacaggctggatgccaacagctatcaggggtgaccagtcgccttcagatcgtcccctcagtcttgctgttcattgtgtggagcatgatgccttcatctttgctttgtgtcaggatcataaactacgaatgtggtcttacaaggagcaaatgtgcctaatggtagctgacatgctggagtatgtccctgtgaagaaagaccttcggcttactgctggaactggacacaaattacggcttgcttattcccccaccatgggactctacctggggatatacatgcatgcaccaaaacgaggacagttctgcattttccagttggtgagcactgagagtaatcgctatagtctcgatcatatttcttcactgttcacttctcaggagacactgattgactttgccttaacttccacggatatctgggccctgtggcatgatgctgagaaccaaacagtagtgaaatacatcaactttgaacataatgttgcaggtcagtggaatccagtttttatgcagcctctgccagaggaagagattgtcatcagagatgatcaagaccccagagagatgtatctgcaaagtctttttacaccaggacaattcacaaatgaagctttatgtaaggctttacagattttctgccgaggaactgagaggaatttggatctttcctggagtgaactgaagaaagaagttactttagctgttgaaaatgagcttcaaggaagtgtaacagagtatgaattctcccaggaggagtttcgaaatttacaacaagaattctggtgcaagttctatgcctgttgtcttcagtatcaagaagccctctctcaccctcttgccctacatttgaatccacacacaaacatggtgtgcctgctgaaaaaagggtacctgtctttccttattccctcatccttagtggatcatttgtatctcctgccttatgagaaccttttgacagaagatgagacaaccatatctgatgatgtggacatcgctcgggatgtcatatgtcttataaaatgcctccggctgattgaagagtcagtaactgtggatatgtcagttataatggaaatgagttgttataacctacagtctccggaaaaggctgcagagcagattctggaagatatgatcactattgatgtagaaaatgtgatggaggatatttgtagtaaactgcaagagattaggaacccaatccatgcaattggactacttatacgggaaatggattatgaaacagaagtggaaatggaaaagggattcaatccagctcagcctttgaatattcgaatgaatcttacccagctctatggtagtaacacagcagggtatattgtgtgcagaggggtgcataaaatcgccagtactcgtttcctgatctgcagagatcttttgatcttacagcagctgttaatgaggcttggagatgctgtgatttggggaactggtcagctctttcaagctcagcaagacctactacatcgaacagctcccctactcttatcttattacctcattaaatggggaagtgagtgcttggcaactgatgttccacttgacacactggagtctaatctccaacacttatcagtactggaattaacagactctggtgctttaatggcaaataggtttgtatctagtcctcagactattgtggagttattcttccaagaagttgcaagaaaacacattatatctcacctcttctctcagccaaaggcacctctgagccaaactggattgaattggcctgaaatgattactgcaattaccagttatttattgcagcttttatggcctagcaatcctggttgtctctttctagaatgtttgatgggaaattgccaatatgtacaattgcaggattatattcaactgctacatccctggtgtcaagtcaatgttggttcctgtcgatttatgctgggaaggtgttacctagttacaggagaaggacagaaggctctggaatgtttttgtcaggcagcatctgaagtaggcaaagaggaattcttggatcgcttgattcgctcagaggatggggagatcgtgtctacccccaggctgcagtattatgacaaggttttacgactactagatgtcattggtttgcctgaactggttattcagttggctacatcagccataactgaagcaggtgatgactggaaaagtcaggctactctaaggacatgtattttcaaacatcatttggatttgggtcacaatagccaagcatatgaagccttaacccaaattcctgattccagcaggcaattagattgtttacggcagttggtggtagttctttgtgaacgctcacagctacaggatcttgtagagtttccctatgtgaatctgcataatgaggttgtgggaataattgagtcacgtgctagagctgtggaccttatgactcacaattactatgaacttctgtatgcctttcacatctatcgccacaattaccgcaaggctggcacagtgatgtttgagtatggaatgcggcttggcagagaagttcgaactctccggggacttgagaaacaaggcaactgttatctggctgctctcaattgtttacgacttattcgtccagaatatgcgtggattgtgcagccagtgtctggtgcagtgtatgatcgccctggagcatcccctaagaggaatcatgatggagaatgcacagctgcccccacaaatcgacaaattgaaatcctggaactggaagatctggagaaagagtgttccttggctcgcatccgcctcactttggctcagcatgatccatcagcggttgcagttgctggaagttcatcagcagaggaaatggtcactctcttggttcaggcgggcctctttgacactgccatatcactctgtcagacttttaagcttcccttaacgccagtctttgaagggcttgccttcaaatgcatcaaattgcaatttggaggagaggcagcacaagcagaagcctgggcctggctagcagccaatcagctctcatctgtcatcactactaaggagtctagtgctacagatgaagcatggcgactattatccacttacctggagaggtacaaagtccagaataacttgtatcaccactgtgtaatcaacaagctcttgtctcatggagtgcctctgcctaattggcttataaacagttacaaggactaccagcaaaaagttgataaggcaacacgggatttattatatcgtcggaccttgtgatttggattgtcacctagcctttgtaaccgcttggtgcctcttaggacttaagactaccctacaggaaccctgtactcaaggccgatttttgtaactgtaaatgatgtgtacaacattcaagtctgcattctgcacaagataggagggcggaagagtcagaggaccctgtgcttgctggtggtgctaacacaatttctggtgttcaaccttggtctcaaatagctgcttttgtatatgattcacgagcttttttagagtttatatttttttaaactaccgaagacattcattatctgcaaattaagactcaccttcactttccaaaatagctgagggttgttggcttgttgtagctgaccaccaaaagcagtcactgcaaatcttttaattcttccctatcaccttttgtattttaatgcaattattttggtccagaactgacctgtattttctgtattgtacacaaaagctaataattttgtgtactttttatttattttggaggttttatatgatcttcaattgagtattaaataatttgcctagattaagcctaaaatgatgaccagctaattaaagaagatattttgaatctggttctgagctaaagttgagtaaattcttagctaagaaaaaattggaaatccatcatctatattagcaacagattctcagagtaaattgttaacttctatgatttatgataatcaagctggacttgatcatacaagttagtctcataatgtattggaccaaaatgtaaacttcattggtcagatttagaagcattcatgctcacaagttttgggaaagtgaaaaataataaaatcatcttggattttattctgtatattaaaatttatctttt

SEQ ID NO: 161257 - DNA, 1961 bp, Homo sapiens
  Payload ID: 11493
  Gene Symbol: NUP160
  Gene Name: nucleoporin 160kDa
  ENST ID: ENST00000528501
  CDS Start-End: 1-309
gacggcgggaagatggcggcggcgggagccctggaacggagcttcgtggagctaagcggagctgagcgcgaaaggccgaggcactttcgggaattcacagtctgcagcattgggactgcaaatgccgtggctggcgccgtaaaatacagtgaaagcgcgggaggcttttactacgtggagagtggcaagttgttctccgtaaccagaaacaggttcattcattggtatggtgtcagtcgtggaactgaaacagagttcagtaatgcaacgattgcttacaggctggatgccaacagctatcaggggtgaccagtcgccttcagatcgtcccctcagtcttgctgttcattgtgtggagcatgatgccttcatctttgctttgtgtcaggatcataaactacgaatgtggtcttacaaggagcaaatgtgcctaatggtagctgacatgctggagtatgtccctgtgaagaaagaccttcggcttactgctggaactggacacaaattacggcttgcttattcccccaccatgggactctacctggggatatacatgcatgcaccaaaacgaggacagagacggggtttcgccatgttgcctggtctcaaactcctgagttcaagcagtccacccacctcggcttcccaatgtgctgggattacaagtgtgaaccacagcacccagcctgaatttttcttctgcattttccagttggtgagcactgagagtaatcgctatagtctcgatcatatttcttcactgttcacttctcaggagacactgattgactttgccttaacttccacggatatctgggccctgtggcatgatgctgagaaccaaacagtagtgaaatacatcaactttgaacataatgttgcaggtcagtggaatccagtttttatgcagcctctgccagaggaagagattgtcatcagagatgatcaagaccccagagagatgtatctgcaaagtctttttacaccaggacaattcacaaatgaagctttatgtaaggctttacagattttctgccgaggaactgagaggaatttggatctttcctggagtgaactgaagaaagaagttactttagctgttgaaaatgagcttcaaggaagtgtaacagagtatgaattctcccaggaggagtttcgaaatttacaacaagaattctggtgcaagttctatgcctgttgtcttcagtatcaagaagccctctctcaccctcttgccctacatttgaatccacacacaaacatggtgtgcctgctgaaaaaagggtacctgtctttccttattccctcatccttagtggatcatttgtatctcctgccttatgagaaccttttgacagaagatgagacaaccatatctgatgatgtggacatcgctcgggatgtcatatgtcttataaaatgcctccggctgattgaagagtcagtaactgtggatatgtcagttataatggaaatgagttgttataacctacagtctccggaaaaggctgcagagcagattctggaagatatgatcactattgatgtagaaaatgtgatggaggatatttgtagtaaactgcaagagattaggaacccaatccatgcaattggactacttatacgggaaatggattatgaaacagaagtggaaatggaaaagggattcaatccaggtaaatgacagaacaacaaatgtgcctctttgattaaaacaatgatgcattcaactccatttttcttctttttacagctcagcctttgaatattcgaatgaatcttacccagctctatggtagtaacacagcagggtatattgtgtgcagaggggtgcataaaatcgccagtactcgtttcctgatctgcagagatcttttgatcttacagcagctgttaatgaggcttggagatgctgtgatttggggaactggtcagctctttcaagctcagcaagacctact

SEQ ID NO: 161258 - DNA, 5689 bp, Homo sapiens
  Payload ID: 11494
  Gene Symbol: NUP188
  Gene Name: nucleoporin 188kDa
  Uniprot ID: Q5SRE5
  ENST ID: ENST00000372577
  CDS Start-End: 22-5271
agggcgagcgggcgcgcgaagatggcggcggccgccggcgggccgtgtgtgaggagcagtagagaactgtggactattctgcttggaaggtcagctctgagagagctgagtcagattgaggcagaactgaataaacattggcggcgattgttagaggggctttcttactacaaacctcccagtccaagttcagctgaaaaagtgaaagctaataaagatgtagcttcaccattgaaggaactgggtttaagaatcagcaagtttttgggtcttgatgaagaacagagtgtgcagttactccagtgttacctgcaagaggactacaggggtactcgggactcagtaaagacagtactgcaagatgagaggcagagccaggccttaatcctgaagattgcagattattattatgaagaaagaacctgtattcttcgttgtgtcttacaccttctcacttacttccaagatgaaagacacccctatagggttgaatatgcagactgtgttgataaattggagaaggaactagtttcaaaatacagacagcagttcgaagagctttataaaactgaagcaccaacttgggagacacatggaaatctcatgacagagcgccaagtgtctcgctggtttgttcagtgccttcgggaacagtccatgctgctagaaattattttcctttattatgcatactttgagatggcacccagtgacttacttgtattaaccaagatgtttaaagagcaaggatttggtagtaggcagaccaataggcacctggtggatgagactatggatccttttgtagatcggattggctacttcagtgccctcatcctggtggagggcatggatatcgagtccttgcataagtgtgctttggatgacagaagagaactgcatcagtttgcgcaggatgggcttatttgtcaggatatggactgtttaatgttgacctttggggacattccacatcatgccccagtgcttttggcctgggctctcctccgtcacactctgaacccagaagagacaagcagtgtggtccggaagataggtggcacagccatccagctgaatgtgtttcagtacttgacccgattgctccagtcccttgccagtgggggaaatgattgcaccaccagcactgcatgcatgtgtgtctatggactgctctctttcgttctgacctcgttggagctgcacaccctgggcaatcagcaggatataattgatacagcatgtgaagtattggccgacccttctcttccggaactgttctggggaacagagccaacttctggccttgggatcattctggacagtgtgtgtggaatgtttccccaccttctctccccactcctgcaactgctccgagccctggtatcagggaagtccacagccaaaaaggtgtatagcttcttggataagatgtctttctacaatgaactttataaacacaagcctcatgatgtgatctcccatgaagatggaactctttggcggagacaaacacccaaactcctttatccccttgggggtcaaaccaaccttcgcatacctcaaggcactgtgggccaagtaatgttggatgatagggcatacctggtacgctgggaatactcctatagcagctggaccctctttacctgcgagattgaaatgttgcttcatgttgtttcaactgcagatgtgattcagcactgccagcgagtcaaacccatcattgatctcgtccataaggtcatcagtacagacctgtcgatagcagactgtctcctgcccatcacatctcgcatctacatgctgctgcagcggttaacgacagtgatctccccacctgtggatgtcattgcttcttgtgtcaactgcttaactgttttggctgcccgcaatccagcaaaggtctggactgatcttcgtcacacaggttttttaccatttgtggcccatcctgtctccagcctgagtcagatgattagtgcggaagggatgaatgctggagggtacggaaacctcttgatgaacagtgaacagcctcagggcgagtatggggttactattgcctttctgcgcttgatcaccacccttgtcaaggggcaacttggtagtacccagagccaaggacttgtaccctgtgtaatgtttgtgctgaaggagatgcttcccagctaccataagtggcgctacaactctcatggagtgagggaacagattggttgcctgatcttggagctgattcatgcgatactgaacctgtgccacgagacagacctgcacagcagtcatactcccagcctgcagtttctctgcatctgcagcctggcatacacagaagcaggacagacagttatcaatatcatgggcattggcgtggacaccattgacatggtgatggctgctcagcctcgaagtgatggggcagagggccaggggcagggccagctgctgatcaagacagtgaaactggcattctccgtcaccaacaatgttattcggctgaaacctccttctaatgtggtgtcccccctggaacaggctctctcacaacatggtgctcatggaaacaacctcattgctgttctagccaaatacatctaccacaaacatgaccctgctttgccacgtcttgccattcagctgctgaaacgtctggccacggtggccccaatgtcagtgtatgcttgtctgggcaatgatgcggctgccattcgtgatgccttcctgacccgattgcagagcaaaattgaggacatgcgcatcaaagtcatgattctagagttcctcactgttgcagtagagacccagccaggcctcatcgaactgtttctgaacctggaagttaaggatggcagtgatggctcaaaggaattcagccttgggatgtggagctgtctccatgcagtgctggagctgattgattcccaacagcaagatcgatactggtgcccacccctgctgcatcgtgccgccattgcctttttgcatgctctgtggcaggatcggagggacagtgccatgctggtcctccgaaccaaacccaagttttgggaaaatttaaccagtccgctgtttggaaccctttctcctccctctgaaacatcagagcccagcatcctggaaacctgtgccctaatcatgaagataatttgcttggagatatactatgtagtaaagggttcattagaccagtcattaaaggatacactgaagaaattttccatcgagaaacgctttgcctactggtcagggtatgtcaagtcattggcagttcacgtggccgaaacagaaggcagcagctgcacctccttgttagagtaccagatgctggtgtccgcctggaggatgcttctcatcattgccaccactcatgcagatataatgcacctgactgactctgtggtgcgtcgccagctctttcttgacgtgcttgatggaaccaaagcattactcctagttccagcctcagtgaactgccttcgccttggctccatgaagtgcactctgctgcttatcctcctccggcagtggaagagagagttaggttctgtggatgaaatccttggacccttgacggagatcctggagggagtgctgcaggccgaccagcaactcatggagaagaccaaggccaaggtgttctcagcattcatcacagtgttgcaaatgaaggagatgaaagtaagtgacatcccccagtactcccagctggtgctgaatgtctgtgagaccctccaagaggaagtgattgcactcttcgaccagacccgccacagtctggcattaggcagtgccacagaggacaaggacagcatggagactgacgactgttctcggtcccggcacagggaccagcgtgatggggtgtgtgtcctgggcctgcacctggccaaggagctgtgtgaggtagacgaggatggtgactcctggctgcaggtaacccgcaggctccccatcctacccaccctcctcaccactctagaggtgagccttcgcatgaagcagaacctgcatttcactgaggccacattgcatctgctcctcaccctggctcgcactcagcagggagccacagcagtggctggagctggcatcacccagagcatttgtttgccccttctgagtgtgtaccagctgagcaccaacggcacagcacagacacctagtgcctctcggaagtccctggatgccccctcttggccaggagtctaccgcctgtccatgtccctgatggagcagctgctcaaaactctgcgctacaacttcctgcctgaggccctggacttcgtgggtgtccaccaggagcggaccttacagtgcctcaacgcagtgaggacagtgcagagtctggcctgcctggaggaggcggaccacaccgtgggttttattctgcagctctctaacttcatgaaggagtggcacttccacctgcctcagctcatgcgtgatatccaggtcaacctgggttacttgtgccaggcatgtacctctctcctgcacagtcgaaagatgctgcagcattacttacagaacaaaaatggggatggcctcccctcagctgttgcccagcgagtccagaggccaccgtctgctgcttctgctgccccctcctcctcaaagcagcccgctgctgacacagaggcatcagagcagcaggccttgcacacagtccagtatggccttctcaagatcctcagcaagacgctggcagccctgcgccacttcaccccagatgtctgccagattctgctggatcagtccctggaccttgctgaatacaacttcctgtttgccctgagctttaccactcccacctttgactccgaagtggccccctccttcgggacccttctggccacagtgaatgtggccctcaacatgcttggagagctggacaagaaaaaggagcccctcacccaggcagtggggctcagcacacaggcagaagggaccaggacgttaaagtccctcctgatgtttaccatggaaaactgcttctacctgctcatctctcaggcgatgcggtaccttagggacccggctgtgcacccccgggacaaacagcggatgaagcaggagctcagctctgagttgagcacgctgctgtccagcctctcgcgctacttccgccggggagcccccagctcccctgccactggtgtcctcccctcgccgcagggcaagtccacctctctctccaaagccagccctgagagtcaggagcctctgatccagttggtgcaggcgtttgtccggcatatgcaaagatagggcagtgctgttctgcccacctacccctctccaccagcctacactgcaccctggctggcaggggtgctgctggctgctagggcctatacaatggagggcacctcctgtcacccccctcccggagtagccacgactccagccaccacccactgacgttatttttatactagatgaagaggtcaacagcaggcatggggagccgagtcttctgtgctcaggtcctcacgctgcagacgccccctagaggaactttccttcctttccagcattccccacagcactgccggccaggggagaggcggcagcccagcagagggctctatgcacgggtttcaaacctgttttccacactctgtctttgcagttttggtaattctgtggtctatttatacagatattaaaatcttgtttatagaca

SEQ ID NO: 161259 - DNA, 6266 bp, Homo sapiens
  Payload ID: 11495
  Gene Symbol: NUP205
  Gene Name: nucleoporin 205kDa
  Uniprot ID: Q92621
  ENST ID: ENST00000285968
  CDS Start-End: 27-6065
aagggctctgttagtgcgcctctaagatggcgacgcctttggcggtaaattcggctgctagtctatggggtccttacaaagacatttggcataaagtgggaaatgctctttggagaagacaacctgaagctgttcaccttcttgataagattttgaagaaacacaaacctgacttcatctcattgttcaaaaatccgccaaaaaatgttcaacagcatgagaaggttcagaaagccagtacagagggagtcgccattcagggtcaacagggaactcgacttcttcctgaacagctcattaaagaagcctttattctcagtgacctttttgatattggagaattggcagctgttgagcttcttcttgctggagagcatcaacagccacattttcctggccttaccagaggattagtagctgttcttctgtactgggatggaaagcgatgcattgcgaattccttgaaagccttgatacagtctagacggggaaagacatggaccctagaactcagtccagagctggcttccatgacaacacgctttacagatgagctgatggagcaaggattgacttataaagttcttacgctggtgtcacagattgatgtgaataatgagtttgagaaactacagcgagagagaggtttgggcagtgaaaaacatcgcaaagaggtttctgatctcattaaggagtgcaggcagtctcttgcagaaagcctttttgcctgggcttgccagtcacctttaggcaaagaagacactctcctcctcattggacatttggaaagagtgacagttgaggctaatggctcactggatgcagtgaatctggctcttcttatggcgcttctatactgttttgatatcagttttatagagcaaagcacagaggaacgagatgatatgattcatcaacttccactgttgacagaaaaacagtacattgcaacaattcactctcgtcttcaggactcacagctttggaaactgcctgggctccaagccactgttagacttgcctgggcgctggcattgaggggaatatcccagctacctgatgtgacagctctggcagaattcacagaggcagatgaagcaatggcagaactcgcaattgctgacaacgttttcctgttcctcatggaatctgtagtggtatcagaatacttttatcaggaagaattttatattcgcagagtccataatctcatcacagatttccttgcacttatgccaatgaaggtgaaacagctgaggaatcgggcagatgaagatgctcgaatgattcacatgagtatgcagatgggtaatgaaccccccatttcacttagaagggacctggaacacttaatgcttttgattggcgagctatataaaaagaacccttttcatctggagcttgctctagaatattggtgtcccacagagcctcttcagactccgactatcatgggctcttatctaggggtggctcatcagcggccccctcaacgccaggttgtcttgtcaaagtttgttaggcaaatgggtgacctgttgcctccaactatttatattccttatttgaagatgctccagggattggccaatgggcctcagtgtgcccactactgtttcagcctgctcaaagtcaatggtagtagtcatgttgaaaatattcagggagcaggtggcagtcctgtttcctgggaacatttctttcactccttgatgctttaccacgaacaccttcggaaggatcttccaagtgcagatagtgtccagtaccgtcaccttccttcccgtggcatcacccagaaggagcaagatggattgattgcttttttgcagctcacgtctaccatcattacttggagtgaaaatgctcgcttggcactctgtgaacaccctcagtggacccctgttgtggtgattctgggactcctccaatgcagtattccccctgtcctaaaagctgagctactgaagacactcgcagcttttggaaaatctcctgaaattgctgcttccctctggcagtcattggaatacactcagatactgcagaccgtgaggattccaagccaaaggcaagctattggtattgaggttgaactaaatgaaatagaatcccggtgtgaagaatacccattgactcgggccttttgccagcttattagtactctggtggagagctcatttccttctaatttgggtgctggactgcggccccctggctttgacccttatttgcagttccttagagactctgtgtttctacgattccgtacaagagcttaccggagagcagctgaaaagtgggaagttgctgaggtggttttggaggtgttttataaattgctcagagattatgagcctcagcttgaagattttgtagaccagtttgtggaactacaaggagaagaaatcatagcctataagccacctggatttagtctgatgtatcatctgctgaatgagtcaccaatgttggagcttgctctcagtttactggaagaaggagttaagcagcttgacacctatgccccctttcctgggaaaaaacacctggagaaagcagtacagcattgccttgcacttctcaatcttactctgcaaaaggaaaatctttttatggaccttctaagagagagtcaactggctctaatagtctgtcctttagaacagcttttgcagggaattaatcccagaactaagaaggcagataatgtggtaaacattgccagatacctatatcatggcaatactaatccagaattggcttttgaaagtgccaagatcctctgttgtatctcttgcaactctaatattcagataaagttggttggagatttcacacatgaccagagtataagtcagaaactaatggctggatttgtggagtgtttggattgtgaagatgcagaagaatttgtacgtctggaagagggatcagaacttgaaaagaaattagttgcaattcgtcatgaaacaagaatccacatcttgaatcttctcattacctctctggaatgcaatccacccaatcttgctctctacctgttgggctttgaattgaaaaaacctgtcagtactacaaacctacaagatccaggagtgttaggttgccctcggacatgccttcacgccattctaaacatcttggagaaaggaacggaagggagaacaggcccagtggcggtgcgagaatctcctcagctggctgagctatgttaccaggtcatatatcagttatgtgcatgctctgatacatctggtcctactatgaggtacttgagaaccagccaggatttcttattttcccagttgcagtatctaccattttctaacaaagaatatgaaatatctatgctgaaccagatgtcatggcttatgaaaactgcctcaatagagctaagggtaacctctctgaatcgtcagcggtcacatacccagaggctcctacacctcttactggatgacatgccagtgaaaccatactcagatggtgaaggaggaatagaagatgaaaacaggtctgtttctgggttccttcactttgacactgctacaaaagtacgtcgaaaaattctaaatattcttgactcgattgacttcagtcaggagatccctgagcctttgcagttggatttttttgatcgggcccagattgaacaagttattgctaactgtgaacacaagaatttacggggacagacagtctgcaatgtcaagcttcttcatagggttcttgtagctgaagtaaatgcccttcagggtatggcagccataggacagagacctctactaatggaggaaatcagcactgtacttcagtatgtggtaggaagaaataaattgctgcagtgtcttcatgcaaaacgtcatgctctggagtcgtggaggcaactagtagaaattatactgacagcttgtccccaggacctcattcaggcagaggatcgacaactgattattcgtgatattttacaagatgtgcatgataagatactggatgatgaagctgcgcaagagttaatgcctgtggtcgccggggcagtgttcacactgactgctcacctaagccaggccgtcctcactgaacagaaggaaacatcagtcttgggaccagcagaggcccattacgcttttatgcttgatagttgcttcacctcacctcctcctgaagagaacccattagtgggttttgcttctattggagattcttcactttacatcatattgaagaaactgttagacttcattttgaagacaggtggtggattccaacgagtgaggactcacttgtatggctctctgctttattacttacagattgcccagagacctgatgaaccagacaccttagaagcagccaagaaaaccatgtgggaaaggctgacagcccctgaagatgtatttagcaaattacagcgagaaaacatagccattattgaaagttatggcgccgccctcatggaagtggtctgtcgagatgcttgtgatggtcatgagattggaaggatgctggccctggctctacttgatagaattgtctccgtggataaacagcagcagtggcttttgtatctttctaacagtggctacttgaaggtcctcgtagacagcttggtagaagatgaccgtactttgcagagcttactcaccccacagcctccccttttaaaagcactttatacttatgaatctaaaatggcatttctcacaagagtggcaaagatacagcagggtgcattagagctgctaagatcaggggtgattgtgagactagctcaatgccaagtctatgacatgcgcccagaaacggacccgcagagcatgtttggcatgagagaccctccaatgttcatccctaccccagtggatcgctaccgccagattctcctcccagctctccagctgtgccaggtcatcctcacatctagtatggcccagcacttgcaggcagcagggcaggtattgcagtttcttatttcacattctgataccatacaagcaattctgcgctgtcaggatgttagtgctgggtctttgcaggaattggctctgctgacaggaattataagtaaagcagcacttcctggaatattaagtgaacttgacgttgatgtaaatgaagggtctctaatggagctacagggacatattggaagattccagcgccagtgcttaggactactaagtcgctttggtggctctgacagactgcgtcagtttaaatttcaagacgataatgtggagggagataaagtaagcaagaaagatgagattgaactggctatgcagcagatttgtgccaatgtaatggaatattgccagtcactcatgttacagagttcccctaccttccagcatgctgtgtgtctcttcactcctagcctttcagaaacagttaatagagatggaccgcggcaagatacccaagctccagtggttccatactggcgcctgcctggtttaggcattatcatctacctgctgaaacagagtgctaatgatttcttcagctattatgacagtcatcgacagagtgtcagcaagctacaaaatgtagagcagcttcccccagatgagataaaagagttgtgtcagtctgtgatgcctgctggtgttgataaaatctccactgctcagaaatatgttctagcaagacggcgcttggtgaaggtgatcaacaatcgagctaaactgctttccctttgttcttttatcatagagacctgcctatttattctttggcgccatctggagtactacttgttacattgcatgcccacggattctcaagattccttatttgcctcgagaaccttgtttaaaagcagaagactgcaagattccttcgcctcagaaaccaatctagattttagaagtgggctggctatagtgagccaacatgatttagaccagcttcaggctgatgcaatcaacgcttttggagaatcactacaaaagaaacttctggacattgaaggattatattcaaaagttcgatctcgatatagtttcatacaggctcttgtcagacgtatccgtggcctcttgaggatatcaaggaactgagagcccgtgcttatgctcttctatgagagagatgaattggggagaattgtctccattttatagattagtttctttctaaattatgaccaaaaatattttgctatttctttctttgtatatggacatcttttctgtaaacttcttcccctagttccatcctcactagtaaaaaataaatactttttaaaaaaacaaaacaaa

SEQ ID NO: 161260 - DNA, 1800 bp, Homo sapiens
  Payload ID: 11495
  Gene Symbol: NUP205
  Gene Name: nucleoporin 205kDa
  ENST ID: ENST00000477620
  CDS Start-End: 1-821
ctcacttgtatggctctctgctttattacttacagattgcccagagacctgatgaaccagacaccttagaagcagccaagaaaaccatgtgggaaaggctgacagcccctgaagatgtatttagcaaattacagcgagaaaacatagccattattgaaagttatggcgccgccctcatggaagtggtctgtcgagatgcttgtgatggtcatgagattggaaggatgctggccctggctctacttgatagaattgtctccgtggataaacagcagcagtggcttttgtatctttctaacagtggctacttgaaggtcctcgtagacagcttggtagaagatgaccgtactttgcagagcttactcaccccacagcctccccttttaaaagcactttatacttatgaatctaaaatggcatttctcacaagagtggcaaagatacagcagggtgcattagagctgctaagatcaggggtgattgtgagactagctcaatgccaagtctatgacatgcgcccagaaacggacccgcagagcatgtttggcatgagagaccctccaatgttcatccctaccccagtggatcgctaccgccagattctcctcccagctctccagctgtgccaggtcatcctcacatctagtatggcccagcacttgcaggcagcagggcaggtattgcagtttcttatttcacattctgataccatacaagcaattctgcgctgtcaggatgttagtgctgggtctttgcaggaattggctctgctgacaggaattataagtaaagcagcacttcctgcattctacattttataggaatattaagtgaacttgacgttgatgtaaatgaagggtctctaatggagctacagggacatattggaagattccagcgccagtgcttaggactactaagtcgctttggtggctctgacagactgcgtcagtttaaatttcaagacgataatgtggagggagataaagtaagcaagaaagatgagattgaactggctatgcagcagatttgtgccaatgtaatggaatattgccagtcactcatgttacagagttcccctaccttccagcatgctgtgtgtctcttcactcctagcctttcagaaacagttaatagagatggaccgcggcaagatacccaagctccagtggttccatactggcgcctgcctggtttaggcattatcatctacctgctgaaacagagtgctaatgatttcttcagctattatgacagtcatcgacagagtgtcagcaagctacaaaatgtagagcagcttcccccagatgagataaaagagttgtgtcagtctgtgatgcctgctggtgttgataaaatctccactgctcagaaatatgttctagcaagacggcgcttggtgaagattccttcgcctcagaaaccaatctagattttagaagtgggctggctatagtgagccaacatgatttagaccagcttcaggctgatgcaatcaacgcttttggagaatcactacaaaagaaacttctggacattgaaggattatattcaaaagttcgatctcgatatagtttcatacaggctcttgtcagacgtatccgtggcctcttgaggatatcaaggaactgagagcccgtgcttatgctcttctatgagagagatgaattggggagaattgtctccattttatagattagtttctttctaaattatgaccaaaaatattttgctatttctttctttgtatatggacatcttttctgtaaacttcttcccctagttccatcctcactagta

SEQ ID NO: 161261 - DNA, 570 bp, Homo sapiens
  Payload ID: 11495
  Gene Symbol: NUP205
  Gene Name: nucleoporin 205kDa
  ENST ID: ENST00000463247
  CDS Start-End: 1-215
ttgaattgaaaaaacctgtcagtactacaaacctacaagatccaggagtgttaggttgccctcggacatgccttcacgccattctaaacatcttggagaaaggaacggaagggagaacaggcccagtggcggtgcgagaatctcctcagctggctgagctatgttaccagagacagagtttcaccatgttgagcagactggtctcaaactcctgacctcaagtaatctgcccacctcagcctcccaaagtgttgggaggtcatatatcagttatgtgcatgctctgatacatctggtcctactatgaggtacttgagaaccagccaggatttcttattttcccagttgcagtatctaccattttctaacaaagaatatgaaatatctatgctgaaccagatgtcatggcttatgaaaactgcctcaatagagctaagggtaacctctctgaatcgtcagcggtcacatacccagaggctcctacacctcttactggatgacatgccagtgaaaccatactcagatggtgaaggaggaatagaagatgaaaacaggtctgtttctgggttc

SEQ ID NO: 161262 - DNA, 553 bp, Homo sapiens
  Payload ID: 11495
  Gene Symbol: NUP205
  Gene Name: nucleoporin 205kDa
  ENST ID: ENST00000472132
  CDS Start-End: 1-553
taagtcagaaactaatggctggatttgtggagtgtttggattgtgaagatgcagaagaatttgtacgtctggaagagggatcagaacttgaaaagaaattagttgcaattcgtcatgaaacaagaatccacatcttgaatcttctcattacctctctggaatgcaatccacccaatcttgctctctacctgttgggctttgaattgaaaaaacctgtcagtactacaaacctacaagatccaggagtgttaggttgccctcggacatgccttcacgccattctaaacatcttggagaaaggaacggaagggagaacaggcccagtggcggtgcgagaatctcctcagctggctgagctatgttaccagttatgtgcatgctctgatacatctggtcctactatgaggtacttgagaaccagccaggatttcttattttcccagttgcagtatctaccattttctaacaaagaatatgaaatatctatgctgaaccagatgtcatggcttatgaaaactgcctcaatagagctaagggtaacctctctgaatcg

SEQ ID NO: 161263 - DNA, 653 bp, Homo sapiens
  Payload ID: 11495
  Gene Symbol: NUP205
  Gene Name: nucleoporin 205kDa
  ENST ID: ENST00000490439
  CDS Start-End: 1-128
gtcagtctgtgatgcctgctggtgttgataaaatctccactgctcagaaatatgttctagcaagacggcgcttggtgaaggtgatcaacaatcgagctaaactgctttccctttgttcttggggctgatccagctctagaagaatggaggaggtctgctattatgctgattcttattgctggagtgggcctctgtgactgatggccatatattggatcccttaggtggaaggaaatagagaaaagctgagaaccctgattccttcgcctcagaaaccaatctagattttagaagtgggctggctatagtgagccaacatgatttagaccagcttcaggctgatgcaatcaacgcttttggagaatcactacaaaagaaacttctggacattgaaggattatattcaaaagttcgatctcgatatagtttcatacaggctcttgtcagacgtatccgtggcctcttgaggatatcaaggaactgagagcccgtgcttatgctcttctatgagagagatgaattggggagaattgtctccattttatagattagtttctttctaaattatgaccaaaaatattttgctatttctttctttgtatatggacatcttttctgtaaacttcttcccctagttccatcctcactagtaa

SEQ ID NO: 161264 - DNA, 7193 bp, Homo sapiens
  Payload ID: 11496
  Gene Symbol: NUP210
  Gene Name: nucleoporin 210kDa
  Uniprot ID: Q8TEM1
  ENST ID: ENST00000254508
  CDS Start-End: 84-5747
gcgcgcgcgcgggcgggagcggagggcaacggggcggcgcgggcggccgggcgcagggtcgcgggaggtgacgcgcggcgaggatggcggcgcggggccgggggctgctgctgctgacgctgtcggtgctgttggcggcgggcccctccgccgctgcggccaagctcaacatccccaaagtgctgctgcccttcacgcgggccacgcgcgttaacttcacgctggaggcctcggagggctgctaccgctggttgtccacccggccggaggtggccagcatcgagccgctgggcctggacgagcagcagtgctcccagaaggcagtggtgcaggcccgcctgacccagcctgcccgcctcaccagcatcatcttcgcagaggacatcaccacaggccaggtcctgcgctgtgatgccattgtggacctcatccatgacatccagatcgtctccaccacccgcgagctctacctggaggactcccccctggagctgaagatccaggccctggactccgaagggaacaccttcagcactctggctggactggtcttcgagtggacgattgtgaaggactccgaggcggacaggttctcagactcccacaatgcgctgcgaatcctcactttcttggagtctacgtacatccctccttcttacatctcagagatggagaaggctgccaagcaaggggacaccatcctggtgtctgggatgaagaccgggagctccaagctcaaggctcgcatccaggaggctgtctacaagaatgtacgccctgcagaagtcaggctgctgattttggaaaacatccttctgaacccggcctatgacgtctacctgatggtgggaacctccattcactacaaggtgcagaagatcaggcaagggaaaattacagaactctccatgccttccgatcagtacgagttgcagcttcagaacagcatcccgggccccgaaggagacccagcccggccggtggctgtcttggcccaggacacgtcgatggtcactgcactgcagctgggacagagcagcctcgtccttggccacaggagtattcgcatgcaaggtgcttctaggttacccaacagcactatctacgtggtcgaacctggatacctagggttcactgttcaccctggtgacaggtgggtgctggagaccggccgcctgtatgaaatcaccatcgaagtttttgacaagttcagcaacaaggtctatgtatctgacaacatccgaattgaaactgtgcttcctgctgagttcttcgaggtgctctcgtcctcccagaatgggtcataccatcgcatcagggcactaaagaggggacagacggccattgacgcggccctcacctctgtggtggaccaggatggaggggtccacatactacaggtgcctgtgtggaaccagcaggaggtggaaattcacatcccgatcaccctgtatcccagcatcttgacatttccgtggcaaccaaagacgggcgcctatcagtacacaataagggcccacggtggcagtgggaacttcagctggtcttcgtcaagccacctggttgccacagttactgtcaagggcgtgatgaccacaggcagtgacatcgggttcagtgtgatccaggcacatgatgtgcagaacccactccatttcggtgagatgaaggtgtatgtgatcgagccccacagcatggagtttgccccgtgccaggtggaggcacgtgtgggccaggccctggagctgcccctgaggatcagtggcctcatgcccggcggggccagtgaggtggtcaccttgagcgactgctcccactttgacttggctgtcgaggtggagaaccagggtgtgttccagccactcccagggaggctgccgccaggctctgagcactgcagcggcatccgggtaaaggccgaggcccagggctctaccacgcttcttgtgagctacagacacggccacgtccacctgagtgccaagatcaccattgctgcctacctgcccctcaaggctgtggatccctcctctgttgccttggtaaccctgggctcctcaaaggagatgctgtttgaaggaggtcccagaccttggatcctcgagccgtccaaattcttccagaacgtcaccgctgaggacactgacagcatcggcctggctctctttgccccccattcctcccggaattatcagcaacactggatccttgtgacctgtcaggccttgggtgagcaggtcatcgccctgtcggtggggaacaagcccagcctcaccaacccctttcctgcggtggagcctgccgtggtgaagttcgtctgcgccccaccgtccaggctcaccctcgcgcctgtctacaccagcccccagctggacatgtcctgtccgctgctgcagcagaacaagcaggtggtcccagtgtccagccaccgcaacccccggctggacctggctgcttacgaccaggagggccgccggttcgacaacttcagctctctgagcatccagtgggagtccaccaggccagtgttggccagcatcgagcctgagctgcccatgcagctggtgtcccaggacgatgagagtggccaaaagaagctgcacggtttgcaggccattttggttcacgaggcatcaggaaccacagccatcactgccactgccactggctaccaggagtcccacctcagctctgccagaacaaagcagccgcatgaccctctggtgcctctgtcggcctccatagagctcatcctggtggaggacgtgagggtgagcccagaagaggtgaccatctacaaccaccctggcatccaggcagagctccgcatcagggaaggctcaggttacttcttcctcaacaccagcaccgcagatgttgtcaaggtggcctaccaggaggccaggggtgtcgccatggtgcaccctttgctcccgggctcatccaccatcatgatccatgacttgtgcctcgtcttcccggccccagccaaggctgtcgtttacgtgtcggacattcaggagctgtacatccgtgtggttgacaaggtggagattgggaagacagtgaaggcatacgtccgcgtgctggacttgcacaagaagcccttccttgccaaatacttcccctttatggacctgaagctccgagcagcctccccgatcattacattggtggcccttgatgaagcccttgacaactacaccatcacattcctcatccgcggtgtggccatcggccagaccagtctaactgcaagtgtgaccaataaagctggacagagaatcaactcagccccacaacagattgaagtctttcccccgttcaggctgatgcccaggaaggtgacactgcttatcggggccacgatgcaggtcacctccgagggcggcccccagcctcagtccaacatccttttctccatcagcaatgagagcgttgcgctggtgagcgctgctgggctggtacagggcctcgccatcgggaacggcactgtgtctgggctcgtgcaggcagtggatgcagagaccggcaaggtggtcatcatctctcaggacctcgtgcaggtggaggtgctgctgctaagggccgtgaggatccgcgcccccatcatgcggatgaggacgggcacccagatgcccatctatgtcaccggcatcaccaaccaccagaaccctttctcctttggcaatgccgtgccaggcctgaccttccactggtctgtcaccaagcgggacgtcctggacctccgagggcggcaccacgaggcgtcgatccgactcccgtcacagtacaactttgccatgaacgtgctcggccgggtaaaaggccggaccgggctgagggtggtggtcaaggctgtggaccccacatcggggcagctgtatggcctggccagagaactctcggatgagatccaagtccaggtgtttgagaagctgcagctgctcaaccctgaaatagaagcagaacaaatattaatgtcgcccaactcatatataaagctgcagacaaacagggatggtgcagcctctctgagctaccgcgtcctggatggacccgaaaaggttccagttgtgcatgttgatgagaaaggctttctagcatcagggtctatgatcgggacatccaccatcgaagtgattgcacaagagccctttggggccaaccaaaccatcattgttgctgtaaaggtatcccctgtttcctacctgagggtttccatgagccctgtcctgcacacccagaacaaggaggccctggtggccgtgcctttgggaatgaccgtgaccttcactgtccacttccacgacaactctggagatgtcttccatgctcacagttcggtcctcaactttgccactaacagagacgactttgtgcagatcgggaagggccccaccaacaacacctgcgttgtccgcacagtcagcgtgggcctgacactgctccgtgtgtgggacgcagagcacccgggcctctcggacttcatgcccctgcctgtcctacaggccatctccccagagctgtctggggccatggtggtgggggacgtgctctgtctggccactgttctgaccagcctggaaggcctctcaggaacctggagctcctcggccaacagcatcctccacatcgaccccaagacgggtgtggctgtggcccgggccgtgggatccgtgacggtttactatgaggtcgctgggcacctgaggacctacaaggaggtggtggtcagcgtccctcagaggatcatggcccgtcacctccaccccatccagaccagcttccaggaggctacagcctccaaagtgattgttgccgtgggagacagaagctctaacctgagaggcgagtgcacccccacccagagggaagtcatccaggccttgcacccagagaccctcatcagctgccagtcccagttcaagccggccgtctttgatttcccatctcaagatgtgttcaccgtggagccacagtttgacactgctctcggccagtacttctgctcaatcacaatgcacaggctgacggacaagcagcggaagcacctgagcatgaagaagacagctctggtggtcagtgcctccctctccagcagccacttctccacagagcaggtgggggccgaggtgcccttcagcccaggtctcttcgccgaccaggctgaaatccttttgagcaaccactacaccagttccgagatcagggtctttggtgccccggaggttctggagaacttggaggtgaaatccgggtccccggccgtgctggcattcgcaaaggagaagtcttttgggtggcccagcttcatcacatacacggtcggcgtcttggaccccgcggctggcagccaagggcctctgtccactaccctgaccttctccagccccgtgaccaaccaagccattgccatcccagtgacagtggcttttgtggtggatcgccgtgggcccggtccttatggagccagcctcttccagcacttcctggattcctaccaggtcatgttcttcacgctcttcgccctgttggctgggacagcggtcatgatcatagcctaccacactgtctgcacgccccgggatcttgctgtgcctgcagccctcacgcctcgagccagccctggacacagcccccactatttcgctgcctcatcacccacatctcccaatgcattgcctcctgctcgcaaagccagccctccctcagggctgtggagcccagcctatgcctcccactaggccgcgtgaaggttcccggaggatgggtctcagccgagcctcgtgcacccccaagatggaacatccctgctgcattcacactggaacaagcccctccagatgagtgccccggccccaggccagcttcactgccgtctcttcacacagagctgtagtttcggctctgcccattagctcattttatgtaggagttttaaatgtgtgtttttttcctttcaagtcttacaaagctaagactttttggctcattcctttttgcatggttgtctagggtttctggacaatgtgctgttgcatttttattttcctagccttgctaaaatctttcccttctcaagactttgagcagttagaagtgctctttagaagttgtctgtgggtgatgttactgtagtggtctcagggaaaggattgtccagttactttagggggtttttggtggggtttttccccctgtgaaaacttactttgcccctagtctggctgctgctaggacttctgaggagcaatgggacatgagtgtccctgtatctgcgccactgccgcaagggaagcctcaggaaccagcacctggaggccaggatagccaagccctgggtgagcgagaggctggagaacacaggagctcacccagggctgctgcccaaccatgggccactgtgaacagacttcagtcctctgtttttgtttcataagccgttgagacatctgatggacttggcttaggccctgctgggacatcccacgtgtgatccctttcactccatcaggacaccaggactgtccttaggaaaatgtccttgagatggcagcaggagtcatattttctgtgtgtgtgtttcggaaagccgctgtgtcctgcctcagcacaaagacccagtgtcatttgctcctcctgttcctgtgccactccagaacctcagcagatctgagccaccgcctgccagtgtgagaggcggccactttcatggcagctcatcaggcgcagggccccagacagcttcccagcaggccctagagcccggcctgggccaatgatggagggcggccgccagcccagggcctgcccatccagaagggactccccagggcctgggggaggagacccttggaaaagtcctctcttcccagctcctgattctggatctgagattctcagatcacaggcccctgtgctccaggccgaggctgggctaccctcagggagatccagagactcatgcccatggccatccatgcgtggacgctgtgtggagagtccaggatgacgggatcccgcacaagctcccttcagtccttcagggctgggccatgtggttgatttttctaaagctggagaaaggaagaattgtgccttgcatattacttgagcttaaactgacaacctggatgtaaataggagcctttctactggtttatttaataaagttctatgtgattttttaa

SEQ ID NO: 161265 - DNA, 5424 bp, Homo sapiens
  Payload ID: 11497
  Gene Symbol: NUP210L
  Gene Name: nucleoporin 210kDa-like
  Uniprot ID: Q5VU65
  ENST ID: ENST00000271854
  CDS Start-End: 73-5283
acgcctgtggattggctgatggagctgtgagccggctgtagttgagcgggaacccgagacctggcagtcgccatgactggctgtccggcgtcatcaagacgccgaggcttcgggctctttttcttcttgcgtctacaccgcctcctgttgttgtttctggttttgcgtgggaccctggccaacaaacttaacgtgccacaggtgttgctacccttcggccgagagccaggccgggtgcctttcctgctggaggcccagcggggctgctacacttggcattccacccatcatgatgcagttactgttgagcctttatatgaaaatggcaccttgtgttcccaaaaagctgtactcattgctgaatctacgcaaccgatacgcctcagcagtattattcttgctcgagaaatagtgactgaccatgagctacgctgtgatgttaaggttgatgtgataaacagcattgaaattgtatctcgggcccgggaactttatgtagatgattcgccactggaactgatggtgagggcattggatgctgaaggaaatacttttagtagtttggcagggatgatgtttgagtggagcattgcccaggacaacgagtcagcaagagaagaactgtctagcaaaattaggattcttaaatactccgaagcagaatatgctcccccaatatatatagctgagatggaaaaagaggagaaacaaggagatgtgattttagtgtctgggattagaactggtgctgctgttgtaaaagttcgaattcatgaaccattctataagaaagtggcagcagccttaatacgtctgcttgttttggagaatatatttcttataccatcccatgatatttatctcttagtaggaacatatattaaataccaagttgcaaaaatggttcaagggagagtgacagaggtgaaatttcccctggaacattatatactggaattgcaagaccatagagttgcacttaacgggtctcattctgagaaagtggctatactggatgacaaaacagccatggtgactgcctcacaactgggccagactaatcttgtctttgtccataaaaatgttcatatgcgatctgtgtctggactcccaaattgcaccatatatgttgtagagcctggatttttaggtttcactgtccaacctggaaaccgatggagtctagaggtgggacaggtatatgtcattacagtagacgtctttgataaaagcagcacaaaggtctatatttcagataatctcaggattacatacgactttcctaaggagtactttgaagagcaactaactaccgtgaatggatcttaccatatagtaaaagccctgaaagatggtgttgtggtaataaatgcatccctgacctccatcatttaccagaataaagatattcagcctataaaatttctaatcaaacaccaacaagaagtgaagatttattttcccatcatgcttacacccaaatttctggcatttcctcatcatcctatgggaatgttatatcgttataaagtacaggtagagggtggcagtggcaactttacctggacttcttctaatgaaacagtggtcatagtaaccacgaaaggagtggtgactgcaggtcaggtcagggggaatagtactgttttggcccgagatgtacaaaatccctttcgatatggagaaattaagatacatgtcctgaaactgaacaaaatggaactgttaccatttcatgctgatgtggagattggccagattatagaaatacccattgcaatgtatcacataaataaagagaccaaagaagccatggcattcacagactgctctcatttatccttggatctgaacatggataaacaaggagtctttactcttctcaaagaaggtattcaaagacctggaccaatgcattgttccagtacacatatcgcagctaaatctcttggccatactctggtaacagtaagtgtgaatgaatgtgacaagtacttggagagcagtgctacatttgctgcttatgaacccctaaaggctttaaatcctgtggaagtggcattggtgacatggcagtctgtgaaggaaatggtatttgaagggggtcctcgtccatggatcttggagccctcccgattttttttggaattgaatgcggagaagacagagaagattggaatagcacaagtgtggctgccatctaagagaaaacagaaccagtacatctaccggatccaatgcctggatttaggggaacaagttctcacattccgaattggaaatcatccaggtgtcctgaaccctagtccagctgtagaggttttgcaggttcgcttcatttgtgcccaccctgccagtatgtcagtaactccagtatacaaggtgccagctggtgcccagccatgtcctctgccacagcacaacaaatggctgattcctgtatcaagactgagggacacagtcctggaactagcagtgtttgatcaacataggagaaagtttgataatttcagttcactaatgctagaatggaaatcctccaatgaaacactagcccatttcgaagattataaatcagtggaaatggtagcaaaagatgatggcagtgggcagacccggttacatggtcatcagatccttaaagtacatcagataaaagggactgtactgattggagtcaattttgtgggctattcagagaagaaaagcccaaaagaaatttccaacttgcccagatctgtagatgtggaactgctcctggtagatgatgtaactgtagtgcctgagaatgccaccatctataaccaccctgatgtaaaggaaacatttagccttgtggaaggatctggttattttttagtcaacagcagtgagcagggtgttgtcaccatcacttacatggaagcagaaagctctgttgagttagttccattacatcctggattttttaccttggaggtctatgatctttgtttggctttcttgggtccagcaacagcccacctcagggtgtcagacatacaagagctggagcttgatctgattgataaggttgaaatagacaaaactgtgttagtgactgtgagggttcttggctcttccaaacgcccattccaaaataaatacttcagaaacatggaactcaaactgcagttggcttctgccattgtcaccctgacaccaatggagcaacaggacgaatactctgaaaattatattcttcgagctaccactattgggcaaaccacacttgtggctattgccaaggacaagatgggaagaaaatacacatcaactcctcggcacattgaagtgtttcctccattcagacttcttccagagaaaatgacactgattccaatgaatatgatgcaggtaatgtctgaaggtggcccccagccccaatccatcgttcacttctccatcagtaatcagaccgtggctgttgttaataggagggggcaagttacagggaagattgttggcacagctgtggttcatggcaccatccagacagtaaatgaagatactggcaaagtcattgtgttttctcaggatgaagtacagattgaagttgttcagctaagggctgttaggatccttgcagctgcaactcggctcatcacagctaccaagatgccagtttatgtcatgggagtaaccagtacccagacccctttctccttcagcaatgctaatcctgggctcacattccactggtctatgagcaaaagggatgtattggatctagtgcccaggcattcagaggtttttctacagctcccagtagagcataactttgccatggttgtccatacaaaagcagcaggcaggaccagtatcaaggtcactgttcactgcatgaacagttcctctgggcagtttgaggggaatttgttggaactctctgatgaagtacagatcctggtgtttgaaaaactccaactcttctatccagagtgccaaccagagcagattctgatgcctataaattctcagctcaaactccataccaacagggaaggagctgccttcgtgagttctcgtgttctcaagtgtttccctaattcatccgtcattgaggaggatggtgaagggctcctgaaagctggttccattgcaggtactgctgtattggaagtcacttctatagaaccttttggagtcaaccaaacaaccataactggggtccaggtagcaccggtgacatacctgcgagtgagcagccaacccaagctatacacagcccaaggaaggaccctgtcagcatttcccttgggcatgtctcttaccttcactgttcagttttataatagtatcggagagaaattccacacacacaatacccagctttatctggctctgaacagagatgacttgctgcatattggaccagggaataagaactatacttacatggcccaggctgtgaacagagggctgacacttgtggggctttgggaccggagacatccaggcatggcagattatattcctgttgctgtagagcatgccattgagccagacaccaagcttacctttgttggagatatcatctgcttcagtactcaccttgtcagccagcatggtgaacctgggatatggatgatttctgccaacaatattctacagacagacattgtcactggagtaggagtggccaggagtccggggactgcaatgatttttcatgacatcccaggagtagtgaaaacatatcgagaggtggtggtcaatgcatcatcaagattaatgctcagttatgacctcaagacttatctcaccaataccctcaattcaactgtattcaagctcttcatcaccactggcagaaatggtgtcaatcttaaaggattctgtaccccaaaccaggccttggccattacaaaagtacttcttccagcgaccctcatgctgtgccatgtacagttcagtaatactttgctagacattccagcaagtaaagtctttcaggtccattcagatttcagtatggagaaagatcactgtgaagattccgccatcctcaagcggttcactggctcttaccagatcctgctcttgaccctctttgcagtgctggcatcaacagcttccatcttcctagcatacaatgccttcctaaacaagatacaaacagttccagttgtgtatgtaccaactctaggaacaccacagccaggtttttttaactccacaagttctccccctcacttcatgagtctacaacctccattggcccaaagtcggctgcaacattggttatggagtataaggcactaacctctgcttggacaagtttctcttaactgcaggggaatgaagatttctagtcctcgacaagaagcctaacagcaacttctacattaagtttccagataaggcttctgagaactataaataaagcatcctaagctgtttctt

SEQ ID NO: 161266 - DNA, 2168 bp, Homo sapiens
  Payload ID: 11497
  Gene Symbol: NUP210L
  Gene Name: nucleoporin 210kDa-like
  ENST ID: ENST00000368553
  CDS Start-End: 14-2023
tgccaaggacaagatgggaagaaaatacacatcaactcctcggcacattgaagtgtttcctccattcagacttcttccagagaaaatgacactgattccaatgaatatgatgcaggtaatgtctgaaggtggcccccagccccaatccatcgttcacttctccatcagtaatcagaccgtggctgttgttaataggagggggcaagttacagggaagattgttggcacagctgtggttcatggcaccatccagacagtaaatgaagatactggcaaagtcattgtgttttctcaggatgaagtacagattgaagttgttcagctaagggctgttaggatccttgcagctgcaactcggctcatcacagctaccaagatgccagtttatgtcatgggagtaaccagtacccagacccctttctccttcagcaatgctaatcctgggctcacattccactggtctatgagcaaaagggatgtattggatctagtgcccaggcattcagaggtttttctacagctcccagtagagcataactttgccatggttgtccatacaaaagcagcaggcaggaccagtatcaaggtcactgttcactgcatgaacagttcctctgggcagtttgaggggaatttgttggaactctctgatgaagtacagatcctggtgtttgaaaaactccaactcttctatccagagtgccaaccagagcagattctgatgcctataaattctcagctcaaactccataccaacagggaaggagctgccttcgtgagttctcgtgttctcaagtgtttccctaattcatccgtcattgaggaggatggtgaagggctcctgaaagctggttccattgcaggtactgctgtattggaagtcacttctatagaaccttttggagtcaaccaaacaaccataactggggtccaggtagcaccggtgacatacctgcgagtgagcagccaacccaagctatacacagcccaaggaaggaccctgtcagcatttcccttgggcatgtctcttaccttcactgttcagttttataatagtatcggagagaaattccacacacacaatacccagctttatctggctctgaacagagatgacttgctgcatattggaccagggaataagaactatacttacatggcccaggctgtgaacagagggctgacacttgtggggctttgggaccggagacatccaggcatggcagattatattcctgttgctgtagagcatgccattgagccagacaccaagcttacctttgttggagatatcatctgcttcagtactcaccttgtcagccagcatggtgaacctgggatatggatgatttctgccaacaatattctacagacagacattgtcactggagtaggagtggccaggagtccggggactgcaatgatttttcatgacatcccaggagtagtgaaaacatatcgagaggtggtggtcaatgcatcatcaagattaatgctcagttatgacctcaagacttatctcaccaataccctcaattcaactgtattcaagctcttcatcaccactggcagaaatggtgtcaatcttaaaggattctgtaccccaaaccaggccttggccattacaaaagtacttcttccagcgaccctcatgctgtgccatgtacagttcagtaatactttgctagacattccagcaagtaaagtctttcaggtccattcagatttcagtatggagaaagatcactgtgaagattccgccatcctcaagcggttcactggctcttaccagatcctgctcttgaccctctttgcagtgctggcatcaacagcttccatcttcctagcatacaatgccttcctaaacaagatacaaacagttccagttgtgtatgtaccaactctaggaacaccacagccaggtttttttaactccacaagttctccccctcacttcatgagtctacaacctccattggcccaaagtcggctgcaacattggttatggagtataaggcactaacctctgcttggacaagtttctcttaactgcaggggaatgaagatttctagtcctcgacaagaagcctaacagcaacttctacattaagtttccagataaggcttctgagaactataaataaagcatcctaagctgtttcttaaaa

SEQ ID NO: 161267 - DNA, 5889 bp, Homo sapiens
  Payload ID: 11497
  Gene Symbol: NUP210L
  Gene Name: nucleoporin 210kDa-like
  Uniprot ID: Q5VU65
  ENST ID: ENST00000368559
  CDS Start-End: 73-5739
acgcctgtggattggctgatggagctgtgagccggctgtagttgagcgggaacccgagacctggcagtcgccatgactggctgtccggcgtcatcaagacgccgaggcttcgggctctttttcttcttgcgtctacaccgcctcctgttgttgtttctggttttgcgtgggaccctggccaacaaacttaacgtgccacaggtgttgctacccttcggccgagagccaggccgggtgcctttcctgctggaggcccagcggggctgctacacttggcattccacccatcatgatgcagttactgttgagcctttatatgaaaatggcaccttgtgttcccaaaaagctgtactcattgctgaatctacgcaaccgatacgcctcagcagtattattcttgctcgagaaatagtgactgaccatgagctacgctgtgatgttaaggttgatgtgataaacagcattgaaattgtatctcgggcccgggaactttatgtagatgattcgccactggaactgatggtgagggcattggatgctgaaggaaatacttttagtagtttggcagggatgatgtttgagtggagcattgcccaggacaacgagtcagcaagagaagaactgtctagcaaaattaggattcttaaatactccgaagcagaatatgctcccccaatatatatagctgagatggaaaaagaggagaaacaaggagatgtgattttagtgtctgggattagaactggtgctgctgttgtaaaagttcgaattcatgaaccattctataagaaagtggcagcagccttaatacgtctgcttgttttggagaatatatttcttataccatcccatgatatttatctcttagtaggaacatatattaaataccaagttgcaaaaatggttcaagggagagtgacagaggtgaaatttcccctggaacattatatactggaattgcaagaccatagagttgcacttaacgggtctcattctgagaaagtggctatactggatgacaaaacagccatggtgactgcctcacaactgggccagactaatcttgtctttgtccataaaaatgttcatatgcgatctgtgtctggactcccaaattgcaccatatatgttgtagagcctggatttttaggtttcactgtccaacctggaaaccgatggagtctagaggtgggacaggtatatgtcattacagtagacgtctttgataaaagcagcacaaaggtctatatttcagataatctcaggattacatacgactttcctaaggagtactttgaagagcaactaactaccgtgaatggatcttaccatatagtaaaagccctgaaagatggtgttgtggtaataaatgcatccctgacctccatcatttaccagaataaagatattcagcctataaaatttctaatcaaacaccaacaagaagtgaagatttattttcccatcatgcttacacccaaatttctggcatttcctcatcatcctatgggaatgttatatcgttataaagtacaggtagagggtggcagtggcaactttacctggacttcttctaatgaaacagtggtcatagtaaccacgaaaggagtggtgactgcaggtcaggtcagggggaatagtactgttttggcccgagatgtacaaaatccctttcgatatggagaaattaagatacatgtcctgaaactgaacaaaatggaactgttaccatttcatgctgatgtggagattggccagattatagaaatacccattgcaatgtatcacataaataaagagaccaaagaagccatggcattcacagactgctctcatttatccttggatctgaacatggataaacaaggagtctttactcttctcaaagaaggtattcaaagacctggaccaatgcattgttccagtacacatatcgcagctaaatctcttggccatactctggtaacagtaagtgtgaatgaatgtgacaagtacttggagagcagtgctacatttgctgcttatgaacccctaaaggctttaaatcctgtggaagtggcattggtgacatggcagtctgtgaaggaaatggtatttgaagggggtcctcgtccatggatcttggagccctcccgattttttttggaattgaatgcggagaagacagagaagattggaatagcacaagtgtggctgccatctaagagaaaacagaaccagtacatctaccggatccaatgcctggatttaggggaacaagttctcacattccgaattggaaatcatccaggtgtcctgaaccctagtccagctgtagaggttttgcaggttcgcttcatttgtgcccaccctgccagtatgtcagtaactccagtatacaaggtgccagctggtgcccagccatgtcctctgccacagcacaacaaatggctgattcctgtatcaagactgagggacacagtcctggaactagcagtgtttgatcaacataggagaaagtttgataatttcagttcactaatgctagaatggaaatcctccaatgaaacactagcccatttcgaagattataaatcagtggaaatggtagcaaaagatgatggcagtgggcagacccggttacatggtcatcagatccttaaagtacatcagataaaagggactgtactgattggagtcaattttgtgggctattcagagaagaaaagcccaaaagaaatttccaacttgcccagatctgtagatgtggaactgctcctggtagatgatgtaactgtagtgcctgagaatgccaccatctataaccaccctgatgtaaaggaaacatttagccttgtggaaggatctggttattttttagtcaacagcagtgagcagggtgttgtcaccatcacttacatggaagcagaaagctctgttgagttagttccattacatcctggattttttaccttggaggtctatgatctttgtttggctttcttgggtccagcaacagcccacctcagggtgtcagacatacaagagctggagcttgatctgattgataaggttgaaatagacaaaactgtgttagtgactgtgagggttcttggctcttccaaacgcccattccaaaataaatacttcagaaacatggaactcaaactgcagttggcttctgccattgtcaccctgacaccaatggagcaacaggacgaatactctgaaaattatattcttcgagctaccactattgggcaaaccacacttgtggctattgccaaggacaagatgggaagaaaatacacatcaactcctcggcacattgaagtgtttcctccattcagacttcttccagagaaaatgacactgattccaatgaatatgatgcaggtaatgtctgaaggtggcccccagccccaatccatcgttcacttctccatcagtaatcagaccgtggctgttgttaataggagggggcaagttacagggaagattgttggcacagctgtggttcatggcaccatccagacagtaaatgaagatactggcaaagtcattgtgttttctcaggatgaagtacagattgaagttgttcagctaagggctgttaggatccttgcagctgcaactcggctcatcacagctaccaagatgccagtttatgtcatgggagtaaccagtacccagacccctttctccttcagcaatgctaatcctgggctcacattccactggtctatgagcaaaagggatgtattggatctagtgcccaggcattcagaggtttttctacagctcccagtagagcataactttgccatggttgtccatacaaaagcagcaggcaggaccagtatcaaggtcactgttcactgcatgaacagttcctctgggcagtttgaggggaatttgttggaactctctgatgaagtacagatcctggtgtttgaaaaactccaactcttctatccagagtgccaaccagagcagattctgatgcctataaattctcagctcaaactccataccaacagggaaggagctgccttcgtgagttctcgtgttctcaagtgtttccctaattcatccgtcattgaggaggatggtgaagggctcctgaaagctggttccattgcaggtactgctgtattggaagtcacttctatagaaccttttggagtcaaccaaacaaccataactggggtccaggtagcaccggtgacatacctgcgagtgagcagccaacccaagctatacacagcccaaggaaggaccctgtcagcatttcccttgggcatgtctcttaccttcactgttcagttttataatagtatcggagagaaattccacacacacaatacccagctttatctggctctgaacagagatgacttgctgcatattggaccagggaataagaactatacttacatggcccaggctgtgaacagagggctgacacttgtggggctttgggaccggagacatccaggcatggcagattatattcctgttgctgtagagcatgccattgagccagacaccaagcttacctttgttggagatatcatctgcttcagtactcaccttgtcagccagcatggtgaacctgggatatggatgatttctgccaacaatattctacagacagacattgtcactggagtaggagtggccaggagtccggggactgcaatgatttttcatgacatcccaggagtagtgaaaacatatcgagaggtggtggtcaatgcatcatcaagattaatgctcagttatgacctcaagacttatctcaccaataccctcaattcaactgtattcaagctcttcatcaccactggcagaaatggtgtcaatcttaaaggattctgtaccccaaaccaggccttggccattacaaaagtacttcttccagcgaccctcatgctgtgccatgtacagttcagtaatactttgctagacattccagcaagtaaagtctttcaggtccattcagatttcagtatggagaaaggggtttatgtctgcataatcaaggttcgaccgcagtcagaggagctgctacaggccctcagtgtggctgacacctcagtctatgggtgggctacactggtcagtgaacgtagcaagaatggaatgcaacgaatcctcattcctttcatcccagccttttatattaaccagtcagaattggttcttagccacaaacaagatatcggggagataagagtactgggagtggacagagttcttaggaagctagaggtcatctccagctccccagttctagtggtcgctggccatagccactctcccctcactcctggcctggccatttactctgtaagagtggtcaacttcacttccttccagcaaatggcatcacctgttttcatcaatatttcctgtgtactcaccagtcaaagtgaggcagtggtagtgagggctatgaaagataagttgggtgcagatcactgtgaagattccgccatcctcaagcggttcactggctcttaccagatcctgctcttgaccctctttgcagtgctggcatcaacagcttccatcttcctagcatacaatgccttcctaaacaagatacaaacagttccagttgtgtatgtaccaactctaggaacaccacagccaggtttttttaactccacaagttctccccctcacttcatgagtctacaacctccattggcccaaagtcggctgcaacattggttatggagtataaggcactaacctctgcttggacaagtttctcttaactgcaggggaatgaagatttctagtcctcgacaagaagcctaacagcaacttctacattaagtttccagataaggcttctgagaactataaataaagcatcctaagctgtttcttaaaactggt

SEQ ID NO: 161268 - DNA, 7600 bp, Homo sapiens
  Payload ID: 11498
  Gene Symbol: NUP214
  Gene Name: nucleoporin 214kDa
  Uniprot ID: P35658
  ENST ID: ENST00000359428
  CDS Start-End: 145-6417
cgtcaccaaagcgcgccggaaatgcgaggtcaactgcgcgccgctggcgctgaggggaggaagtttgctgtcgagcggcctgggttccgtgggcaaggccgtgggaggcagcgttggctgcttcgacacactgagggcggcgcgatgggagacgagatggatgccatgattcccgagcgggagatgaaggattttcagtttagagcgctaaagaaggtgagaatctttgactcccctgaggaattgcccaaggaacgctcgagtctgcttgctgtgtccaacaaatatggtctggtcttcgctggtggagccagtggcttgcagatttttcctactaaaaatcttcttattcaaaataaacccggagatgatcccaacaaaatagttgataaagtccaaggcttgctagttcctatgaaattcccaatccatcacctggccttgagctgtgataacctcacactctctgcgtgcatgatgtccagtgaatatggttccattattgctttttttgatgttcgcacattctcaaatgaggctaaacagcaaaaacgcccatttgcctatcataagcttttgaaagatgcaggaggcatggtgattgatatgaagtggaaccccactgtcccctccatggtggcagtttgtctggctgatggtagtattgctgtcctgcaagtcacggaaacagtgaaagtatgtgcaactcttccttccacggtagcagtaacctctgtgtgctggagccccaaaggaaagcagctggcagtgggaaaacagaatggaactgtggtccagtatcttcctactttgcaggaaaaaaaagtcattccttgtcctccgttttatgagtcagatcatcctgtcagagttctggatgtgctgtggattggtacctacgtcttcgccatagtgtatgctgctgcagatgggaccctggaaacgtctccagatgtggtgatggctctactaccgaaaaaagaagaaaagcacccagagatatttgtgaactttatggagccctgttatggcagctgcacggagagacagcatcattactacctcagttacattgaggaatgggatttagtgctggcagcatctgcggcttcaacagaagttagtatccttgctcgacaaagtgatcagattaattgggaatcttggctactggaggattctagtcgagctgaattgcctgtgacagacaagagtgatgactccttgcccatgggagttgtcgtagactatacaaaccaagtggaaatcaccatcagtgatgaaaagactcttcctcctgctccagttctcatgttactttcaacagatggtgtgctttgtccattttatatgattaatcaaaatcctggggttaagtctctcatcaaaacaccagagcgactttcattagaaggagagcgacagcccaagtcaccaggaagtactcccactaccccaacctcctctcaagccccacagaaactggatgcttctgcagctgcagcccctgcctctctgccaccttcatcacctgctgctcccattgccactttttctttgcttcctgctggtggagcccccactgtgttctcctttggttcttcatctttgaagtcatctgctacggtcactggggagcccccttcatattccagtggctccgacagctccaaagcagccccaggccctggcccatcaaccttctcttttgttcccccttctaaagcctccctagcccccacccctgcagcgtctcctgtggctccatcagctgcttcattctcctttggatcatctggttttaagcctaccctggaaagcacaccagtgccaagtgtgtctgctccaaatatagcaatgaagccctccttcccaccctcaacctctgctgtcaaagtcaaccttagtgaaaagtttactgctgcagctacctctactcctgttagtagctcccagagcgcacccccgatgtcgccattctcttctgcctccaagccagctgcttctggaccactcagccaccccacacctctctcagcaccacctagttccgtgccattgaagtcctcagtcttgccctcaccatcaggacgatctgctcagggcagttcaagcccagtgccctcaatggtacagaaatcacccaggataacccctccagcggcaaagccaggctctccccaggcaaagtcacttcagcctgctgttgcagaaaagcagggacatcagtggaaagattcagatcctgtaatggctggaattggggaggagattgcacactttcagaaggagttggaagagttaaaagcccgaacttccaaagcctgtttccaagtgggcacttctgaggagatgaagatgctgcgaacagaatcagatgacttgcatacctttcttttggagattaaagagaccacagagtcgcttcatggagatataagtagcctgaaaacaactttacttgagggctttgctggtgttgaggaagccagagaacaaaatgaaagaaatcgtgactctggttatctgcatttgctttataaaagaccactggatcccaagagtgaagctcagcttcaggaaattcggcgccttcatcagtatgtgaaatttgctgtccaagatgtgaatgatgttctagacttggagtgggatcagcatctggaacaaaagaaaaaacaaaggcacctgcttgtgccagagcgagagacactgtttaacaccctagccaacaatcgggaaatcatcaaccaacagaggaagaggctgaatcacctggtggatagtcttcagcagctccgcctttacaaacagacttccctgtggagcctgtcctcggctgttccttcccagagcagcattcacagttttgacagtgacctggaaagcctgtgcaatgctttgttgaaaaccaccatagaatctcacaccaaatccttgcccaaagtaccagccaaactgtcccccatgaaacaggcacaactgagaaacttcttggccaagaggaagaccccaccagtgagatccactgctccagccagcctgtctcgatcagcctttctgtctcagagatattatgaagacttggatgaagtcagctcaacgtcatctgtctcccagtctctggagagtgaagatgcacggacgtcctgtaaagatgacgaggcagtggttcaggcccctcggcacgcccccgtggttcgcactccttccatccagcccagtctcttgccccatgcagcaccttttgctaaatctcacctggttcatggttcttcacctggtgtgatgggaacttcagtggctacatctgctagcaaaattattcctcaaggggccgatagcacaatgcttgccacgaaaaccgtgaaacatggtgcacctagtccttcccaccccatctcagccccgcaggcagctgccgcagcagcactcaggcggcagatggccagtcaggcaccagctgtaaacactttgactgaatcaacgttgaagaatgtccctcaagtggtaaatgtgcaggaattgaagaataaccctgcaaccccttctacagccatgggttcttcagtgccctactccacagccaaaacacctcacccagtgttgaccccagtggctgctaaccaagccaagcaggggtctctaataaattcccttaagccatctgggcctacaccagcatccggtcagttatcatctggtgacaaagcttcagggacagccaagatagaaacagctgtgacttcaaccccatctgcttctgggcagttcagcaagcctttctcattttctccatcagggactggctttaattttgggataatcacaccaacaccgtcttctaatttcactgctgcacaaggggcaacaccctccactaaagagtcaagccagccggacgcattctcatctggtgggggaagcaaaccttcttatgaggccattcctgaaagctcacctccctcaggaatcacatccgcatcaaacaccaccccaggagaacctgccgcatctagcagcagacctgtggcaccttctggaactgctctttccaccacctctagtaagctggaaaccccaccgtccaagctgggagagcttctgtttccaagttctttggctggagagactctgggaagtttttcaggactgcgggttggccaagcagatgattctacaaaaccaaccaataaggcttcatccacaagcctaactagtacccagccaaccaagacgtcaggcgtgccctcagggtttaattttactgcccccccggtgttagggaagcacacggagccccctgtgacatcctctgcaaccaccacctcagtagcaccaccagcagccaccagcacttcctcaactgccgtttttggcagtctgccagtcaccagtgcaggatcctctggggtcatcagttttggtgggacatctctaagtgctggcaagactagtttttcatttggaagccaacagaccaatagcacagtgcccccatctgccccaccaccaactacagctgccactccccttccaacatcattccccacattgtcatttggtagcctcctgagttcagcaactaccccctccctgcctatgtccgctggcagaagcacagaagaggccacttcatcagctttgcctgagaagccaggtgacagtgaggtctcagcatcagcagcctcacttctagaggagcaacagtcagcccagcttccccaggctcctccgcaaacttctgactctgttaaaaaagaacctgttcttgcccagcctgcagtcagcaactctggcactgcagcatctagtactagtcttgtagcactttctgcagaggctaccccagccaccacgggggtccctgatgccaggacggaggcagtaccacctgcttcctccttttctgtgcctgggcagactgctgtcacagcagctgctatctcaagtgcaggccctgtggccgtcgaaacatcaagtacccccatagcctccagcaccacgtccattgttgctcccggcccatctgcagaggcagcagcatttggtaccgtcacttctggctcatccgtctttgctcagcctcctgctgccagttctagctcagctttcaaccagctcaccaacaacacagccactgccccctctgccacgcccgtgtttgggcaagtggcagccagcaccgcaccaagtctgtttgggcagcagactggtagcacagccagcacagcagctgccacaccacaggtcagcagctcagggtttagcagcccagcttttggtaccacagccccaggggtctttggacagacaaccttcgggcaggcctcagtctttgggcagtcggcgagcagtgctgcaagtgtcttttccttcagtcagcctgggttcagttccgtgcctgccttcggtcagcctgcttcctccactcccacatccaccagtggaagtgtctttggtgccgcctcaagtaccagtagctccagttccttctcatttggacagtcttctcccaacacaggaggggggctgtttggccaaagcaacgctcctgcttttgggcagagtcctggctttggacagggaggctctgtctttggtggtacctcagctgccaccacaacagcagcaacctctgggttcagcttttgccaagcttcaggttttgggtctagtaatactggttctgtgtttggtcaagcagccagtactggtggaatagtctttggccagcaatcatcctcttccagtggtagcgtgtttgggtctggaaacactggaagagggggaggtttcttcagtggccttggaggaaaacccagtcaggatgcagccaacaaaaacccattcagctcggccagtgggggctttggatccacagctacctcaaatacctctaacctatttggaaacagtggggccaagacatttggtggatttgccagctcgtcgtttggagagcagaaacccactggcactttcagctctggaggaggaagtgtggcatcccaaggctttgggttttcctctccaaacaaaacaggtggcttcggtgctgctccagtgtttggcagccctcctacttttgggggatcccctgggtttggaggggtgccagcattcggttcagccccagcctttacaagccctctgggctcgacgggaggcaaagtgttcggagagggcactgcagctgccagcgcaggaggattcgggtttgggagcagcagcaacaccacatccttcggcacgctcgcgagtcagaatgcccccactttcggatcactgtcccaacagacttctggttttgggacccagagtagcggattctctggttttggatcaggcacaggagggttcagctttgggtcaaataactcgtctgtccagggttttggtggctggcgaagctgagggcgtgtcagcaggcctttcgatccctgggaccaaccgcatcctcagcttcttccccgagaaatgctggagcaggctgttcagaccgacgttgccatcaaaacacatacacccagaaagaaacaacagaaaccaaaactcacaaggcgcatgattacttgttttatatttcatgttgggttttccctcccactattaaacagtctgtttccgtacagaacgtatgtgggttttttcagatcacagccaagaagattgccccgtttctgtggctctgagaagccagcagagcctccatcagccagaacactgtgtcttcaaggatggcatcagaagtcaccagcgtcgggtgttgataaacagcatcgaatgtgccgtggtctcacttggacctagcgccctccacatagggaagaggttgaatgctggtgggtcatctttttgaggctgaaacttggttatctcctctccttgttcttttagccattgtgtatcaggaccatccaaggacgcactctgcgattgagtggaggcagaggaagccactcatgccagcagcagttgagtttcagaagcagccatagcgcttttcagtacagtacaatagtagccagcgtgaggcaggacagtgctgcgccttagccggccttggctctcatctccatgtggctcttgggtgccatgtgtcctactccagagaggagggggccggtcacttgagaagacagcctttatattctgtatgtggcagtgacattggtagccacacctacccagtgtctactaaccacagtgcagatagcccttgggtagacccaggaagtgtgaagacagacactgctgttgccagacaacactagcagaacgatgctggatttgacaacagtgtttgctaggacggcccagagctcatcactgcagttttattagagtgcttctttatctttaatgcagtatctttgaggcctgtaacatcctagatagttgccatcaaacaaggaccgtctcgcattgaaaacagatgtaagaatttctctttcaggcccagaatctgacagtgctttggcttgggtcatgagcagcggggagttgggaagagatttttttttttagagttttacatattggcaggttgtatttttttaatgttttaataaaagtttgacatgacattaattcatca

SEQ ID NO: 161269 - DNA, 7538 bp, Homo sapiens
  Payload ID: 11498
  Gene Symbol: NUP214
  Gene Name: nucleoporin 214kDa
  Uniprot ID: P35658
  ENST ID: ENST00000411637
  CDS Start-End: 120-6362
gaggtcaactgcgcgccgctggcgctgaggggaggaagtttgctgtcgagcggcctgggttccgtgggcaaggccgtgggaggcagcgttggctgcttcgacacactgagggcggcgcgatgggagacgagatggatgccatgattcccgagcgggagatgaaggattttcagtttagagcgctaaagaaggtgagaatctttgactcccctgaggaattgcccaaggaacgctcgagtctgcttgctgtgtccaacaaatatggtctggtcttcgctggtggagccagtggcttgcagatttttcctactaaaaatcttcttattcaaaataaacccggagatgatcccaacaaaatagttgataaagtccaaggcttgctagttcctatgaaattcccaatccatcacctggccttgagctgtgataacctcacactctctgcgtgcatgatgtccagtgaatatggttccattattgctttttttgatgttcgcacattctcaaatgaggctaaacagcaaaaacgcccatttgcctatcataagcttttgaaagatgcaggaggcatggtgattgatatgaagtggaaccccactgtcccctccatggtggcagtttgtctggctgatggtagtattgctgtcctgcaagtcacggaaacagtgaaagtatgtgcaactcttccttccacggtagcagtaacctctgtgtgctggagccccaaaggaaagcagctggcagtgggaaaacagaatggaactgtggtccagtatcttcctactttgcaggaaaaaaaagtcattccttgtcctccgttttatgagtcagatcatcctgtcagagttctggatgtgctgtggattggtacctacgtcttcgccatagtgtatgctgctgcagatgggaccctggaaacgtctccagatgtggtgatggctctactaccgaaaaaagaagaaaagcacccagagatatttgtgaactttatggagccctgttatggcagctgcacggagagacagcatcattactacctcagttacattgaggaatgggatttagtgctggcagcatctgcggcttcaacagaagttagtatccttgctcgacaaagtgatcagattaattgggaatcttggctactggaggattctagtcgagctgaattgcctgtgacagacaagagtgatgactccttgcccatgggagttgtcgtagactatacaaaccaagtggaaatcaccatcagtgatgaaaagactcttcctcctgctccagttctcatgttactttcaacagatggtgtgctttgtccattttatatgattaatcaaaatcctggggttaagtctctcatcaaaacaccagagcgactttcattagaaggagagcgacagcccaagtcaccaggaagtactcccactaccccaacctcctctcaagccccacagaaactggatgcttctgcagctgcagcccctgcctctctgccaccttcatcacctgctgctcccattgccactttttctttgcttcctgctggtggagcccccactgtgttctcctttggttcttcatctttgaagtcatctgctacggtcactggggagcccccttcatattccagtggctccgacagctccaaagcagccccaggccctggcccatcaaccttctcttttgttcccccttctaaagcctccctagcccccacccctgcagcgtctcctgtggctccatcagctgcttcattctcctttggatcatctggttttaagcctaccctggaaagcacaccagtgccaagtgtgtctgctccaaatatagcaatgaagccctccttcccaccctcaacctctgctgtcaaagtcaaccttagtgaaaatagctcccagagcgcacccccgatgtcgccattctcttctgcctccaagccagctgcttctggaccactcagccaccccacacctctctcagcaccacctagttccgtgccattgaagtcctcagtcttgccctcaccatcagcaggacgatctgctcagggcagttcaagcccagtgccctcaatggtacagaaatcacccaggataacccctccagcggcaaagccaggctctccccaggcaaagtcacttcagcctgctgttgcagaaaagcagggacatcagtggaaagattcagatcctgtaatggctggaattggggaggagattgcacactttcagaaggagttggaagagttaaaagcccgaacttccaaagcctgtttccaagtgggcacttctgaggagatgaagatgctgcgaacagaatcagatgacttgcatacctttcttttggagattaaagagaccacagagtcgcttcatggagatataagtagcctgaaaacaactttacttgagggctttgctggtgttgaggaagccagagaacaaaatgaaagaaatcgtgactctggttatctgcatttgctttataaaagaccactggatcccaagagtgaagctcagcttcaggaaattcggcgccttcatcagtatgtgaaatttgctgtccaagatgtgaatgatgttctagacttggagtgggatcagcatctggaacaaaagaaaaaacaaaggcacctgcttgtgccagagcgagagacactgtttaacaccctagccaacaatcgggaaatcatcaaccaacagaggaagaggctgaatcacctggtggatagtcttcagcagctccgcctttacaaacagacttccctgtggagcctgtcctcggctgttccttcccagagcagcattcacagttttgacagtgacctggaaagcctgtgcaatgctttgttgaaaaccaccatagaatctcacaccaaatccttgcccaaagtaccagccaaactgtcccccatgaaacaggcacaactgagaaacttcttggccaagaggaagaccccaccagtgagatccactgctccagccagcctgtctcgatcagcctttctgtctcagagatattatgaagacttggatgaagtcagctcaacgtcatctgtctcccagtctctggagagtgaagatgcacggacgtcctgtaaagatgacgaggcagtggttcaggcccctcggcacgcccccgtggttcgcactccttccatccagcccagtctcttgccccatgcagcaccttttgctaaatctcacctggttcatggttcttcacctggtgtgatgggaacttcagtggctacatctgctagcaaaattattcctcaaggggccgatagcacaatgcttgccacgaaaaccgtgaaacatggtgcacctagtccttcccaccccatctcagccccgcaggcagctgccgcagcagcactcaggcggcagatggccagtcaggcaccagctgtaaacactttgactgaatcaacgttgaagaatgtccctcaagtggtaaatgtgcaggaattgaagaataaccctgcaaccccttctacagccatgggttcttcagtgccctactccacagccaaaacacctcacccagtgttgaccccagtggctgctaaccaagccaagcaggggtctctaataaattcccttaagccatctgggcctacaccagcatccggtcagttatcatctggtgacaaagcttcagggacagccaagatagaaacagctgtgacttcaaccccatctgcttctgggcagttcagcaagcctttctcattttctccatcagggactggctttaattttgggataatcacaccaacaccgtcttctaatttcactgctgcacaaggggcaacaccctccactaaagagtcaagccagccggacgcattctcatctggtgggggaagcaaaccttcttatgaggccattcctgaaagctcacctccctcaggaatcacatccgcatcaaacaccaccccaggagaacctgccgcatctagcagcagacctgtggcaccttctggaactgctctttccaccacctctagtaagctggaaaccccaccgtccaagctgggagagcttctgtttccaagttctttggctggagagactctgggaagtttttcaggactgcgggttggccaagcagatgattctacaaaaccaaccaataaggcttcatccacaagcctaactagtacccagccaaccaagacgtcaggcgtgccctcagggtttaattttactgcccccccggtgttagggaagcacacggagccccctgtgacatcctctgcaaccaccacctcagtagcaccaccagcagccaccagcacttcctcaactgccgtttttggcagtctgccagtcaccagtgcaggatcctctggggtcatcagttttggtgggacatctctaagtgctggcaagactagtttttcatttggaagccaacagaccaatagcacagtgcccccatctgccccaccaccaactacagctgccactccccttccaacatcattccccacattgtcatttggtagcctcctgagttcagcaactaccccctccctgcctatgtccgctggcagaagcacagaagaggccacttcatcagctttgcctgagaagccaggtgacagtgaggtctcagcatcagcagcctcacttctagaggagcaacagtcagcccagcttccccaggctcctccgcaaacttctgactctgttaaaaaagaacctgttcttgcccagcctgcagtcagcaactctggcactgcagcatctagtactagtcttgtagcactttctgcagaggctaccccagccaccacgggggtccctgatgccaggacggaggcagtaccacctgcttcctccttttctgtgcctgggcagactgctgtcacagcagctgctatctcaagtgcaggccctgtggccgtcgaaacatcaagtacccccatagcctccagcaccacgtccattgttgctcccggcccatctgcagaggcagcagcatttggtaccgtcacttctggctcatccgtctttgctcagcctcctgctgccagttctagctcagctttcaaccagctcaccaacaacacagccactgccccctctgccacgcccgtgtttgggcaagtggcagccagcaccgcaccaagtctgtttgggcagcagactggtagcacagccagcacagcagctgccacaccacaggtcagcagctcagggtttagcagcccagcttttggtaccacagccccaggggtctttggacagacaaccttcgggcaggcctcagtctttgggcagtcggcgagcagtgctgcaagtgtcttttccttcagtcagcctgggttcagttccgtgcctgccttcggtcagcctgcttcctccactcccacatccaccagtggaagtgtctttggtgccgcctcaagtaccagtagctccagttccttctcatttggacagtcttctcccaacacaggaggggggctgtttggccaaagcaacgctcctgcttttgggcagagtcctggctttggacagggaggctctgtctttggtggtacctcagctgccaccacaacagcagcaacctctgggttcagcttttgccaagcttcaggttttgggtctagtaatactggttctgtgtttggtcaagcagccagtactggtggaatagtctttggccagcaatcatcctcttccagtggtagcgtgtttgggtctggaaacactggaagagggggaggtttcttcagtggccttggaggaaaacccagtcaggatgcagccaacaaaaacccattcagctcggccagtgggggctttggatccacagctacctcaaatacctctaacctatttggaaacagtggggccaagacatttggtggatttgccagctcgtcgtttggagagcagaaacccactggcactttcagctctggaggaggaagtgtggcatcccaaggctttgggttttcctctccaaacaaaacaggtggcttcggtgctgctccagtgtttggcagccctcctacttttgggggatcccctgggtttggaggggtgccagcattcggttcagccccagcctttacaagccctctgggctcgacgggaggcaaagtgttcggagagggcactgcagctgccagcgcaggaggattcgggtttgggagcagcagcaacaccacatccttcggcacgctcgcgagtcagaatgcccccactttcggatcactgtcccaacagacttctggttttgggacccagagtagcggattctctggttttggatcaggcacaggagggttcagctttgggtcaaataactcgtctgtccagggttttggtggctggcgaagctgagggcgtgtcagcaggcctttcgatccctgggaccaaccgcatcctcagcttcttccccgagaaatgctggagcaggctgttcagaccgacgttgccatcaaaacacatacacccagaaagaaacaacagaaaccaaaactcacaaggcgcatgattacttgttttatatttcatgttgggttttccctcccactattaaacagtctgtttccgtacagaacgtatgtgggttttttcagatcacagccaagaagattgccccgtttctgtggctctgagaagccagcagagcctccatcagccagaacactgtgtcttcaaggatggcatcagaagtcaccagcgtcgggtgttgataaacagcatcgaatgtgccgtggtctcacttggacctagcgccctccacatagggaagaggttgaatgctggtgggtcatctttttgaggctgaaacttggttatctcctctccttgttcttttagccattgtgtatcaggaccatccaaggacgcactctgcgattgagtggaggcagaggaagccactcatgccagcagcagttgagtttcagaagcagccatagcgcttttcagtacagtacaatagtagccagcgtgaggcaggacagtgctgcgccttagccggccttggctctcatctccatgtggctcttgggtgccatgtgtcctactccagagaggagggggccggtcacttgagaagacagcctttatattctgtatgtggcagtgacattggtagccacacctacccagtgtctactaaccacagtgcagatagcccttgggtagacccaggaagtgtgaagacagacactgctgttgccagacaacactagcagaacgatgctggatttgacaacagtgtttgctaggacggcccagagctcatcactgcagttttattagagtgcttctttatctttaatgcagtatctttgaggcctgtaacatcctagatagttgccatcaaacaaggaccgtctcgcattgaaaacagatgtaagaatttctctttcaggcccagaatctgacagtgctttggcttgggtcatgagcagcggggagttgggaagagatttttttttttagagttttacatattggcaggttgtatttttttaatgttttaataaaagtttgacatgacattaa

SEQ ID NO: 161270 - DNA, 5021 bp, Homo sapiens
  Payload ID: 11498
  Gene Symbol: NUP214
  Gene Name: nucleoporin 214kDa
  ENST ID: ENST00000451030
  CDS Start-End: 248-4807
gtgccaggcactgtggtagtcatcgcggcagccctacgaagtagtcgttaacgtagaggagtaagttgaggctcggaaagtaatttccctaaagtcacatttgacgcggggctgaaagccagcatcatttaagacctttgcgtctcctgtggctccatcagctgcttcattctcctttggatcatctggttttaagcctaccctggaaagcacaccagtgccaagtgtgtctgctccaaatatagcaatgaagccctccttcccaccctcaacctctgctgtcaaagtcaaccttagtgaaaagtttactgctgcagctacctctactcctgttagtagctcccagagcgcacccccgatgtcgccattctcttctgcctccaagccagctgcttctggaccactcagccaccccacacctctctcagcaccacctagttccgtgccattgaagtcctcagtcttgccctcaccatcaggacgatctgctcagggcagttcaagcccagtgccctcaatggtacagaaatcacccaggataacccctccagcggcaaagccaggctctccccaggcaaagtcacttcagcctgctgttgcagaaaagcagggacatcagtggaaagattcagatcctgtaatggctggaattggggaggagattgcacactttcagaaggagttggaagagttaaaagcccgaacttccaaagcctgtttccaagtgggcacttctgaggagatgaagatgctgcgaacagaatcagatgacttgcatacctttcttttggagattaaagagaccacagagtcgcttcatggagatataagtagcctgaaaacaactttacttgagggctttgctggtgttgaggaagccagagaacaaaatgaaagaaatcgtgactctggttatctgcatttgctttataaaagaccactggatcccaagagtgaagctcagcttcaggaaattcggcgccttcatcagtatgtgaaatttgctgtccaagatgtgaatgatgttctagacttggagtgggatcagcatctggaacaaaagaaaaaacaaaggcacctgcttgtgccagagcgagagacactgtttaacaccctagccaacaatcgggaaatcatcaaccaacagaggaagaggctgaatcacctggtggatagtcttcagcagctccgcctttacaaacagacttccctgtggagcctgtcctcggctgttccttcccagagcagcattcacagttttgacagtgacctggaaagcctgtgcaatgctttgttgaaaaccaccatagaatctcacaccaaatccttgcccaaagtaccagccaaactgtcccccatgaaacaggcacaactgagaaacttcttggccaagaggaagaccccaccagtgagatccactgctccagccagcctgtctcgatcagcctttctgtctcagagatattatgaagacttggatgaagtcagctcaacgtcatctgtctcccagtctctggagagtgaagatgcacggacgtcctgtaaagatgacgaggcagtggttcaggcccctcggcacgcccccgtggttcgcactccttccatccagcccagtctcttgccccatgcagcaccttttgctaaatctcacctggttcatggttcttcacctggtgtgatgggaacttcagtggctacatctgctagcaaaattattcctcaaggggccgatagcacaatgcttgccacgaaaaccgtgaaacatggtgcacctagtccttcccaccccatctcagccccgcaggcagctgccgcagcagcactcaggcggcagatggccagtcaggcaccagctgtaaacactttgactgaatcaacgttgaagaatgtccctcaagtggtaaatgtgcaggaattgaagaataaccctgcaaccccttctacagccatgggttcttcagtgccctactccacagccaaaacacctcacccagtgttgaccccagtggctgctaaccaagccaagcaggggtctctaataaattcccttaagccatctgggcctacaccagcatccggtcagttatcatctggtgacaaagcttcagggacagccaagatagaaacagctgtgacttcaaccccatctgcttctgggcagttcagcaagcctttctcattttctccatcagggactggctttaattttgggataatcacaccaacaccgtcttctaatttcactgctgcacaaggggcaacaccctccactaaagagtcaagccagccggacgcattctcatctggtgggggaagcaaaccttcttatgaggccattcctgaaagctcacctccctcaggaatcacatccgcatcaaacaccaccccaggagaacctgccgcatctagcagcagacctgtggcaccttctggaactgctctttccaccacctctagtaagctggaaaccccaccgtccaagctgggagagcttctgtttccaagttctttggctggagagactctgggaagtttttcaggactgcgggttggccaagcagatgattctacaaaaccaaccaataaggcttcatccacaagcctaactagtacccagccaaccaagacgtcaggcgtgccctcagggtttaattttactgcccccccggtgttagggaagcacacggagccccctgtgacatcctctgcaaccaccacctcagtagcaccaccagcagccaccagcacttcctcaactgccgtttttggcagtctgccagtcaccagtgcaggatcctctggggtcatcagttttggtgggacatctctaagtgctggcaagactagtttttcatttggaagccaacagaccaatagcacagtgcccccatctgccccaccaccaactacagctgccactccccttccaacatcattccccacattgtcatttggtagcctcctgagttcagcaactaccccctccctgcctatgtccgctggcagaagcacagaagaggccacttcatcagctttgcctgagaagccaggtgacagtgaggtctcagcatcagcagcctcacttctagaggagcaacagtcagcccagcttccccaggctcctccgcaaacttctgactctgttaaaaaagaacctgttcttgcccagcctgcagtcagcaactctggcactgcagcatctagtactagtcttgtagcactttctgcagaggctaccccagccaccacgggggtccctgatgccaggacggaggcagtaccacctgcttcctccttttctgtgcctgggcagactgctgtcacagcagctgctatctcaagtgcaggccctgtggccgtcgaaacatcaagtacccccatagcctccagcaccacgtccattgttgctcccggcccatctgcagaggcagcagcatttggtaccgtcacttctggctcatccgtctttgctcagcctcctgctgccagttctagctcagctttcaaccagctcaccaacaacacagccactgccccctctgccacgcccgtgtttgggcaagtggcagccagcaccgcaccaagtctgtttgggcagcagactggtagcacagccagcacagcagctgccacaccacaggtcagcagctcagggtttagcagcccagcttttggtaccacagccccaggggtctttggacagacaaccttcgggcaggcctcagtctttgggcagtcggcgagcagtgctgcaagtgtcttttccttcagtcagcctgggttcagttccgtgcctgccttcggtcagcctgcttcctccactcccacatccaccagtggaagtgtctttggtgccgcctcaagtaccagtagctccagttccttctcatttggacagtcttctcccaacacaggaggggggctgtttggccaaagcaacgctcctgcttttgggcagagtcctggctttggacagggaggctctgtctttggtggtacctcagctgccaccacaacagcagcaacctctgggttcagcttttgccaagcttcaggttttgggtctagtaatactggttctgtgtttggtcaagcagccagtactggtggaatagtctttggccagcaatcatcctcttccagtggtagcgtgtttgggtctggaaacactggaagagggggaggtttcttcagtggccttggaggaaaacccagtcaggatgcagccaacaaaaacccattcagctcggccagtgggggctttggatccacagctacctcaaatacctctaacctatttggaaacagtggggccaagacatttggtggatttgccagctcgtcgtttggagagcagaaacccactggcactttcagctctggaggaggaagtgtggcatcccaaggctttgggttttcctctccaaacaaaacaggtggcttcggtgctgctccagtgtttggcagccctcctacttttgggggatcccctgggtttggaggggtgccagcattcggttcagccccagcctttacaagccctctgggctcgacgggaggcaaagtgttcggagagggcactgcagctgccagcgcaggaggattcgggtttgggagcagcagcaacaccacatccttcggcacgctcgcgagtcagaatgcccccactttcggatcactgtcccaacagacttctggttttgggacccagagtagcggattctctggttttggatcaggcacaggagggttcagctttgggtcaaataactcgtctgtccagggttttggtggctggcgaagctgagggcgtgtcagcaggcctttcgatccctgggaccaaccgcatcctcagcttcttccccgagaaatgctggagcaggctgttcagaccgacgttgccatcaaaacacatacacccagaaagaaacaacagaaaccaaaactcacaaggcgcatgattacttgttttatatttcatgttgggttttccctcccactattaaacagtctgtttccgt

SEQ ID NO: 161271 - DNA, 3208 bp, Homo sapiens
  Payload ID: 11498
  Gene Symbol: NUP214
  Gene Name: nucleoporin 214kDa
  ENST ID: ENST00000453861
  CDS Start-End: 1-2903
ccaaaacacctcacccagtgttgaccccagtggctgctaaccaagccaagcaggggtctctaataaattcccttaagccatctgggcctacaccagcatccggtcagttatcatctggtgacaaagcttcagggacagccaagatagaaacagctgtgacttcaaccccatctgcttctgggcagttcagcaagcctttctcattttctccatcagggactggctttaattttgggataatcacaccaacaccgtcttctaatttcactgctgcacaaggggcaacaccctccactaaagagtcaagccagccggacgcattctcatctggtgggggaagcaaaccttcttatgaggccattcctgaaagctcacctccctcaggaatcacatccgcatcaaacaccaccccaggagaacctgccgcatctagcagcagacctgtggcaccttctggaactgctctttccaccacctctagtaagctggaaaccccaccgtccaagctgggagagcttctgtttccaagttctttggctggagagactctgggaagtttttcaggactgcgggttggccaagcagatgattctacaaaaccaaccaataaggcttcatccacaagcctaactagtacccagccaaccaagacgtcaggcgtgccctcagggtttaattttactgcccccccggtgttagggaagcacacggagccccctgtgacatcctctgcaaccaccacctcagtagcaccaccagcagccaccagcacttcctcaactgccgtttttggcagtctgccagtcaccagtgcaggatcctctggggtcatcagttttggtgggacatctctaagtgctggcaagactagtttttcatttggaagccaacagaccaatagcacagtgcccccatctgccccaccaccaactacagctgccactccccttccaacatcattccccacattgtcatttggtagcctcctgagttcagcaactaccccctccctgcctatgtccgctggcagaagcacagaagaggccacttcatcagctttgcctgagaagccaggtgacagtgaggtctcagcatcagcagcctcacttctagaggagcaacagtcagcccagcttccccaggctcctccgcaaacttctgactctgttaaaaaagaacctgttcttgcccagcctgcagtcagcaactctggcactgcagcatctagtactagtcttgtagcactttctgcagaggctaccccagccaccacgggggtccctgatgccaggacggaggcagtaccacctgcttcctccttttctgtgcctgggcagactgctgtcacagcagctgctatctcaagtgcaggccctgtggccgtcgaaacatcaagtacccccatagcctccagcaccacgtccattgttgctcccggcccatctgcagaggcagcagcatttggtaccgtcacttctggctcatccgtctttgctcagcctcctgctgccagttctagctcagctttcaaccagctcaccaacaacacagccactgccccctctgccacgcccgtgtttgggcaagtggcagccagcaccgcaccaagtctgtttgggcagcagactggtagcacagccagcacagcagctgccacaccacaggtcagcagctcagggtttagcagcccagcttttggtaccacagccccaggggtctttggacagacaaccttcgggcaggcctcagtctttgggcagtcggcgagcagtgctgcaagtgtcttttccttcagtcagcctgggttcagttccgtgcctgccttcggtcagcctgcttcctccactcccacatccaccagtggaagtgtctttggtgccgcctcaagtaccagtagctccagttccttctcatttggacagtcttctcccaacacaggaggggggctgtttggccaaagcaacgctcctgcttttgggcagagtcctggctttggacagggaggctctgtctttggtggtacctcagctgccaccacaacagcagcaacctctgggttcagcttttgccaagcttcaggttttgggtctagtaatactggttctgtgtttggtcaagcagccagtactggtggaatagtctttggccagcaatcatcctcttccagtggtagcgtgtttgggtctggaaacactggaagagggggaggtttcttcagtggccttggaggaaaacccagtcaggatgcagccaacaaaaacccattcagctcggccagtgggggctttggatccacagctacctcaaatacctctaacctatttggaaacagtggggccaagacatttggtggatttgccagctcgtcgtttggagagcagaaacccactggcactttcagctctggaggaggaagtgtggcatcccaaggctttgggttttcctctccaaacaaaacaggtggcttcggtgctgctccagtgtttggcagccctcctacttttgggggatcccctgggtttggaggggtgccagcattcggttcagccccagcctttacaagccctctgggctcgacgggaggcaaagtgttcggagagggcactgcagctgccagcgcaggaggattcgggtccctggccatgagcctgtctccgaccctgaagggcaggctgttgctgatgaggcccaaggcaggaggaggaagggagcaggccgctcctgggagaaagtccaatgagagcagatcccttggccacctttgtatggaaagagccttgacctcaccattaaaagtttgggagcagcagcaacaccacatccttcggcacgctcgcgagtcagaatgcccccactttcggatcactgtcccaacagacttctggttttgggacccagagtagcggattctctggttttggatcaggcacaggagggttcagctttgggtcaaataactcgtctgtccagggttttggtggctggcgaagctgagggcgtgtcagcaggcctttcgatccctgggaccaaccgcatcctcagcttcttccccgagaaatgctggagcaggctgttcagaccgacgttgccatcaaaacacatacacccagaaagaaacaacagaaaccaaaactcacaaggcgcatgattacttgttttatatttcatgttgggttttccctcccactattaaacagtctgtttccgt

SEQ ID NO: 161272 - DNA, 502 bp, Homo sapiens
  Payload ID: 11498
  Gene Symbol: NUP214
  Gene Name: nucleoporin 214kDa
  ENST ID: ENST00000476004
  CDS Start-End: 1-436
aggggtgccagcattcggttcagccccagcctttacaagccctctgggctcgacgggaggcaaagtgttcggagagggcactgcagctgccagcgcaggaggattcgggtttgggagcagcagcaacaccacatccttcggcacgctcgcgagtcagaatgcccccactttcggatcactgtcccaacagacttctggttttgggacccagagtagcggattctctggttttggatcaggcacaggaggtctgtccagggttttggtggctggcgaagctgagggcgtgtcagcaggcctttcgatccctgggaccaaccgcatcctcagcttcttccccgagaaatgctggagcaggctgttcagaccgacgttgccatcaaaacacatacacccagaaagaaacaacagaaaccaaaactcacaaggcgcatgattacttgttttatatttcatgttgggttttccctcccactattaaacagtctgtttccgtacagaa

SEQ ID NO: 161273 - DNA, 393 bp, Homo sapiens
  Payload ID: 11498
  Gene Symbol: NUP214
  Gene Name: nucleoporin 214kDa
  ENST ID: ENST00000528406
  CDS Start-End: 1-237
ggagagggcactgcagctgccagcgcaggaggattcgggtttgggagcagcagcaacaccacatccttcggcacgctcgcgagtcagaatgcccccactttcggatcactgtcccaacagacttctggttttgggacccagagtagcggattctctggttttggatcaggcacaggagggttcagctttgggtcaaataactcgtctgtccagggttttggtggctggcgaagctgagggcgtgtcagcaggctgttcagaccgacgttgccatcaaaacacatacacccagaaagaaacaacagaaaccaaaactcacaaggcgcatgattacttgttttatatttcatgttgggttttccctcccactattaaacagtctgtttccgtaca

SEQ ID NO: 161274 - DNA, 560 bp, Homo sapiens
  Payload ID: 11498
  Gene Symbol: NUP214
  Gene Name: nucleoporin 214kDa
  ENST ID: ENST00000530863
  CDS Start-End: 1-560
tgctcgacaaagtgatcagattaattgggaatcttggctactggaggattctagtcgagctgaattgcctgtgacagacaagagtgatgactccttgcccatgggagttgtcgtagactatacaaaccaagtggaaatcaccatcagtgatgaaaagactcttcctcctgctccagttctcatgttactttcaacagatggtgtgctttgtccattttatatgattaatcaaaatcctggggttaagtctctcatcaaaacaccagagcgactttcattagaaggagagcgacagcccaagtcaccagcctccctagcccccacccctgcagcgtctcctgtggctccatcagctgcttcattctcctttggatcatctggttttaagcctaccctggaaagcacaccagtgccaagtgtgtctgctccaaatatagcaatgaagccctccttcccaccctcaacctctgctgtcaaagtcaaccttagtgaaaagtttactgctgcagctacctctactcctgttagtagctcccagagcgcacccccgatgtcgccat

SEQ ID NO: 161275 - DNA, 1775 bp, Homo sapiens
  Payload ID: 11498
  Gene Symbol: NUP214
  Gene Name: nucleoporin 214kDa
  ENST ID: ENST00000531600
  CDS Start-End: 291-1775
agttggtatcatgtacgcctcacatgagaaggaggtatctagcacttctcgaccggggcctaaagctttatgttaaaaggaaaattatatagtagaactgtcaaagacttgagtattttacaaaaaggttttgaaagatcatatactcttttttcaaggacttcattggagaggtttttgtcactcttggagttagaatcaaagaaacctaaggaactttgctttatgcatgtctgggcaagtagtgtgacttgcaagaaatttccgagattcaccattcattgctgatcatgaaatcctctcttttgttacgaggtgttcacttctgttttcacttgccaggggcaacaccctccactaaagagtcaagccagccggacgcattctcatctggtgggggaagcaaaccttcttatgaggccattcctgaaagctcacctccctcaggaatcacatccgcatcaaacaccaccccaggagaacctgccgcatctagcagcagacctgtggcaccttctggaactgctctttccaccacctctagtaagctggaaaccccaccgtccaagctgggagagcttctgtttccaagttctttggctggagagactctgggaagtttttcaggactgcgggttggccaagcagatgattctacaaaaccaaccaataaggcttcatccacaagcctaactagtacccagccaaccaagacgtcaggcgtgccctcagggtttaattttactgcccccccggtgttagggaagcacacggagccccctgtgacatcctctgcaaccaccacctcagtagcaccaccagcagccaccagcacttcctcaactgccgtttttggcagtctgccagtcaccagtgcaggatcctctggggtcatcagttttggtgggacatctctaagtgctggcaagactagtttttcatttggaagccaacagaccaatagcacagtgcccccatctgccccaccaccaactacagctgccactccccttccaacatcattccccacattgtcatttggtagcctcctgagttcagcaactaccccctccctgcctatgtccgctggcagaagcacagaagaggccacttcatcagctttgcctgagaagccaggtgacagtgaggtctcagcatcagcagcctcacttctagaggagcaacagtcagcccagcttccccaggctcctccgcaaacttctgactctgttaaaaaagaacctgttcttgcccagcctgcagtcagcaactctggcactgcagcatctagtactagtcttgtagcactttctgcagaggctaccccagccaccacgggggtccctgatgccaggacggaggcagtaccacctgcttcctccttttctgtgcctgggcagactgctgtcacagcagctgctatctcaagtgcaggccctgtggccgtcgaaacatcaagtacccccatagcctccagcaccacgtccattgttgctcccggcccatctgcagaggcagcagcatttggtaccgtcacttctggctcatccgtctttgctcagcctcctgctgccagttctagctcagctttcaaccagctcaccaacaacacagccactgccccctctgccacgcccgtgtttgggcaagtggcagccagcaccgcaccaagtctgtttgggcagcagactggtagcacagccagcacagcagctgccacaccacaggtcagcagctcagggtttagcagcccagcttttggtaccacagcccca

SEQ ID NO: 161276 - DNA, 483 bp, Homo sapiens
  Payload ID: 11498
  Gene Symbol: NUP214
  Gene Name: nucleoporin 214kDa
  ENST ID: ENST00000498010
  CDS Start-End: 1-342
ctccagtgtttggcagccctcctacttttgggggatcccctgggtttggaggggtgccagcattcggttcagccccagcctttacaagccctctgggctcgacgggaggcaaagtgttcggagagggcactgcagctgccagcgcaggaggattcgggtttgggagcagcagcaacaccacatccttcggcacgctcgcgagtcagaatgcccccactttcggatcactgtcccaacagacttctggttttgggacccagagtagcggattctctggttttggatcaggcacaggagggttcagctttgggtcaaataactcgtaagtatccccctttttgagtctcaccttaattaaaagcattaaataaggttggaagtgtgtggatcttgctggatttgtgcattttcttttcgttttttcctgtttttagagtttgtcctggaagtgtgggggttcagcagcagggtttgggttttgtg

SEQ ID NO: 161277 - DNA, 545 bp, Homo sapiens
  Payload ID: 11498
  Gene Symbol: NUP214
  Gene Name: nucleoporin 214kDa
  ENST ID: ENST00000531584
  CDS Start-End: 390-545
gttaacgtagaggagtaagttgaggctcggaaagtaatttccctaaagtcacatttgacgcggggctgaaagccagcatcatttaagacctttgctctcccagtacttctgtaagaatgagggtacaacagacgggctacatctgttttaaatagtgaaaagaagattttcagtttagagcgctaaagaaggtgagaatctttgactcccctgaggaattgcccaaggaacgctcgagtctgcttgctgtgtccaacaaatatggtctggtcttcgctggtggagccagtggcttgcagatttttcctactaaaaatcttcttattcaaaataaacccggagatgatcccaacaaaatagttgataaagtccaaggcttgctagttcctatgaaattcccaatccatcacctggccttgagctgtgataacctcacactctctgcgtgcatgatgtccagtgaatatggttccattattgctttttttgatgttcgcacattctcaaatgaggctaaacagcaaaaacgcccatttgcctatcat

SEQ ID NO: 161278 - DNA, 3275 bp, Homo sapiens
  Payload ID: 11498
  Gene Symbol: NUP214
  Gene Name: nucleoporin 214kDa
  ENST ID: ENST00000483497
  CDS Start-End: 309-3059
ggagtgatatggaaccacagttggtatcatgtacgcctcacatgagaaggaggtatctagcacttctcgaccggggcctaaagctttatgttaaaaggaaaattatatagtagaactgtcaaagacttgagtattttacaaaaaggttttgaaagatcatatactcttttttcaaggacttcattggagaggtttttgtcactcttggagttagaatcaaagaaacctaaggaactttgctttatgcatgtctgggcaagtagtgtgacttgcaagaaatttccgagattcaccattcattgctgatcatgaaatcctctcttttgttacgaggtgttcacttctgttttcacttgccagggacagccaagatagaaacagctgtgacttcaaccccatctgcttctgggcagttcagcaagcctttctcattttctccatcagggactggctttaattttgggataatcacaccaacaccgtcttctaatttcactgctgcacaaggggcaacaccctccactaaagagtcaagccagccggacgcattctcatctggtgggggaagcaaaccttcttatgaggccattcctgaaagctcacctccctcaggaatcacatccgcatcaaacaccaccccaggagaacctgccgcatctagcagcagacctgtggcaccttctggaactgctctttccaccacctctagtaagctggaaaccccaccgtccaagctgggagagcttctgtttccaagttctttggctggagagactctgggaagtttttcaggactgcgggttggccaagcagatgattctacaaaaccaaccaataaggcttcatccacaagcctaactagtacccagccaaccaagacgtcaggcgtgccctcagggtttaattttactgcccccccggtgttagggaagcacacggagccccctgtgacatcctctgcaaccaccacctcagtagcaccaccagcagccaccagcacttcctcaactgccgtttttggcagtctgccagtcaccagtgcaggatcctctggggtcatcagttttggtgggacatctctaagtgctggcaagactagtttttcatttggaagccaacagaccaatagcacagtgcccccatctgccccaccaccaactacagctgccactccccttccaacatcattccccacattgtcatttggtagcctcctgagttcagcaactaccccctccctgcctatgtccgctggcagaagcacagaagaggccacttcatcagctttgcctgagaagccaggtgacagtgaggtctcagcatcagcagcctcacttctagaggagcaacagtcagcccagcttccccaggctcctccgcaaacttctgactctgttaaaaaagaacctgttcttgcccagcctgcagtcagcaactctggcactgcagcatctagtactagtcttgtagcactttctgcagaggctaccccagccaccacgggggtccctgatgccaggacggaggcagtaccacctgcttcctccttttctgtgcctgggcagactgctgtcacagcagctgctatctcaagtgcaggccctgtggccgtcgaaacatcaagtacccccatagcctccagcaccacgtccattgttgctcccggcccatctgcagaggcagcagcatttggtaccgtcacttctggctcatccgtctttgctcagcctcctgctgccagttctagctcagctttcaaccagctcaccaacaacacagccactgccccctctgccacgcccgtgtttgggcaagtggcagccagcaccgcaccaagtctgtttgggcagcagactggtagcacagccagcacagcagctgccacaccacaggtcagcagctcagggtttagcagcccagcttttggtaccacagccccaggggtctttggacagacaaccttcgggcaggcctcagtctttgggcagtcggcgagcagtgctgcaagtgtcttttccttcagtcagcctgggttcagttccgtgcctgccttcggtcagcctgcttcctccactcccacatccaccagtggaagtgtctttggtgccgcctcaagtaccagtagctccagttccttctcatttggacagtcttctcccaacacaggaggggggctgtttggccaaagcaacgctcctgcttttgggcagagtcctggctttggacagggaggctctgtctttggtggtacctcagctgccaccacaacagcagcaacctctgggttcagcttttgccaagcttcaggttttgggtctagtaatactggttctgtgtttggtcaagcagccagtactggtggaatagtctttggccagcaatcatcctcttccagtggtagcgtgtttgggtctggaaacactggaagagggggaggtttcttcagtggccttggaggaaaacccagtcaggatgcagccaacaaaaacccattcagctcggccagtgggggctttggatccacagctacctcaaatacctctaacctatttggaaacagtggggccaagacatttggtggatttgccagctcgtcgtttggagagcagaaacccactggcactttcagctctggaggaggaagtgtggcatcccaaggctttgggttttcctctccaaacaaaacaggtggcttcggtgctgctccagtgtttggcagccctcctacttttgggggatcccctgggtttggaggggtgccagcattcggttcagccccagcctttacaagccctctgggctcgacgggaggcaaagtgttcggagagggcactgcagctgccagcgcaggaggattcgggtttgggagcagcagcaacaccacatccttcggcacgctcgcgagtcagaatgcccccactttcggatcactgtcccaacagacttctggttttgggacccagagtagcggattctctggttttggatcaggcacaggagggttcagctttgggtcaaataactcgtctgtccagggttttggtggctggcgaagctgagggcgtgtcagcaggcctttcgatccctgggaccaaccgcatcctcagcttcttccccgagaaatgctggagcaggctgttcagaccgacgttgccatcaaaacacatacacccagaaagaaacaacagaaaccaaaactcacaaggcgcatgattacttgttttatatttcatgttgggttttccctcccactattaaacagtctgtttccgtac

SEQ ID NO: 161279 - DNA, 577 bp, Homo sapiens
  Payload ID: 11498
  Gene Symbol: NUP214
  Gene Name: nucleoporin 214kDa
  ENST ID: ENST00000526346
  CDS Start-End: 1-423
tgtaaagatgacgaggcagtggttcaggcccctcggcacgcccccgtggttcgcactccttccatccagcccagtctcttgccccatgcagcaccttttgctaaatctcacctggttcatggttcttcacctggtgtgatgggaacttcagtggctacatctgctagcaaaattattcctcaaggggccgatagcacaatgcttgccacgaaaaccgtgaaacatggtgcacctagtccttcccaccccatctcagccccgcaggcagctgccgcagcagcactcaggcggcagatggccagtcaggcaccagctgtaaacactttgactgaatcaacgttgaagaatgtccctcaagtggtaaatgtgcaggaattgaagaataaccctgcaaccccttctacagccatggggggtctctaataaattcccttaagccatctgggcctacaccagcatccggtcagttatcatctggtgacaaagcttcagggacagccaagatagaaacagctgtgacttcaaccccatctgcttctgggcagttcagcaagcctttctcattttctccatcagg

SEQ ID NO: 161280 - DNA, 1633 bp, Homo sapiens
  Payload ID: 11499
  Gene Symbol: NUP35
  Gene Name: nucleoporin 35kDa
  Uniprot ID: Q8NFH5
  ENST ID: ENST00000295119
  CDS Start-End: 104-1084
acgcaaccccataaggtagcacgccgttacccgtggggagcgtttccgccatttttgaaaattaattgggaaggtactggttttaagtgtagttgccgacgcaatggcagcctttgcagtggaacctcaggggcccgcgttaggatctgaaccaatgatgctgggttcacccacatctccaaagccaggagttaatgcccagttcttacctggatttttaatgggggatttgccagctccggtgactccacaacctcgatcaattagtggcccttcagtaggagtaatggaaatgagatcacctttacttgcaggtgggtcaccaccacaaccagttgtaccagctcataaagataaaagtggcgctccaccagttagaagtatatatgatgacatttctagcccaggacttggatcaacacctttaacttcaagaagacagccaaacatttcagtaatgcagagtcctcttgttggagttacatctactcctggaacagggcaaagtatgtttagtccagcaagtatcggtcagccacgaaagacgacattatctcctgcccagttggatcctttttatactcaaggagattctttgacttcagaagatcacctcgatgactcttgggtgactgtatttgggtttcctcaagcatctgcttcctacatattactacaatttgcacagtatgggaatatcttaaaacatgtgatgtctaatacaggaaattggatgcatattcgttatcaatctaaactgcaggctcggaaagccttaagcaaagatgggaggatttttggagaatccatcatgattggtgtaaaaccatgtattgacaaaagtgttatggaaagcagtgacagatgtgctttatcatctccatctttagcctttacaccaccaatcaaaactctaggtacaccaacacaacctggaagtactcctaggatttctaccatgagacctcttgctacagcatacaaagcctctactagtgattatcaggttatttctgacagacaaacgccaaaaaaagatgaaagtcttgtatccaaagcaatggagtacatgtttggctggtagtagaacaccaagaaggaggttgctacactaaaacagagttagcagagtgctgctggttccttcggttagttatataactgttcctgcagtattggatagctatctcatacttcttttagaaagaagcctttttcattaaggatacaacctatttgtagctcgcactttaaaagatgcttgagatacattttaaagaaaactaaaaatccctgtaaataggattttgtgctttctgtaacagtgcatgcttcagcacagaaaactcagcattgattattgtaaattaaataactgaaattgtggtgagacgtcatagtcttcatgagaacgtgggggtgaatttcatgaaggggaactatagttatttctaccgacacaaatattataattagcaatttgaattatggtcttttaatttagatagtatttaatattttaattatccttgtttgtatatgtcctgtcacagagtgtcctcttggtgtattctaaaacgagcattcttttaaaaaacctaaagtttcttgataataaacattgtcaatgata

SEQ ID NO: 161281 - DNA, 998 bp, Homo sapiens
  Payload ID: 11499
  Gene Symbol: NUP35
  Gene Name: nucleoporin 35kDa
  ENST ID: ENST00000374930
  CDS Start-End: 47-505
aaaattaattgggaaggtactggttttaagtgtagttgccgacgcaatggcagcctttgcagtggaacctcaggggcccgcgttaggatctgaaccaatgatgctgggttcacccacatctccaaagccaggagttaatgcccagttcttacctggatttttaatgggggatttgccagctccggtgactccacaacctcgatcaattagtggcccttcagtaggagtaatggaaatgagatcacctttacttgcaggtgggtcaccaccacaaccagttgtaccagctcataaagataaaagtggcgctccaccagttagaagtatatatgatgacatttctagcccaggacttggatcaacacctttaacttcaagaagacagccaaacatttcagtaatgcagagtcctcttgttggagttacatctactcctggaacaggtttcctcaagcatctgcttcctacatattactacaatttgcacagtatgggaatatcttaaaacatgtgatgtctaatacaggaaattggatgcatattcgttatcaatctaaactgcaggctcggaaagccttaagcaaagatgggaggatttttggagaatccatcatgattggtgtaaaaccatgtattgacaaaagtgttatggaaagcagtgacagatgtgctttatcatctccatctttagcctttacaccaccaatcaaaactctaggtacaccaacacaacctggaagtactcctaggatttctaccatgagacctcttgctacagcatacaaagcctctactagtgattatcaggttatttctgacagacaaacgccaaaaaaagatgaaagtcttgtatccaaagcaatggagtacatgtttggctggtagtagaacaccaagaaggaggttgctacactaaaacagagttagcagagtgctgctggttccttcggttagttatataactgttcctgcagtattggatagctatctcatacttc

SEQ ID NO: 161282 - DNA, 1470 bp, Homo sapiens
  Payload ID: 11499
  Gene Symbol: NUP35
  Gene Name: nucleoporin 35kDa
  Uniprot ID: Q8NFH5
  ENST ID: ENST00000409798
  CDS Start-End: 234-1163
acaccaggtgctgaaggctgagacggtgagagcatgagtgataagatgctctctccccttgctctctttctgaagatgacaaactccatcttttttctaaagtcttactaaaggtgacaatgtatatagtataatgaaggatgttactaaatgacatgtgctgcacacctgagtcttgtggaggctgaagaaaaggaggcttctgtagaaaataggaactcagatctgaaccaatgatgctgggttcacccacatctccaaagccaggagttaatgcccagttcttacctggatttttaatgggggatttgccagctccggtgactccacaacctcgatcaattagtggcccttcagtaggagtaatggaaatgagatcacctttacttgcaggtgggtcaccaccacaaccagttgtaccagctcataaagataaaagtggcgctccaccagttagaagtatatatgatgacatttctagcccaggacttggatcaacacctttaacttcaagaagacagccaaacatttcagtaatgcagagtcctcttgttggagttacatctactcctggaacagggcaaagtatgtttagtccagcaagtatcggtcagccacgaaagacgacattatctcctgcccagttggatcctttttatactcaaggagattctttgacttcagaagatcacctcgatgactcttgggtgactgtatttgggtttcctcaagcatctgcttcctacatattactacaatttgcacagtatgggaatatcttaaaacatgtgatgtctaatacaggaaattggatgcatattcgttatcaatctaaactgcaggctcggaaagccttaagcaaagatgggaggatttttggagaatccatcatgattggtgtaaaaccatgtattgacaaaagtgttatggaaagcagtgacagatgtgctttatcatctccatctttagcctttacaccaccaatcaaaactctaggtacaccaacacaacctggaagtactcctaggatttctaccatgagacctcttgctacagcatacaaagcctctactagtgattatcaggttatttctgacagacaaacgccaaaaaaagatgaaagtcttgtatccaaagcaatggagtacatgtttggctggtagtagaacaccaagaaggaggttgctacactaaaacagagttagcagagtgctgctggttccttcggttagttatataactgttcctgcagtattggatagctatctcatacttcttttagaaagaagcctttttcattaaggatacaacctatttgtagctcgcactttaaaagatgcttgagatacattttaaagaaaactaaaaatccctgtaaataggattttgtgctttctgtaacagtgcatgcttcagcacagaaaactcagcattgattattgtaaattaaataactgaaattgtggtgag

SEQ ID NO: 161283 - DNA, 342 bp, Homo sapiens
  Payload ID: 11499
  Gene Symbol: NUP35
  Gene Name: nucleoporin 35kDa
  ENST ID: ENST00000455063
  CDS Start-End: 183-342
ggtgagagcatgagtgataagatgctctctccccttgctctctttctgaagatgacaaactccatcttttttctaaagtcttactaaagtttaacaagaaataaaaaaagtacaaatgtttctcattcaagataatccacattttgaagatctcattttacacaaaaaagggatctgaaccaatgatgctgggttcacccacatctccaaagccaggagttaatgcccagttcttacctggatttttaatgggggatttgccagctccggtgactccacaacctcgatcaattagtggcccttcagtaggagtaatggaaatgagatcacctttacttgcag

SEQ ID NO: 161284 - DNA, 616 bp, Homo sapiens
  Payload ID: 11499
  Gene Symbol: NUP35
  Gene Name: nucleoporin 35kDa
  ENST ID: ENST00000442895
  CDS Start-End: 387-616
tacaccaggtgctgaaggctgagacggtgagagcatgagtgataagatgctctctccccttgctctctttctgaagatgacaaactccatcttttttctaaagtcttactaaagtggtgggaatccaaattacacagcaccaaaatatgttgtcagcggcaaatccatacgggtctgcaacaacaattcttgtgtcctcaggagagaatctgactaaggggcataaggcagaagagaccaagacaagttttagagcaggagtgaaggtgacaatgtatatagtataatgaaggatgttactaaatgacatgtgctgcacacctgagtcttgtggaggctgaagaaaaggaggcttctgtagaaaataggaactcagatctgaaccaatgatgctgggttcacccacatctccaaagccaggagttaatgcccagttcttacctggatttttaatgggggatttgccagctccggtgactccacaacctcgatcaattagtggcccttcagtaggagtaatggaaatgagatcacctttacttgcaggtgggtcaccaccacaaccagttgtaccagctcataaagataaaagtggcgctccaccagttagaagtat

SEQ ID NO: 161285 - DNA, 755 bp, Homo sapiens
  Payload ID: 11499
  Gene Symbol: NUP35
  Gene Name: nucleoporin 35kDa
  ENST ID: ENST00000452137
  CDS Start-End: 1-411
atggcagcctttgcagtggaacctcaggggcccgcgttaggatctgaaccaatgatgctgggttcacccacatctccaaagccaggagttaatgcccagttcttacctggatttttaatgggggatttgccagctccggtgactccacaacctcgatcaattagtggcccttcagtaggagtaatggaaatgagatcacctttacttgcaggtgggtcaccaccacaaccagttgtaccagctcataaagataaaagtggcgctccaccagttagaagtatatatgatgacatttctagcccaggacttggatcaacacctttaacttcaagaagacagggtccccaacagggtcctgatcagttgcccaggctagagtgcagcggcacagtcataactctgcagccttgaactcctgggttcaaccaatcctcctgcctcaactgtcctattgggatataggcacgtgctgctatgcctggctaattgtatttttttttgtagagatgaggtcttgccggattcaggtgatccttgcaccttgacctctcaaagcgctagattataaatgtgagccactgtgcctggccgacttttcttttaagtagaaaatttagtagcttcatagacacaagtgttgtttcctattattattgtgcttagtaggacatataaacaaagtttatcagttaagttgccaaacatttcagtaatgcagagtcctcttgttggagttacatctactcctggaacag

SEQ ID NO: 161286 - DNA, 470 bp, Homo sapiens
  Payload ID: 11499
  Gene Symbol: NUP35
  Gene Name: nucleoporin 35kDa
  ENST ID: ENST00000446612
  CDS Start-End: 125-470
acaccaggtgctgaaggctgagacggtgagagcatgagtgataagatgctctctccccttgctctctttctgaagatgacaaactccatcttttttctaaagtcttactaaaggatctgaaccaatgatgctgggttcacccacatctccaaagccaggagttaatgcccagttcttacctggatttttaatgggggatttgccagctccggtgactccacaacctcgatcaattagtggcccttcagtaggagtaatggaaatgagatcacctttacttgcaggtgggtcaccaccacaaccagttgtaccagctcataaagataaaagtggcgctccaccagttagaagtatatatgatgacatttctagcccaggacttggatcaacacctttaacttcaagaagacagccaaacatttcagtaatgcagagtcctcttgttggagttacatctactcctggaacag

SEQ ID NO: 161287 - DNA, 1203 bp, Homo sapiens
  Payload ID: 11500
  Gene Symbol: NUP37
  Gene Name: nucleoporin 37kDa
  Uniprot ID: Q8NFH4
  ENST ID: ENST00000251074
  CDS Start-End: 66-1046
tttcgtgaccttgtccagtagaaggctatttaattttcacaactgcttgaattttgacatacaagatgaagcaagatgcctcaagaaatgctgcctacactgtggattgtgaagattatgtgcatgtggtagaatttaatccctttgagaatggggattcaggaaacctaattgcatatggtggcaataattatgtggtcattggcacgtgtacgtttcaggaagaagaagcagacgttgaaggcattcagtataaaacacttcgaacatttcaccatggagtcagggttgatggcatagcttggagcccagagactagacttgattcattgcctccagtaatcaaattttgtacttcagctgctgatatgaaaattagattatttacttcagatcttcaggataaaaatgaatataaggttttagagggccataccgatttcattaatggtttggtgtttgatcccaaagaaggccaagaaattgcaagtgtgagtgacgatcacacctgcaggatttggaacttggaaggagtgcaaacagctcattttgttcttcattctcctggcatgagtgtgtgctggcatcctgaggagacttttaagctaatggttgcagagaagaatggaacaatccggttttatgatcttttggcccaacaggctattttatctcttgaatcagaacaagtgccattaatgtcagcacactggtgcttaaaaaacaccttcaaagttggagccgttgcaggaaatgattggttaatttgggatattactcggtccagttatcctcaaaataagagacctgttcacatggatcgagcctgcttattcaggtggtccacaattagtgaaaatctgtttgcaaccactggttatcctggcaaaatggcaagccagtttcaaattcatcatttaggacaccctcagcccatcctcatgggttctgtagccgttggatctggactgtcctggcatcgaactctccctctgtgtgtaattggaggagaccacaagctgttgttttgggtgactgaagtataaagtgttttctgtaccttagattcacaaactttgtatttttagtacatattttgaagaatttctatagtacatattttgaagaatttttatatcaaatataccgtatactttagaaaatgtctcagttgcttttattaaataaaatgttgatggtttg

SEQ ID NO: 161288 - DNA, 798 bp, Homo sapiens
  Payload ID: 11500
  Gene Symbol: NUP37
  Gene Name: nucleoporin 37kDa
  ENST ID: ENST00000547269
  CDS Start-End: 1-96
atttggaacttggaaggagtgcaaacagctcattttgttcttcattctcctggcatgagtgtgtgctggcatcctgaggagacttttaagatatgaaagataactccaggtcactcaacaggtttaaatggtacagctcaggagttttgatgccaaatcccacattcttgccaatctaccactactatttacaccctcaaggatttttcaacttaatagaaccagaattaaaagaacactgcttaaaactaatggttgcagagaagaatggaacaatccggttttatgatcttttggcccaacaggctattttatctcttgaatcagaacaagtgccattaatgtcagcacactggtgcttaaaaaacaccttcaaagttggagccgttgcaggaaatgattggttaatttgggatattactcggtccagttatcctcaaaataagagacctgttcacatggatcgagcctgcttattcaggtggtccacaattagtgaaaatctgtttgcaaccactggttatcctggcaaaatggcaagccagtttcaaattcatcatttaggacaccctcagcccatcctcatgggttctgtagccgttggatctggactgtcctggcatcgaactctccctctgtgtgtaattggaggagaccacaagctgttgttttgggtgactgaagtataaagtgttttctgtaccttagattcacaaactttgtatttttagtacatattttgaagaatttctatagtacatattttgaagaatttttatatcaaatataccgtatact

SEQ ID NO: 161289 - DNA, 2372 bp, Homo sapiens
  Payload ID: 11500
  Gene Symbol: NUP37
  Gene Name: nucleoporin 37kDa
  Uniprot ID: Q8NFH4
  ENST ID: ENST00000552283
  CDS Start-End: 141-1121
aagcagagccacagcgcgtcgcggcagcccccaaggaagaccagcctgcctctggtcggttcctggcgctctgcgtttcgtgaccttgtccagtagaaggctatttaattttcacaactgcttgaattttgacatacaagatgaagcaagatgcctcaagaaatgctgcctacactgtggattgtgaagattatgtgcatgtggtagaatttaatccctttgagaatggggattcaggaaacctaattgcatatggtggcaataattatgtggtcattggcacgtgtacgtttcaggaagaagaagcagacgttgaaggcattcagtataaaacacttcgaacatttcaccatggagtcagggttgatggcatagcttggagcccagagactagacttgattcattgcctccagtaatcaaattttgtacttcagctgctgatatgaaaattagattatttacttcagatcttcaggataaaaatgaatataaggttttagagggccataccgatttcattaatggtttggtgtttgatcccaaagaaggccaagaaattgcaagtgtgagtgacgatcacacctgcaggatttggaacttggaaggagtgcaaacagctcattttgttcttcattctcctggcatgagtgtgtgctggcatcctgaggagacttttaagctaatggttgcagagaagaatggaacaatccggttttatgatcttttggcccaacaggctattttatctcttgaatcagaacaagtgccattaatgtcagcacactggtgcttaaaaaacaccttcaaagttggagccgttgcaggaaatgattggttaatttgggatattactcggtccagttatcctcaaaataagagacctgttcacatggatcgagcctgcttattcaggtggtccacaattagtgaaaatctgtttgcaaccactggttatcctggcaaaatggcaagccagtttcaaattcatcatttaggacaccctcagcccatcctcatgggttctgtagccgttggatctggactgtcctggcatcgaactctccctctgtgtgtaattggaggagaccacaagctgttgttttgggtgactgaagtataaagtgttttctgtaccttagattcacaaactttgtatttttagtacatattttgaagaatttctatagtacatattttgaagaatttttatatcaaatataccgtatactttagaaaatgtctcagttgcttttattaaataaaatgttgatggtttgaaaaattatttttctactctgttctctgtgtgtgtatatatatatatttttaatcttacaaaatcatattgactcagcagctcacctccagagaagagatgactaaggaaaaataatgcttttgagtttatcaaaaaaggagtatttgaagtgtatcctgttttctatactttgagtatatgctgtttttctaattctcagggacacatttatcaaaagagaaaaaaaggccaggtacaatggctcacacttgtaatcccaacactttgggaggctgaagggagtggatcacttgaggtgaggagttcaagaccaacctggccaacatggtgaaaccctatctctactaaaaaaataaaaataaaaaaaattagccaagcatggtttggaagactgaggcaggagaatcacttgaacctggaaggcagaggttacagtgagccaagatcgtgccacttcactgcagcctgggcgacagagcgagactatctcaaaagaaaaaaaatccaaggagaaaaaaatatcttagggtattctggaagtggttgttgagtatatatatgtgtatgtgtactcaatttaatgtaaaaaattgttttcagtttcttaaatatgtgattgattatattgctcaaccctgtttattatacgcagattcctttggacgaggtgttctaacagtcttagaacatctgatatatgggatcaaaagttaccttgaaaaatgacttctagtgtatacctttaacagcctcctttttgtgaattttcactgttcttaccaagaaacttaagtgtttttgagatgggacctgttggcaatggaactgtgttcaccctctcaaagatcattaaaatcaacgttatctaagacagctgtatcacatttttgggatacatcatggtacagtcagaagcatataaaattatggttctgcttgtcagtcacatacagaatccaatacattttgacaaactgcccattcctgcaagttaatgccctttttgaagcttcatttcctcttgtaaagtacagataggaatcattattttgtggagttgctgtaaagattaaataaaggtgaatgaaaata

SEQ ID NO: 161290 - DNA, 762 bp, Homo sapiens
  Payload ID: 11500
  Gene Symbol: NUP37
  Gene Name: nucleoporin 37kDa
  ENST ID: ENST00000551744
  CDS Start-End: 137-762
agagccacagcgcgtcgcggcagcccccaaggaagaccagcctgcctctggtcggttcctggcgctctgcgtttcgtgaccttgtccagtagaaggctatttaattttcacaactgcttgaattttgacatacaagatgaagcaagatgcctcaagaaatgctgcctacactgtggattgtgaagattatgtgcatgtggtagaatttaatccctttgagaatggggattcaggaaacctaattgcatatggtggcaataattatgtggtcattggcacgtgtacgtttcaggaagaagaagcagacgttgaaggcattcagtataaaacacttcgaacatttcaccatggagtcagggttgatggcatagcttggagcccagagactagacttgattcattgcctccagtaatcaaattttgtacttcagctgctgatatgaaaattagattatttacttcagatcttcaggataaaaatgaatataaggttttagagggccataccgatttcattaatggtttggtgtttgatcccaaagaaggccaagaaattgcaagtgtgagtgacgatcacacctgcagttatcctcaaaataagagacctgttcacatggatcgagcctgcttattcaggtggtccacaattagtgaaaatctgtttgcaaccactggttatcctggcaaaatggcaagccagtttcaaattcatcatttaggacaccctcagcccatcctcatgggttctgtagccgttggatc

SEQ ID NO: 161291 - DNA, 645 bp, Homo sapiens
  Payload ID: 11500
  Gene Symbol: NUP37
  Gene Name: nucleoporin 37kDa
  ENST ID: ENST00000550459
  CDS Start-End: 492-645
tattttaatttttaagttccgggatacgtgtgcgggacgtgcaggtttattacaaaggtaaaacgtgtgctatggtggtttgcacacccatcacctaggtattaagctccacatgcattagctatttatcctgatgctctccctccgcccaaccccctgaacattatttttatatcacacattttggtactccttaacaacagatcctgtattttctatctgtttatattatagcccttttcacgttgagtcataactatccctaaactgtggtctccttcaagccaggaggctgtttttttcttcattagcgctggttctccacacacaatgaagtcttccaaatcctggccctgcttatgagcttggcaagttagttaacctactgaagcctcagtttctccatctacaaaatggagaccagagtttcgtgaccttgtccagtagaaggctatttaattttcacaactgcttgaattttgacatacaagatgaagcaagatgcctcaagaaatgctgcctacactgtggattgtgaagattatgtgcatgtggtagaatttaatccctttgagaatggggattcaggaaacctaattgcatatggtggcaataattatgtggtcattggcacgtgtacgtttc

SEQ ID NO: 161292 - DNA, 3874 bp, Homo sapiens
  Payload ID: 11501
  Gene Symbol: NUP43
  Gene Name: nucleoporin 43kDa
  Uniprot ID: Q8NFH3
  ENST ID: ENST00000340413
  CDS Start-End: 78-1220
gttccgcgggaagaggcggtgctgagaggcgcgtactgtgcttgctttttgcagtacctgctgcggccgctttcggcatggaggaaatttatgcgaagtttgtgtcccagaaaatcagcaaaacccgctggcgaccgctgcctccgggaagtttacagaccgcggagacgttcgctacaggatcttgggacaatgaggaaaattatatttcactgtggtctattggagattttggaaacttggactctgatggagggtttgaaggagaccatcagttattgtgtgatatcagacaccatggtgatgtaatggatttacagttttttgaccaggaaagaattgtcgctgcttcatcaacaggatgtgtaacagttttccttcaccatccaaataaccagactctgtcagtcaaccagcagtggactacagctcactaccacacaggccctggcagtccttcctatagcagtgcaccatgtacaggtgttgtgtgcaacaacccagaaatcgttacagttggagaggatggtcgaataaatctcttcagagctgatcacaaggaagctgtaagaaccatagacaatgcagatagtagtacactccatgctgtaacctttcttcgaactcctgagattcttactgtaaattcaattggacagttgaaaatatgggatttcagacaacaaggaaatgagccttctcagatattgtcactgactggtgaccgagtgccactccactgtgttgatagacatcccaaccaacagcatgttgtagctactggtggccaagatggaatgttgagtatttgggatgttagacaaggtactatgcctgtatctctgctgaaggctcatgaagctgaaatgtgggaagttcactttcacccatccaacccagaacatctttttacctgctctgaagatggatccctctggcactgggatgcttccacagatgtacctgaaaagtcgtcactctttcaccaaggaggaagaagcagtacttttttgtctcatagcattagtaaccaagctaatgttcaccagtctgtcattagctcctggctcagcactgatcctgcaaaagaccgaattgaaatcacaagcttacttcccagtaggtctctgtctgtgaacactttggatgttttaggtccttgtcttgtttgtggaaccgatgcagaagcaatttatgttactagacatcttttttcgtagaagtactataattataagatttcagatagaacatgcaattagccttttgaaatccaacttctgtgcaaaattttagtatcagaaaatacgagatttgcaggggaaacatcagtaaactaccattaatgtcaatgcccagttttgacttttgttagcctgacactcccaaacagttgtagaatccgatagatgactgatggcaaaagattgtgaacatgtggaagaaaatcagtgggattctggtgctgatgaataggttgccttcagagtattattgacagacagcttgtggaactaattctttatttttgatgttgtgggaattaacacatcaatggtggttatgggaactaccaatgggttcctacaatttttatcagtagtatgtggcatatacaccttcctagtggcagttgccaatgttaatgattattctttttattgcaagtatttcctatgatccttccacactttatttccttaataataataaactttttcagaaagaattgagtagagcaaaaatgacaaagatgtgtagctgtgttcaatttttttttttttttttttttgaggcagagtcttgctctgctggagtgcggtggtgcaatctcggctcactgcaacctccacctcccaggttcaagcaattctcctgcctcagtctcctgagtagctggaactacaggtgtgcgccaccacgcccagctaatttttgtaattttagtagagacagagtttcaccatgttggccaggatggtctcgatctcttgacctcatgatccacccgcctcgacctcccaaagtgctgtgattacaggtgtgagccactgcacccggcctgaaatttttttaaggtgaaaatgttttgacaagttcctttttcagaataggtttttgagcagaactctttcagcttgttagacccaactttgcttttgtttagcttcacagcatagctgaaagttgccaaactggacattgtgcaataaagtagaattctatattgataagcaaactatttccaaactaaaaatgtgatagataaaagtgtgattaatcaaatgatatgatcagagtaaagaattttgccattttgatccttttactttgttttagccacctatagtgttaccaaccatctttatccttgtctgcagggataataatgaactaatgtagtgttttaagataatttaatgatactatctttccaaactttgttagattttaaatgtattattgacctgagaccttaatgacaaatcactgctattagacaattgaagtgttcatttactttgtaattccaataatcatagttatggaattatggtaaggttttgcttttctgtcctaataaatatatatattttttgagatggagttttgctcttgttgctgaggctggagtgaaatggcatgatctcagctcactgcaacctccgtctcttaggttcaagcaattctcctgcctcagcctcccgagtagctgggattacaggtgctcaccaccacacccagctaatttttgtatttttagtagagatggggtttcactgtgttggccaggctggtcttgaactgacctcatgatccacctgcctcagcctcccaaaatgctgggattacaggcttgagccactgctcccggctgatttttgtattagtagagacgacagggtttcaccatgttggccagggctggtctcgaactcctgaccacaggtaatcagcccgcctcggcctcccaaagtgctgggattacaggcgtgagccacttagtatttgtaaccataagagaaagtatattttaacagcattacatttcatgccaattgacaagttttgccaattttaataagaaactaagctttatgtaatgtaacaccgtaatttatgaatttgttcattgtcactgcctttattcatgaaactgtcaaatagagtgtctttcaagggttgcaggatcttagagatagaaagtaccttggtgatcatctccagcctaaatttcatcatcccttctatggtattcccaacaaattatcatccaacctatacttaaaaacatatggtggccaggcatggtggctcacgcctgtaatgctagcactttgggaggccgaggtgggtgaagcacctgaggtcaagagttcgagatcagcctggccaacatggcgaaaccccgtctccactaaaaatgcaaaaaaaaaattaaccgggcgtggtggcaggcatctataatcccagctacttgggaggctgaggcaggagaattgctcaaacccgggaggcagaggttgcagtgacccaagatcgtgccacttcactccagcctgggcaaaagagcaaaacgccatctcaaaaaatatacatatataaggagataaagtttcccattttccaatacagtttcacatttgaacagccctaattgatacaactttatggcagggttttagtgtgtgagtgggatccaaaacactcaatcctgtaaaagggtacagtcctattgtatgttaacacactgatgatgtgagcctgtgagatgagccaatcaccagttgttatgttcgaatctgctttgtgttgggacgctttaatgtcagggtttcactaaataaatgaattttcatatactgaactgaaa

SEQ ID NO: 161293 - DNA, 882 bp, Homo sapiens
  Payload ID: 11501
  Gene Symbol: NUP43
  Gene Name: nucleoporin 43kDa
  ENST ID: ENST00000367402
  CDS Start-End: 58-621
gctgagaggcgcgtactgtgcttgctttttgcagtacctgctgcggccgctttcggcatggaggaaatttatgcgaagtttgtgtcccagaaaatcagcaaaacccgctggcgaccgctgcctccgggaagtttacagaccgcggagacgttcgctacaggatcttgggacaatgaggaaaattatatttcactgtggtctattggagattttggaaacttggactctgatggagggtttgaaggagaccatcagttattgtgtgatatcagacaccatggtgatgtaatggatttacagttttttgaccaggaaagaattgtcgctgcttcatcaacaggatgtgtaacagttttccttcaccatccaaataaccagactctgtcagtcaaccagcagtggactacagctcactaccacacaggccctggcagtccttcctatagcagtgcaccatgtacaggtgttgtgtgcaacaacccagaaatcgttacagttggagaggatggtcgaataaatctcttcagagctgatcacaaggaagctgtaagaaccataggactggtgaccgagtgccactccactgtgttgatagacatcccaaccaacagcatgttgtagctactggtggccaagatggaatgttgagtatttgggatgttagacaaggtactatgcctgtatctctgctgaaggctcatgaagctgaaatgtgggaagttcactttcacccatccaacccagaacatctttttacctgctctgaagatggatccctctggcactgggatgcttccacagatgtacctgaaaagtcgtcactctttcaccaaggtaaaactttttaatgaatactgttatgtgtacttttttttttttttt

SEQ ID NO: 161294 - DNA, 1089 bp, Homo sapiens
  Payload ID: 11501
  Gene Symbol: NUP43
  Gene Name: nucleoporin 43kDa
  Uniprot ID: Q8NFH3
  ENST ID: ENST00000367404
  CDS Start-End: 34-888
ctttttgcagtacctgctgcggccgctttcggcatggaggaaatttatgcgaagtttgtgtcccagaaaatcagcaaaacccgctggcgaccgctgcctccgggaagtttacagaccgcggagacgttcgctacaggatcttgggacaatgaggaaaattatatttcactgtggtctattggagattttggaaacttggactctgatggagggtttgaaggagaccatcagttattgtgtgatatcagacaccatggtgatgtaatggatttacagttttttgaccaggaaagaattgtcgctgcttcatcaacaggatgtgtaacagttttccttcaccatccaaataaccagactctgtcagtcaaccagcagtggactacagctcactaccacacaggccctggcagtccttcctatagcagtgcaccatgtacaggtgttgtgtgcaacaacccagaaatcgttacagttggagaggatggtcgaataaatctcttcagagctgatcacaaggaagctgtaagaaccatagtgtgggaagttcactttcacccatccaacccagaacatctttttacctgctctgaagatggatccctctggcactgggatgcttccacagatgtacctgaaaagtcgtcactctttcaccaaggaggaagaagcagtacttttttgtctcatagcattagtaaccaagctaatgttcaccagtctgtcattagctcctggctcagcactgatcctgcaaaagaccgaattgaaatcacaagcttacttcccagtaggtctctgtctgtgaacactttggatgttttaggtccttgtcttgtttgtggaaccgatgcagaagcaatttatgttactagacatcttttttcgtagaagtactataattataagatttcagatagaacatgcaattagccttttgaaatccaacttctgtgcaaaattttagtatcagaaaatacgagatttgcaggggaaacatcagtaaactaccattaatgtcaatgcccagttttgacttttgttagcctgacactcccaaacagttgtagaatccgatagatgactgatggc

SEQ ID NO: 161295 - DNA, 1012 bp, Homo sapiens
  Payload ID: 11501
  Gene Symbol: NUP43
  Gene Name: nucleoporin 43kDa
  ENST ID: ENST00000403890
  CDS Start-End: 66-419
gaggcggtgctgagaggcgcgtactgtgcttgctttttgcagtacctgctgcggccgctttcggcatggaggaaatttatgcgaagtttgtgtcccagaaaatcagcaaaacccgctggcgaccgctgcctccgggaagtttacagaccgcggagacgttcgctacaggatcttgggacaatgaggaaaattatatttcactgtggtctattggagattttggaaacttggactctgatggagggtttgaaggagaccatcagttattgtgtgatatcagacaccatggtgatgtaatggatttacagttttttgaccaggaaagaattgtcgctgcttcatcaacaggatgtgtaacagttttccttcaccatccaaataaccagacaatgcagatagtagtacactccatgctgtaacctttcttcgaactcctgagattcttactgtaaattcaattggacagttgaaaatatgggatttcagacaacaaggaaatgagccttctcagatattgtcactgactggtgaccgagtgccactccactgtgttgatagacatcccaaccaacagcatgttgtagctactggtggccaagatggaatgttgagtatttgggatgttagacaaggtactatgcctgtatctctgctgaaggctcatgaagctgaaatgtgggaagttcactttcacccatccaacccagaacatctttttacctgctctgaagatggatccctctggcactgggatgcttccacagatgtacctgaaaagtcgtcactctttcaccaaggtaaaactttttaatgaatactgttatgtgtactttttttttttttttttaagacagagtctcactctatcacccaggctggaatgcagtggcacgatctcagctcactgcaacctccgcctcctgggttcaagcgattctcgtgcctcagcctcccgagtagccaggactactagtcatgcaccaccgtgcccggctaatttttttgtattttt

SEQ ID NO: 161296 - DNA, 576 bp, Homo sapiens
  Payload ID: 11501
  Gene Symbol: NUP43
  Gene Name: nucleoporin 43kDa
  ENST ID: ENST00000543637
  CDS Start-End: 41-576
gtgcttgctttttgcagtacctgctgcggccgctttcggcatggaggaaatttatgcgaagtttgtgtcccagaaaatcagcaaaacccgctggcgaccgctgcctccgggaagtttacagaccgcggagacgttcgctacaggatcttgggacaatgagacaaaactttctgttttacaggaaaattatatttcactgtggtctattggagattttggaaacttggactctgatggagggtttgaaggagaccatcagttattgtgtgatatcagacaccatggtgatgtaatggatttacagttttttgaccaggaaagaattgtcgctgcttcatcaacaggatgtgtaacagttttccttcaccatccaaataaccagactctgtcagtcaaccagcagtggactacagctcactaccacacaggccctggcagtccttcctatagcagtgcaccatgtacaggtgttgtgtgcaacaacccagaaatcgttacagttggagaggatggtcgaataaatctcttcagagctgatcacaaggaagctgtaagaaccatagacaatgcagatag

SEQ ID NO: 161297 - DNA, 5233 bp, Homo sapiens
  Payload ID: 11502
  Gene Symbol: NUP50
  Gene Name: nucleoporin 50kDa
  Uniprot ID: Q9UKX7
  ENST ID: ENST00000347635
  CDS Start-End: 467-1873
agccccgcgccggtttccagggagctgggcgcatgcgccgcgtaaggggcccggccggcggaaggaggtgctactgccggaagcgccggcgcgcttgcgcagtagctgaacgcgggcgtttctttcctccctttttttcgaattggttttgggggtagattcgagttacaaaatggccgcccggagcgtgttcggcgcggttcccccagctgtctctggctgaaccggcgctctcgcctccctgccgaacacagcgtgaggagcccccccagggatatggtgtttgagtctctgggcttgccgagcactaagtcctctgagttccgcagcgcagcaccggaagcggccgagcgcgctcagcccggcgacccctgcgggctccagacccctgcgccgctgcgccccgggtttcgccgcaaccaagacccagcgagtgcagcggcggccgccgaggaggttcgaaaacatggccaaaagaaatgccgagaaggaactgacagataggaattgggatcaagaagatgaagctgaagaggtgggaacattctccatggccagtgaggaagtcttgaagaatagagccataaagaaagcaaagcgcagaaatgttggatttgaatctgacactggaggagcctttaaaggttttaaaggtttggtggtaccttctggaggaggacgcttttctggatttggtagtggcgctggagggaagcctttggaaggactgtcgaatggaaacaacataaccagtgcccctcccttcgccagtgcaaaggcagcggcagatcccaaggtagcctttggttctcttgctgcaaatggccctaccaccttggttgataaagtttcaaatcccaaaactaatggggacagtcagcagccctcctcctctggccttgcttccagtaaagcttgtgtcggaaatgcctatcacaagcagttggccgccttgaactgctccgtgcgggattggatagtgaagcacgtgaatacaaaccccctctgtgatctgacacctatctttaaagactatgagaaatatttagcaaacattgaacagcaacacgggaacagtggcaggaattctgaaagtgaatctaacaaagtggcagctgaaacacagtctccttccctttttggctcaacaaaattacagcaagagtcaacgtttttgtttcatggcaacaaaactgaagatacacctgacaagaagatggaggtggcatctgaaaagaaaacggacccatcatcactaggagcgacaagtgcctcatttaatttcggcaagaaagttgatagctctgttttgggctcattaagctctgtccccctgactggattttctttctcccctggaaactccagtttatttggcaaagatactacccagagtaaaccagtctcttcaccatttcccactaaaccattggagggccaagcagaaggtgacagtggtgaatgcaaaggtggagatgaagaagagaatgatgagccacccaaagtagtagttaccgaagtaaaagaagaagatgctttttactccaaaaagtgtaaactgttttacaagaaagacaatgagtttaaagagaaaggcataggtactctgcatttaaaacctacagcaaatcagaagacacagcttttggtgcgggcagacaccaatttaggcaacatattgctgaacgttctgattccacccaatatgccatgtacgcgaacagggaagaataacgttcttatcgtctgtgttccaaatccaccaattgacgagaagaatgccaccatgccagtcaccatgttgattcgggtaaaaaccagcgaggatgcagacgagttgcacaaaattttactggagaaaaaggatgcctgaacacgcaaagtcggctgcagaattattgccaagttgctgctgcttccaccgccccttaaagttagtcagtttttcttctcttctttgacattctaagaacttatagataacttaaaacttttgtgaggaagattaatgtggccaataaaacctttaaatgttaagtgtcaagaaactgcactctcccttcttaagaactgcctaaagtgtaaaatacatttgaatgcaatttttggaagattttttaatgttcgtttattaaactaaccctaagtgatttcttcaaggactgcaatcagggtatcaatttgctttcccaaaggctcttccaacccgtgggttttggggtccaccgccaccacgagagaggcttttgaacaggtgcctggctgtgttcagaaggaagctggcctgtgtgcttctctccggtgggctcagccgacgtgtgagacttgttctgttaccaaatgaaccgggctgccacgctgtgacaggcgtttgtcctctgctttatttttactttgaagctcaaatgcgagtactaagtgttcacctcagcgttcgaatcattggcctgtaaccctgtgggctgcttcacgagaattcaggacctgcattttcattctaaaaagaaatgaacagcttgtgaaggagttttttggcttcatagtttctattcatgaggtagtgttacttctttatccccctaaagacaaaatgaagataaagggggattgccaggaatgggtttaaaagcacaaatgtggtagcttatcatctacaccatggagagtgaacccttacgaaatgaaagtcaaatgagaccatccgagaaaaagatgcgcataggcatttgtaccatgatcaaccccacgcacatgaaaactgtgaccaagtgacgtgcctgggagctttgacacacgagccgtgtgaattcactaggaaacatgtaataaagtcatggaagagaaaatcgtgtgtaaactttgcctttaactttagaccgcagtatattataatacatttgatatctgaaatatctttacttttttaagagtaagattccatatgtctgtctggaagggagccatggttattcacacgaatatccctgtcacttctccagaggtgtcaggtaactaacacgagcattctttgaagactctgggcacatgaatgatacacagaattgaatgtttaaatttccactgagtcctcatgaatcatttgagactagtaccagctgatcttgtgtacaggctcagggtcagtgcccaagggctcccgcgtgtgtgttctgatcttcagtgcgtagcacattctccatttagaaaagagtggtcagaataattgtggacggtacagtggctttttaaaactacagtctttaggtgtaaggtttggcgccgggagcaattttatgatcaaatatgatgaactcctaagtcactgaggtgtgattgggccaatgttggcatgaggttcttgctctacttccagtgttttgattccactgggagaatttggcctagtgtgtggctttggatgaatccgtgtagagagaggtgagcttgtcctgttacagatgctgtcagacatagcgatagtaggcacctagggaggaagtggccgttagttttacactgactttttaagaatggagaatgcacgtgggtttctgttgcggatgattcatagtaagcaagcggttgatgctgttaataccggccccacccgattgacattaagtttattcagcttttaaaaagatgaagaactaaggggaacaaatttaagtttgttgcaacttagccacacatgcttccctggtaccagctggaatcagcagctcacaggcatcttcaggacacttcagtgtatatgacacagtactttgttagcgtctgcgtgtgtatggaaagttgacaaaaaatggcatgaaaagatcatgattggattttcttttaaacctgcccttctgtaaaaaatagtttatatatttttaaattagtaggtatgtgtggcttccttttttcctaacattcccagcaaatttttgctgctaagactatcactgttaaagtgaaaattacagggaaaaatgtgatgaatataccgtaactcaaaatgtgatattttcttaaaatcactcttttatgctttaggaactggttggtctccactttgattattagtgtaaagagcctgagtatacgtggatttcattgtaaaatttaactccttgtcttttacttggggcacggggcccctggagggcttccctactttccccactatgttaacaggtaattctgatttatgcgtttagtttgacttatttttaacaaaatattagaagttatgctttaaaatgtttaatgtggactgaaattttcatcttttgtttgagaatctatgaagtgtatcatatacgtggcctaaagcaaggtgtgtattttgttattctgaaattgttttgcatctggacaaatactaaatatcccagtggcctttttttttttttttttaaaacctgtgtatccatctcatccttttgcgcattcctagtaagcaaaaaaatttgttatgccatcttcattattcgaattacagactgaaaaaatatggccagtttttaaagaagtttagattatgttttccatggaaggacaagtctgactgttcataggctgattttctttaagaggattattctgttttacaatttcaattctagatcacattttatatatgctgcatgccaaaaaaaaaaaaaagagaaaactgccttttctggtgtggaggggaagaaaaactaatattctaccttactagtagagttcaaaacaagttttcactgagagccttttcagtaaaagttaaacaagtttgttttttgagcatttgtcagttattctatttcagaagagtcaaaattcaagcacgatacattttgaaggctttgcaaactcctaaacccctgatgagtcctctcattctggaagtgggaatttgagtagatactgatttgtcccgtagtatggcagatgacagggaggtcttttccaagcaggcactcagaacacaggtcaccgtatgttctcagccagtaacaatcatactgaggacgaaggactctccgtttgatgcagacacaattgtaatggagatgtaaaacttcttagcaatcagatggataaattgtttgctttttactttaaataggaaattgttttctaaaactaaaatacttgaattgtcagacaatataatctcagcttgtattagtttttgaatgctcccatcgaggaagtgtaacaatccatgaaatgtgaataaatgaaaagtaaacaaaatccc

SEQ ID NO: 161298 - DNA, 1895 bp, Homo sapiens
  Payload ID: 11502
  Gene Symbol: NUP50
  Gene Name: nucleoporin 50kDa
  Uniprot ID: Q9UKX7
  ENST ID: ENST00000396096
  CDS Start-End: 398-1720
ggggtgggatgacagcggcgacgcagccccggctgtttttgaagcggggcccgggccccaccgggctgcggcgtccgactcgagtgagactctcccctgcggccccgccggaggttcgaaaacatggccaaaagaaatgccgagaaggaactgacagataggaattgggatcaagaagatgaagctgaagagggtaaaagaagggctataaactaaagccgaagatattcagcagctttctgacgtggacatcagaagtgtggacatgagtgtgctttgagcgcactgtggaagagcagtggttgtccagcaaggtcctaggtgcctccgtggcctttcgtacagtgggcaagttgggcaggactcatcttaaaaatcatgtgtgggaacattctccatggccagtgaggaagtcttgaagaatagagccataaagaaagcaaagcgcagaaatgttggatttgaatctgacactggaggagcctttaaaggttttaaaggtttggtggtaccttctggaggaggacgcttttctggatttggtagtggcgctggagggaagcctttggaaggactgtcgaatggaaacaacataaccagtgcccctcccttcgccagtgcaaaggcagcggcagatcccaaggtagcctttggttctcttgctgcaaatggccctaccaccttggttgataaagtttcaaatcccaaaactaatggggacagtcagcagccctcctcctctggccttgcttccagtaaagcttgtgtcggaaatgcctatcacaagcagttggccgccttgaactgctccgtgcgggattggatagtgaagcacgtgaatacaaaccccctctgtgatctgacacctatctttaaagactatgagaaatatttagcaaacattgaacagcaacacgggaacagtggcaggaattctgaaagtgaatctaacaaagtggcagctgaaacacagtctccttccctttttggctcaacaaaattacagcaagagtcaacgtttttgtttcatggcaacaaaactgaagatacacctgacaagaagatggaggtggcatctgaaaagaaaacggacccatcatcactaggagcgacaagtgcctcatttaatttcggcaagaaagttgatagctctgttttgggctcattaagctctgtccccctgactggattttctttctcccctggaaactccagtttatttggcaaagatactacccagagtaaaccagtctcttcaccatttcccactaaaccattggagggccaagcagaaggtgacagtggtgaatgcaaaggtggagatgaagaagagaatgatgagccacccaaagtagtagttaccgaagtaaaagaagaagatgctttttactccaaaaagtgtaaactgttttacaagaaagacaatgagtttaaagagaaaggcataggtactctgcatttaaaacctacagcaaatcagaagacacagcttttggtgcgggcagacaccaatttaggcaacatattgctgaacgttctgattccacccaatatgccatgtacgcgaacagggaagaataacgttcttatcgtctgtgttccaaatccaccaattgacgagaagaatgccaccatgccagtcaccatgttgattcgggtaaaaaccagcgaggatgcagacgagttgcacaaaattttactggagaaaaaggatgcctgaacacgcaaagtcggctgcagaattattgccaagttgctgctgcttccaccgccccttaaagttagtcagtttttcttctcttctttgacattctaagaacttatagataacttaaaacttttgtgaggaagattaatgtggccaataaaacctttaaatgttaagtgtcaagaaa

SEQ ID NO: 161299 - DNA, 2059 bp, Homo sapiens
  Payload ID: 11502
  Gene Symbol: NUP50
  Gene Name: nucleoporin 50kDa
  Uniprot ID: Q9UKX7
  ENST ID: ENST00000407019
  CDS Start-End: 562-1884
gttttgggggtagattcgagttacaaaatggccgcccggagcgtgttcggcgcggttcccccagctgtctctggctgaaccggcgctctcgcctccctgccgaacacagcgtgaggagcccccccagggatatggtgtttgagtctctgggcttgccgagcactaagtcctctgagttccgcagcgcagcaccggaagcggccgagcgcgctcagcccggcgacccctgcgggctccagacccctgcgccgctgcgccccgggtttcgccgcaaccaagacccagcgagtgcagcggcggccgccgaggaggttcgaaaacatggccaaaagaaatgccgagaaggaactgacagataggaattgggatcaagaagatgaagctgaagagggtaaaagaagggctataaactaaagccgaagatattcagcagctttctgacgtggacatcagaagtgtggacatgagtgtgctttgagcgcactgtggaagagcagtggttgtccagcaaggtcctaggtgcctccgtggcctttcgtacagtgggtgggaacattctccatggccagtgaggaagtcttgaagaatagagccataaagaaagcaaagcgcagaaatgttggatttgaatctgacactggaggagcctttaaaggttttaaaggtttggtggtaccttctggaggaggacgcttttctggatttggtagtggcgctggagggaagcctttggaaggactgtcgaatggaaacaacataaccagtgcccctcccttcgccagtgcaaaggcagcggcagatcccaaggtagcctttggttctcttgctgcaaatggccctaccaccttggttgataaagtttcaaatcccaaaactaatggggacagtcagcagccctcctcctctggccttgcttccagtaaagcttgtgtcggaaatgcctatcacaagcagttggccgccttgaactgctccgtgcgggattggatagtgaagcacgtgaatacaaaccccctctgtgatctgacacctatctttaaagactatgagaaatatttagcaaacattgaacagcaacacgggaacagtggcaggaattctgaaagtgaatctaacaaagtggcagctgaaacacagtctccttccctttttggctcaacaaaattacagcaagagtcaacgtttttgtttcatggcaacaaaactgaagatacacctgacaagaagatggaggtggcatctgaaaagaaaacggacccatcatcactaggagcgacaagtgcctcatttaatttcggcaagaaagttgatagctctgttttgggctcattaagctctgtccccctgactggattttctttctcccctggaaactccagtttatttggcaaagatactacccagagtaaaccagtctcttcaccatttcccactaaaccattggagggccaagcagaaggtgacagtggtgaatgcaaaggtggagatgaagaagagaatgatgagccacccaaagtagtagttaccgaagtaaaagaagaagatgctttttactccaaaaagtgtaaactgttttacaagaaagacaatgagtttaaagagaaaggcataggtactctgcatttaaaacctacagcaaatcagaagacacagcttttggtgcgggcagacaccaatttaggcaacatattgctgaacgttctgattccacccaatatgccatgtacgcgaacagggaagaataacgttcttatcgtctgtgttccaaatccaccaattgacgagaagaatgccaccatgccagtcaccatgttgattcgggtaaaaaccagcgaggatgcagacgagttgcacaaaattttactggagaaaaaggatgcctgaacacgcaaagtcggctgcagaattattgccaagttgctgctgcttccaccgccccttaaagttagtcagtttttcttctcttctttgacattctaagaacttatagataacttaaaacttttgtgaggaagattaatgtggccaataaaacctttaaatgttaagtgtcaagaaa

SEQ ID NO: 161300 - DNA, 763 bp, Homo sapiens
  Payload ID: 11502
  Gene Symbol: NUP50
  Gene Name: nucleoporin 50kDa
  ENST ID: ENST00000434760
  CDS Start-End: 308-400
ttcgagttacaaaatggccgcccggagcgtgttcggcgcggttcccccagctgtctctggctgaaccggcgctctcgcctccctgccgaacacagcgtgaggagcccccccagggatatggtgtttgagtctctgggcttgccgagcactaagtcctctgagttccgcagcgcagcaccggaagcggccgagcgcgctcagcccggcgacccctgcgggctccagacccctgcgccgctgcgccccgggtttcgccgcaaccaagacccagcgagtgcagcggcggccgccgaggaggttcgaaaacatggccaaaagaaatgccgagaaggaactgacagataggaattgggatcaagaagatgaagctgaagagggtaaaagaagggctataaactaaagccgaagatattcagcagctttctgacgtggacatcagaagtgtggacatgagtgtgctttgagcgcactgtggaagagcagtggttgtccagcaaggtcctaggtgcctccgtggcctttcgtacagtgggcaagttgggcaggactcatcttaaaaatcatgtgtgggaacattctccatggccagtgaggaagtcttgaagaatagagccataaagaaagcaaagcgcagaaatgttggatttgaatctgacactggaggagcctttaaaggttttaaaggtttggtggtaccttctggaggaggacgcttttctggatttggtagtggcgctggagggaagcctttggaaggactgtc

SEQ ID NO: 161301 - DNA, 1018 bp, Homo sapiens
  Payload ID: 11502
  Gene Symbol: NUP50
  Gene Name: nucleoporin 50kDa
  ENST ID: ENST00000419387
  CDS Start-End: 13-105
aggttcgaaaacatggccaaaagaaatgccgagaaggaactgacagataggaattgggatcaagaagatgaagctgaagagggtaaaagaagggctataaactaaagccgaagatattcagcagctttctgacgtggacatcagaagtgtggacatgagtgtgctttgagcgcactgtggaagagcagtggttgtccagcaaggtcctaggtgcctccgtggcctttcgtacagtgggcaagttgggcaggactcatcttaaaaatcatgtgtgggaacattctccatggccagtgaggaagtcttgaagaatagagccataaagaaagcaaagcgcagaaatgttggatttgaagttctcttgctgcaaatggccctaccaccttggttgataaagtttcaaatcccaaaactaatggggacagtcagcagccctcctcctctggccttgcttccagtaaagcttgtgtcggaaatgcctatcacaagcagttggccgccttgaactgctccgtgcgggattggatagtgaagcacgtgaatacaaaccccctctgtgatctgacacctatctttaaagactatgagaaatatttagcaaacattgaacagcaacacgggaacagtggcaggaattctgaaagtgaatctaacaaagtggcagctgaaacacagtctccttccctttttggctcaacaaaattacagcaagagtcaacgtttttgtttcatggcaacaaaactgaagatacacctgacaagaagatggaggtggcatctgaaaagaaaacggacccatcatcactaggagcgacaagtgcctcatttaatttcggcaagaaagttgatagctctgttttgggctcattaagctctgtccccctgactggattttctttctcccctggaaactccagtttatttggcaaagatactacccagagtaaaccagtctcttcaccatttcccactaaaccattggagggccaagcagaaggtgacagtggtgaatgcaaag

SEQ ID NO: 161302 - DNA, 584 bp, Homo sapiens
  Payload ID: 11502
  Gene Symbol: NUP50
  Gene Name: nucleoporin 50kDa
  ENST ID: ENST00000417702
  CDS Start-End: 560-584
agattcgagttacaaaatggccgcccggagcgtgttcggcgcggttcccccagctgtctctggctgaaccggcgctctcgcctccctgccgaacacagcgtgaggagcccccccagggatatggtgtttgagtctctgggcttgccgagcactaagtcctctgagttccgcagcgcagcaccggaagcggccgagcgcgctcagcccggcgacccctgcgggctccagacccctgcgccgctgcgccccgggtttcgccgcaaccaagacccagcgagtgcagcggcggccgccgaggaggttcgaaaacatggccaaaagaaatgccgagaaggaactgacagataggaattgggatcaagaagatgaagctgaagagggtaaaagaagggctataaactaaagccgaagatattcagcagctttctgacgtggacatcagaagtgtggacatgagtgtgctttgagcgcactgtggaagagcagtggttgtccagcaaggtcctaggtgcctccgtggcctttcgtacagtgggcaagttgggtgggaacattctccatggccagtgaggaagtcttgaaga

SEQ ID NO: 161303 - DNA, 537 bp, Homo sapiens
  Payload ID: 11502
  Gene Symbol: NUP50
  Gene Name: nucleoporin 50kDa
  ENST ID: ENST00000430547
  CDS Start-End: 308-537
ttcgagttacaaaatggccgcccggagcgtgttcggcgcggttcccccagctgtctctggctgaaccggcgctctcgcctccctgccgaacacagcgtgaggagcccccccagggatatggtgtttgagtctctgggcttgccgagcactaagtcctctgagttccgcagcgcagcaccggaagcggccgagcgcgctcagcccggcgacccctgcgggctccagacccctgcgccgctgcgccccgggtttcgccgcaaccaagacccagcgagtgcagcggcggccgccgaggaggttcgaaaacatggccaaaagaaatgccgagaaggaactgacagataggaattgggatcaagaagatgaagctgaagaggtgggaacattctccatggccagtgaggaagtcttgaagaatagagccataaagaaagcaaagcgcagaaatgttggatttgaagttctcttgctgcaaatggccctaccaccttggttgataaagtttcaaatcccaaaactaatggggacagtcagcag

SEQ ID NO: 161304 - DNA, 443 bp, Homo sapiens
  Payload ID: 11502
  Gene Symbol: NUP50
  Gene Name: nucleoporin 50kDa
  ENST ID: ENST00000445721
  CDS Start-End: 414-443
gggcggggcgcgcggtgggggagcgacgggtggagggtggggtgggatgacagcggcgacgcagccccggctgtttttgaagcggggcccgggccccaccgggctgcggcgtccgactcgagtgagactctcccctgcggccccgccggagatgaagaaactgaggcacaaaaattaaatataacttgcccaagttctcacagctagaaaatggcaaaactgggatgccagcatcttttagtattttttgaaatactttatgctcactggggaaatacttccccagctcactgatctaatgacagacaggacacctgctgtttgagctgggcactgttggggcatttggagtatatctgtaaacaaaacaaagatccctgcgttttggttatatactgatttggttcgaaaacatggccaaaagaaatgccgagaaggaactg

SEQ ID NO: 161305 - DNA, 551 bp, Homo sapiens
  Payload ID: 11502
  Gene Symbol: NUP50
  Gene Name: nucleoporin 50kDa
  ENST ID: ENST00000432340
  CDS Start-End: 539-551
gtttttgaagcggggcccgggccccaccgggctgcggcgtccgactcgagtgagactctcccctgcggccccgccggaggtagggggctggcagggctgtcctggcgtggtcttctccgtttccttcctagcgattcctctcgagcttcctctccccctggccgcccctcgtctctcttctcttgggcgcattacctctctggcctgtcttactgcgttcccgggttattcatcacccatttgctcggttccattaagaaccagcttggagattagatgaagaaactgaggcacaaaaattaaatataacttgcccaagttctcacagctagaaaatggcaaaactgggatgccagcatcttttagtattttttgaaatactttatgctcactggggaaatacttccccagctcactgatctaatgacagacaggacacctgctgtttgagctgggcactgttggggcatttggagtatatctgtaaacaaaacaaagatccctgcgttttggttatatactgatttggttcgaaaacatggccaaaagaa

SEQ ID NO: 161306 - DNA, 579 bp, Homo sapiens
  Payload ID: 11502
  Gene Symbol: NUP50
  Gene Name: nucleoporin 50kDa
  ENST ID: ENST00000424634
  CDS Start-End: 443-579
ttttgggggtagattcgagttacaaaatggccgcccggagcgtgttcggcgcggttcccccagctgtctctggctgaaccggcgctctcgcctccctgccgaacacagcgtgaggagcccccccagggatatggtgtttgagtctctgggcttgccgagcactaagtcctctgagttccgcagcgcagcaccggaagcggccgagcgcgctcagcccggcgacccctgcgggctccagacccctgcgccgctgcgccccgggtttcgccgcaaccaagacccagcgagtgcagcggcggccgccgaggagatggagtcttgctctgtcacataggctggagtgcattggcgcgatctcagctcactgcaacctccacctcctgggttcaagagattctcctgcctcagcctccggagtagctgggattacaggttcgaaaacatggccaaaagaaatgccgagaaggaactgacagataggaattgggatcaagaagatgaagctgaagaggtgggaacattctccatggccagtgaggaagtcttgaagaatagagccataaagaaagcaaagcgcag

SEQ ID NO: 161307 - DNA, 543 bp, Homo sapiens
  Payload ID: 11502
  Gene Symbol: NUP50
  Gene Name: nucleoporin 50kDa
  ENST ID: ENST00000422489
  CDS Start-End: 8-543
cgaaaacatggccaaaagaaatgccgagaaggaactgacagataggaattgggatcaagaagatgaagctgaagaggtgggaacattctccatggccagtgaggaagtcttgaagaatagagccataaagaaagcaaagcgcagaaatgttggatttgaatctgacactggaggagcctttaaaggttttaaaggtttggtggtaccttctggaggaggacgcttttctggatttggtagtggcgctggagggaagcctttggaaggactgtcgaatggaaacaacataaccagtgcccctcccttcgccagtgcaaaggcagcggcagatcccaaggtagcctttggtggagatgaagaagagaatgatgagccacccaaagtagtagttaccgaagtaaaagaagaagatgctttttactccaaaaagtgtaaactgttttacaagaaagacaatgagtttaaagagaaaggcataggtactctgcatttaaaacctacagcaaatcagaagacacagcttttggtgcgggcagacaccaa

SEQ ID NO: 161308 - DNA, 2367 bp, Homo sapiens
  Payload ID: 11503
  Gene Symbol: NUP54
  Gene Name: nucleoporin 54kDa
  Uniprot ID: Q7Z3B4
  ENST ID: ENST00000264883
  CDS Start-End: 142-1665
cttggcgccttccggcctcttaggctaggtcagaaaggaggcggaactcggtgatctgactggcggtttcccggccggactgagaaggggagcgcgctgcgcgtcgcaggagtaacctacttggtctcctgctttcgcgacatggccttcaattttggggctccctcgggcacctccggtaccgctgcagccaccgcggcccccgcgggtgggtttggaggatttgggacaacatctacaactgcaggttctgcattcagcttttctgccccaactaacacaggcactactggactctttggtggtactcagaacaaaggttttggatttggtactggttttggcacaacaacgggaactagtactggtttaggtactggtttgggaactggactgggatttggaggatttaatacacagcagcagcagcaaactacattaggtggtctcttcagtcagcctacacaagctcctacccagtccaaccagctgataaatactgcgagtgctctttctgctccaacgctgttgggagatgagagagatgctattttggcaaaatggaatcaactgcaggccttttggggaacaggaaaagggtatttcaacaataatattccgccagtggaattcacacaagaaaatcccttttgccgatttaaggcagtaggttatagttgcatgcccagtaataaagatgaagatgggctagtggttttagttttcaacaaaaaagaaacagagattcgaagccaacaacaacagttggtagaatcattgcataaagttttgggaggaaaccagacccttactgtaaatgtagagggcactaaaacattgccagatgatcagacagaagttgttatttatgttgttgagcgttcgccaaatggtacttcaagaagagttccagctacaacgctatatgcccattttgaacaagccaatataaaaacacaattgcagcaacttggtgtaaccctttctatgactagaacagaactttctcctgcacagatcaaacagcttttacagaatcctcctgctggtgttgatcctattatctgggaacaggccaaggtagataaccctgattctgaaaagttaattcctgtaccaatggtgggttttaaggaacttctccgaagactgaaggttcaagatcagatgactaagcagcatcaaaccagattagatatcatatctgaagatattagtgagctacaaaagaatcaaactacatctgtagccaaaattgcacaatacaagaggaaactcatggatctttcccatagaactttacaggtcctaatcaaacaggaaattcaaaggaagagtggttatgccattcaggctgatgaagagcagttgcgagttcagctggatacgattcagggtgaactaaatgcacctactcagttcaagggccgactaaatgaattgatgtctcaaatcaggatgcagaatcattttggagcagtcagatctgaagaaaggtattacatagatgcagatctgttacgagaaatcaagcagcatttgaaacaacaacaggaaggccttagccatttgattagcatcattaaagacgatctagaagatataaagctggtcgaacatggattgaatgaaaccatccacatcagaggtggtgtctttagttgacagttcacaaacttgtgtaaaggtttgtgaaatgcatcttcttactgcatcagaccttccttaagaatgaaaccgaccacatggagggaaaaagaaaacaattctttcttggattggttttttgagaagtttactgacaaattactgttcatcaaatctgaaatagtcacctcacagctcttcaaagaaaacctttgaaagatttatatctaaaagctgtatttactttaaaagaagtgcataattaccaaaattgtatgtactattgtacatttttacaacagcattttcttaaacataatctgtgtttaatgattattgtccattgagcctgtactctgctttccataccaagtaaatatgaaataatctactttgcacataacagaacaaactataattacttggctgttggagatttgtacttgagtataaatgtacaccagtttttgtatttgtgaactcatctgtgggaggagtaaagaaaatccaaaagcatttaatgttttgtttttgttctataaagatatgaaaatgtatttttatattattttacttatttggaatttacagagcacacctaagcaattaggatataacaaaactacttaaccatttttgcaaccattttgttttttaagcctttttatttctaaaaagatgaaaacttataaataaattcttaatttgtaattactttta

SEQ ID NO: 161309 - DNA, 1563 bp, Homo sapiens
  Payload ID: 11503
  Gene Symbol: NUP54
  Gene Name: nucleoporin 54kDa
  Uniprot ID: Q7Z3B4
  ENST ID: ENST00000514987
  CDS Start-End: 24-1403
acttggtctcctgctttcgcgacatggccttcaattttggggctccctcgggcacctccggtaccgctgcagccaccgcggcccccgcgggtgggtttggaggatttgggacaacatctacaactgcaggttctgcattcagcttttctgccccaactaacacaggcactactgcattaggtggtctcttcagtcagcctacacaagctcctacccagtccaaccagctgataaatactgcgagtgctctttctgctccaacgctgttgggagatgagagagatgctattttggcaaaatggaatcaactgcaggccttttggggaacaggaaaagggtatttcaacaataatattccgccagtggaattcacacaagaaaatcccttttgccgatttaaggcagtaggttatagttgcatgcccagtaataaagatgaagatgggctagtggttttagttttcaacaaaaaagaaacagagattcgaagccaacaacaacagttggtagaatcattgcataaagttttgggaggaaaccagacccttactgtaaatgtagagggcactaaaacattgccagatgatcagacagaagttgttatttatgttgttgagcgttcgccaaatggtacttcaagaagagttccagctacaacgctatatgcccattttgaacaagccaatataaaaacacaattgcagcaacttggtgtaaccctttctatgactagaacagaactttctcctgcacagatcaaacagcttttacagaatcctcctgctggtgttgatcctattatctgggaacaggccaaggtagataaccctgattctgaaaagttaattcctgtaccaatggtgggttttaaggaacttctccgaagactgaaggttcaagatcagatgactaagcagcatcaaaccagattagatatcatatctgaagatattagtgagctacaaaagaatcaaactacatctgtagccaaaattgcacaatacaagaggaaactcatggatctttcccatagaactttacaggtcctaatcaaacaggaaattcaaaggaagagtggttatgccattcaggctgatgaagagcagttgcgagttcagctggatacgattcagggtgaactaaatgcacctactcagttcaagggccgactaaatgaattgatgtctcaaatcaggatgcagaatcattttggagcagtcagatctgaagaaaggtattacatagatgcagatctgttacgagaaatcaagcagcatttgaaacaacaacaggaaggccttagccatttgattagcatcattaaagacgatctagaagatataaagctggtcgaacatggattgaatgaaaccatccacatcagaggtggtgtctttagttgacagttcacaaacttgtgtaaaggtttgtgaaatgcatcttcttactgcatcagaccttccttaagaatgaaaccgaccacatggagggaaaaagaaaacaattctttcttggattggttttttgagaagtttactgacaaattactgttcatcaaatctg

SEQ ID NO: 161310 - DNA, 500 bp, Homo sapiens
  Payload ID: 11503
  Gene Symbol: NUP54
  Gene Name: nucleoporin 54kDa
  ENST ID: ENST00000514901
  CDS Start-End: 25-500
tacttggtctcctgctttcgcgacatggccttcaattttggggctccctcgggcacctccggtaccgctgcagccaccgcggcccccgcgggatttggtgggcttgagactgccaactccaccgccagtgggtttaattttgggggtttcggattaactgctaatcctgcagtgaactttaatattgggaatttcggtgtttctactacctcggcgactccgttcaattttggtaacagtctggcaagtgcaggtgggtttggaggatttgggacaacatctacaactgcaggttctgcattcagcttttctgccccaactaacacaggcactactggactctttggtggtactcagaacaaaggttttggatttggtactggttttggcacaacaacgggaactagtactggtttaggtactggtttgggaactggactgggatttggaggatttaatacacagcagcagcagcaaactagtaagtatgaggttttcag

SEQ ID NO: 161311 - DNA, 1385 bp, Homo sapiens
  Payload ID: 11503
  Gene Symbol: NUP54
  Gene Name: nucleoporin 54kDa
  ENST ID: ENST00000512151
  CDS Start-End: 24-332
acttggtctcctgctttcgcgacatggccttcaattttggggctccctcgggcacctccggtaccgctgcagccaccgcggcccccgcgggtgggtttggaggatttgggacaacatctacaactgcaggttctgcattcagcttttctgccccaactaacacaggcactactggactctttggtggtactcagaacaaaggttttggatttggtactggttttggcacaacaacgggaactagtactggtttaggtactggtttgggaactggactgggatttggaggatttaatacacagcagcagcagcaaactagcagtaggttatagttgcatgcccagtaataaagatgaagatgggctagtggttttagttttcaacaaaaaagaaacagagattcgaagccaacaacaacagttggtagaatcattgcataaagttttgggaggaaaccagacccttactgtaaatgtagagggcactaaaacattgccagatgatcagacagaagttgttatttatgttgttgagcgttcgccaaatggtacttcaagaagagttccagctacaacgctatatgcccattttgaacaagccaatataaaaacacaattgcagcaacttggtgtaaccctttctatgactagaacagaactttctcctgcacagatcaaacagcttttacagaatcctcctgctggtgttgatcctattatctgggaacaggccaaggtagataaccctgattctgaaaagttaattcctgtaccaatggtgggttttaaggaacttctccgaagactgaaggttcaagatcagatgactaagcagcatcaaaccagattagatatcatatctgaagatattagtgagctacaaaagaatcaaactacatctgtagccaaaattgcacaatacaagaggaaactcatggatctttcccatagaactttacaggtcctaatcaaacaggaaattcaaaggaagagtggttatgccattcaggctgatgaagagcagttgcgagttcagctggatacgattcagggtgaactaaatgcacctactcagttcaagggccgactaaatgaattgatgtctcaaatcaggatgcagaatcattttggagcagtcagatctgaagaaaggtattacatagatgcagatctgttacgagaaatcaagcagcatttgaaacaacaacaggaaggccttagccatttgattagcatcattaaagacgatctagaagatataaagctggtcgaacatggattgaatgaaaccatccacatcagaggtggtgtctttagttgacagttcacaaacttgtgtaaaggtttgtgaaatgcatcttcttactgcatcagaccttccttaag

SEQ ID NO: 161312 - DNA, 579 bp, Homo sapiens
  Payload ID: 11503
  Gene Symbol: NUP54
  Gene Name: nucleoporin 54kDa
  ENST ID: ENST00000513352
  CDS Start-End: 24-278
acttggtctcctgctttcgcgacatggccttcaattttggggctccctcgggcacctccggtaccgctgcagccaccgcggcccccgcgggatttggtgggcttgagactgccaactccaccgccagtgggtttaattttgggggtttcggattaactgctaatcctgcagtgaactttaatattgggaatttcggtgtttctactacctcggcgactccgttcaattttggtaacagtctggcaagtgcagatctgctattactaaaacatttttgatgttgtggagcatgatgagaaactgactagtgtttctattgcgtagccaattcagattatatcatagttattctatggaagtgaagaataatgaaaagaaattacaacagtgcttagtactgtgggtttggaggatttgggacaacatctacaactgcaggttctgcattcagcttttctgccccaactaacacaggcactactggactctttggtggtactcagaacaaaggttttggatttggtactggttttggcacaacaacgggaactagtactggtttaggtactggtttgggaa

SEQ ID NO: 161313 - DNA, 1938 bp, Homo sapiens
  Payload ID: 11503
  Gene Symbol: NUP54
  Gene Name: nucleoporin 54kDa
  ENST ID: ENST00000507257
  CDS Start-End: 43-351
cgcgtcgcaggagtaacctacttggtctcctgctttcgcgacatggccttcaattttggggctccctcgggcacctccggtaccgctgcagccaccgcggcccccgcgggtgggtttggaggatttgggacaacatctacaactgcaggttctgcattcagcttttctgccccaactaacacaggcactactggactctttggtggtactcagaacaaaggttttggatttggtactggttttggcacaacaacgggaactagtactggtttaggtactggtttgggaactggactgggatttggaggatttaatacacagcagcagcagcaaactagcagtaggttatagttgcatgcccagtaataaagatgaagatgggctagtggttttagttttcaacaaaaaagaaacagagattcgaagccaacaacaacagttggtagaatcattgcataaagttttgggaggaaaccagacccttactgtaaatgtagagggcactaaaacattgccagatgatcagacagaagttgttatttatgttgttgagcgttcgccaaatggtacttcaagaagagttccagctacaacgctatatgcccattttgaacaagccaatataaaaacacaattgcagcaacttggtgtaaccctttctatgactagaacagaactttctcctgcacagatcaaacagcttttacagaatcctcctgctggtgttgatcctattatctgggaacaggccaaggtagataaccctgattctgaaaagttaattcctgtaccaatggtgggttttaaggaacttctccgaagactgaaggttcaagatcagatgactaagcagcatcaaaccagattagatgtcctaatcaaacaggaaattcaaaggaagagtggttatgccattcaggctgatgaagagcagttgcgagttcagctggatacgattcagggtgaactaaatgcacctactcagttcaagggccgactaaatgaattgatgtctcaaatcaggatgcagaatcattttggagcagtcagatctgaagaaaggtattacatagatgcagatctgttacgagaaatcaagcagcatttgaaacaacaacaggaaggccttagccatttgattagcatcattaaagacgatctagaagatataaagctggtcgaacatggattgaatgaaaccatccacatcagaggtggtgtctttagttgacagttcacaaacttgtgtaaaggtttgtgaaatgcatcttcttactgcatcagaccttccttaagaatgaaaccgaccacatggagggaaaaagaaaacaattctttcttggattggttttttgagaagtttactgacaaattactgttcatcaaatctgaaatagtcacctcacagctcttcaaagaaaacctttgaaagatttatatctaaaagctgtatttactttaaaagaagtgcataattaccaaaattgtatgtactattgtacatttttacaacagcattttcttaaacataatctgtgtttaatgattattgtccattgagcctgtactctgctttccataccaagtaaatatgaaataatctactttgcacataacagaacaaactataattacttggctgttggagatttgtacttgagtataaatgtacaccagtttttgtatttgtgaactcatctgtgggaggagtaaagaaaatccaaaagcatttaatgttttgtttttgttctataaagatatgaaaatgtatttttatattattttacttatttggaatttacagagcacacctaagcaattaggatataacaaaactacttaaccatttttgcaaccattttgttttttaagcctttttatttctaaaaagatgaaaacttataaataaattcttaatttgtaattacttttatataa

SEQ ID NO: 161314 - DNA, 1604 bp, Homo sapiens
  Payload ID: 11503
  Gene Symbol: NUP54
  Gene Name: nucleoporin 54kDa
  ENST ID: ENST00000502850
  CDS Start-End: 32-448
agtaacctacttggtctcctgctttcgcgacatggccttcaattttggggctccctcgggcacctccggtaccgctgcagccaccgcggcccccgcgggatttggtgggcttgagactgccaactccaccgccagtgggtttaattttgggggtttcggattaactgctaatcctgcagtgaactttaatattgggaatttcggtgtttctactacctcggcgactccgttcaattttggtaacagtctggcaagtgcagaaacacattcttgttgtttggaggtgggtttggaggatttgggacaacatctacaactgcaggttctgcattcagcttttctgccccaactaacacaggcactactggactctttggtggtactcagaacaaaggttttggatttggtactggttttggcacaacaacgggaactagtactggtttaggtactggtttgggaactggactgggatttggaggatttaatacacagcagcagcagcaaactagacagaagttgttatttatgttgttgagcgttcgccaaatggtacttcaagaagagttccagctacaacgctatatgcccattttgaacaagccaatataaaaacacaattgcagcaacttggtgtaaccctttctatgactagaacagaactttctcctgcacagatcaaacagcttttacagaatcctcctgctggtgttgatcctattatctgggaacaggccaaggtagataaccctgattctgaaaagttaattcctgtaccaatggtgggttttaaggaacttctccgaagactgaaggttcaagatcagatgactaagcagcatcaaaccagattagatatcatatctgaagatattagtgagctacaaaagaatcaaactacatctgtagccaaaattgcacaatacaagaggaaactcatggatctttcccatagaactttacaggtcctaatcaaacaggaaattcaaaggaagagtggttatgccattcaggctgatgaagagcagttgcgagttcagctggatacgattcagggtgaactaaatgcacctactcagttcaagggccgactaaatgaattgatgtctcaaatcaggatgcagaatcattttggagcagtcagatctgaagaaaggtattacatagatgcagatctgttacgagaaatcaagcagcatttgaaacaacaacaggaaggccttagccatttgattagcatcattaaagacgatctagaagatataaagctggtcgaacatggattgaatgaaaccatccacatcagaggtggtgtctttagttgacagttcacaaacttgtgtaaaggtttgtgaaatgcatcttcttactgcatcagaccttccttaagaatgaaaccgaccacatggagggaaaaagaaaacaattctttcttggattggttttttgagaagtttactgacaaattactgttcatcaaatctgaaatagtcacctcacagctcttcaaagaaaacctttgaaagatttatatctaaaagctgtatttactttaaaagaagtgcataattaccaaaattgtatgtactattgtacatttttac

SEQ ID NO: 161315 - DNA, 2489 bp, Homo sapiens
  Payload ID: 11504
  Gene Symbol: NUP58
  Gene Name: nucleoporin 58kDa
  Uniprot ID: Q9BVL2
  ENST ID: ENST00000381718
  CDS Start-End: 142-1905
cttcgccgccgttggggctggaagttcccgccaggtccgtgccgggcgagagagatgctgcccggcccgcctcggctttgaggcgagagaagtgtcccagacccatttcgccttgctgacggcgtcgagccctggccagacatgtccacagggttctccttcgggtccgggactctgggctccaccaccgtggccgccggcgggaccagcacaggcggcgttttctccttcggaacgggagcgtctagcaacccttctgtggggctcaattttggaaatcttggaagtacttcaactccagcaactacatctgctccttcaagtggttttggaaccgggctctttggatctaaacctgccactgggttcactctaggaggaacaaatacaggaacgccagccactacatctgcagctacaacaggcttcagtttaggattcaataaacctgcagcatctgccacaccatttgctctacctattacctctacctcagctagcggtctgactctttcgtctgctctgacatcaactccagcagcatccacaggatttactctaaataatttgggtgggacaacagccacaactacaactgcatcaacaggcctctctttagggggagccttagctggtttgggaggttcacttttccagagtacaaacacaggaacatcaggacttggacagaatgctttagggttgactttgggaactacagcagctacttcaactgcaggcaatgaaggccttggtggtatagatttcagtagctcctcagataaaaagagtgataaaacgggaacaagaccagaggatagtaaagctctgaaggatgaaaatctacctcctgtcatctgccaggatgttgaaaatctccagaaatttgtgaaggagcagaaacaagttcaagaagaaattagtagaatgtcttcaaaagcaatgcttaaggtacaagaagatattaaagctctgaagcagctcctgtcgttggctgccaatggaatacagagaaacactctcaacattgacaaattgaaaatagaaactgctcaggagttgaagaatgctgaaatagctttaagaacccagaagacaccacctggacttcaacatgaatatgcagctcctgctgactacttcagaatcttggttcagcaatttgaggtacagcttcagcagtacaggcagcagattgaagaactagaaaaccatcttgccactcaagcaaataattcacatataacccctcaagatttgtcaatggctatgcagaaaatttatcaaacatttgtagctttagcggcacaacttcagtctattcatgaaaatgtaaaggttctgaaagaacagtaccttggctacaggaaaatgttcttgggagatgctgttgatgtgtttgaaacaaggcgagcagaagccaagaagtggcagaacacacccagagttactactggacccactcctttcagcaccatgccaaacgcagcagccgttgccatggctgcaacacttacacagcagcaacagcctgctacagggccacagccatctctgggagttagttttggaacgccattcggctcaggtattggcactggcttgcaatcaagtggcttaggttcttcaaaccttggaggatttggaactagctctggttttggatgcagcaccacaggggcctccacatttggatttggaacaacaaataaaccctcaggaagtcttagtgcaggctttggcagctcaagtacatctgggtttaacttcagcaatcctggcatcacggcatcagctggtttgacttttggggtgtccaatcctgcctctgcaggttttggaacaggaggacaactccttcagttgaagaaacctccagctggaaacaaaagaggaaaaagataaacatgggttgatgtgttgagagaatccatagcagcaccgttcattctatgagtctatttttctaatgatgcagtaattaaattgcatcccaggagatttataaagttttgatatttttccctactctggaatttgaactttcttcatgtttgccatactgaacatcttttttcttgtggaatttaaagtccagctgtgttttctttttaatttgattctcagtgtaagaaatgttctgattacatcactgattggtaatggttagaaaccattaacctaaaacttactatttaacctagtgtttttgttgatgaggtttacattatgtgaatacatgcacatttgtttcttatacaggtggtgtgaactctagggcctatactagaatcaatttgttccttgttaaaggccttttgaattatactgcagggcatcttgtgaatatgtatgtaaatatatacagaataatacacacagttgtgtgtgcatataaaatacatatttacgccaggcgtggtggctcacgcctgtaatcccagcactttgggaggccgaggcaggcggatcacctgaggtcaggagtt

SEQ ID NO: 161316 - DNA, 4332 bp, Homo sapiens
  Payload ID: 11504
  Gene Symbol: NUP58
  Gene Name: nucleoporin 58kDa
  Uniprot ID: Q9BVL2
  ENST ID: ENST00000381736
  CDS Start-End: 251-2050
actcacgtaccagggctcattgcgtgacggttacacttccggcgggctacgtgcgcgcggcgagcgccgggcgtacttttgcgtggttgctccaccccctcagccttgccttcgccgccgttggggctggaagttcccgccaggtccgtgccgggcgagagagatgctgcccggcccgcctcggctttgaggcgagagaagtgtcccagacccatttcgccttgctgacggcgtcgagccctggccagacatgtccacagggttctccttcgggtccgggactctgggctccaccaccgtggccgccggcgggaccagcacaggcggcgttttctccttcggaacgggagcgtctagcaacccttctgtggggctcaattttggaaatcttggaagtacttcaactccagcaactacatctgctccttcaagtggttttggaaccgggctctttggatctaaacctgccactgggttcactctaggaggaacaaatacaggaatagcaacaactataactacaggattaactctgggaacgccagccactacatctgcagctacaacaggcttcagtttaggattcaataaacctgcagcatctgccacaccatttgctctacctattacctctacctcagctagcggtctgactctttcgtctgctctgacatcaactccagcagcatccacaggatttactctaaataatttgggtgggacaacagccacaactacaactgcatcaacaggcctctctttagggggagccttagctggtttgggaggttcacttttccagagtacaaacacaggaacatcaggacttggacagaatgctttagggttgactttgggaactacagcagctacttcaactgcaggcaatgaaggccttggtggtatagatttcagtagctcctcagataaaaagagtgataaaacgggaacaagaccagaggatagtaaagctctgaaggatgaaaatctacctcctgtcatctgccaggatgttgaaaatctccagaaatttgtgaaggagcagaaacaagttcaagaagaaattagtagaatgtcttcaaaagcaatgcttaaggtacaagaagatattaaagctctgaagcagctcctgtcgttggctgccaatggaatacagagaaacactctcaacattgacaaattgaaaatagaaactgctcaggagttgaagaatgctgaaatagctttaagaacccagaagacaccacctggacttcaacatgaatatgcagctcctgctgactacttcagaatcttggttcagcaatttgaggtacagcttcagcagtacaggcagcagattgaagaactagaaaaccatcttgccactcaagcaaataattcacatataacccctcaagatttgtcaatggctatgcagaaaatttatcaaacatttgtagctttagcggcacaacttcagtctattcatgaaaatgtaaaggttctgaaagaacagtaccttggctacaggaaaatgttcttgggagatgctgttgatgtgtttgaaacaaggcgagcagaagccaagaagtggcagaacacacccagagttactactggacccactcctttcagcaccatgccaaacgcagcagccgttgccatggctgcaacacttacacagcagcaacagcctgctacagggccacagccatctctgggagttagttttggaacgccattcggctcaggtattggcactggcttgcaatcaagtggcttaggttcttcaaaccttggaggatttggaactagctctggttttggatgcagcaccacaggggcctccacatttggatttggaacaacaaataaaccctcaggaagtcttagtgcaggctttggcagctcaagtacatctgggtttaacttcagcaatcctggcatcacggcatcagctggtttgacttttggggtgtccaatcctgcctctgcaggttttggaacaggaggacaactccttcagttgaagaaacctccagctggaaacaaaagaggaaaaagataaacatgggttgatgtgttgagagaatccatagcagcaccgttcattctatgagtctatttttctaatgatgcagtaattaaattgcatcccaggagatttataaagttttgatatttttccctactctggaatttgaactttcttcatgtttgccatactgaacatcttttttcttgtggaatttaaagtccagctgtgttttctttttaatttgattctcagtgtaagaaatgttctgattacatcactgattggtaatggttagaaaccattaacctaaaacttactatttaacctagtgtttttgttgatgaggtttacattatgtgaatacatgcacatttgtttcttatacaggtggtgtgaactctagggcctatactagaatcaatttgttccttgttaaaggccttttgaattatactgcagggcatcttgtgaatatgtatgtaaatatatacagaataatacacacagttgtgtgtgcatataaaatacatatttacgccaggcgtggtggctcacgcctgtaatcccagcactttgggaggccgaggcaggcggatcacctgaggtcaggagtttgagaccagcctgacatggtgaaaccccatctctacgaaaaatacaaaaattagctgggcatagtggcgggtacctataatcccagctactcgggaggctgaggcacgagaatcacttgaagccgggaggtgggggttgcagtgagccgagatcacaccactgcactccagcctgggcaacaagagcaaaactccgtctcaaaaaagatgaaaataaaataaaatatatatttacaggcctacaacttttgcctcagactgttccccttttctaagggtattcaagttttcaccttttaagcttcatatcctcagtgcttgtagaatgatgagcttagaggtaccaggtcattgcagttgtttgcttaaagacttattgaaatggttactggcgtaaatacttggccaactcaactttattgcccctgatcttttccatttttgtttccaccttaacctatagcagctcctccaaatgaggaatgctgtaagtaagactcatcaaacagattttaaccattttattatcctgtgtgtccttacattgcttctgtgagatgtttttttcttatctgagatgaactttcaggagcctatttgaactccagactggtgttctggggcaaagagctattagccaaactgattctatgcaggtgaaggatgcactaaagttctcactttagtgagaacttttctagctattccaatacagagttctttcttatagggctattgatattgacaccaaatggagtggcttctcagcctcttaatgtcttaagtaagtgcttaatttggaatagagaaaccagtatattttaaaaaagaaaaatattctttgtagcaactgtaaattctcccattataacagtgaacagagctccaggtaataacgcataggcatgtcaggttgcatctgtatatttgactacattagtattagtgacatcaggtggatataaaagaaaacccttggaaagagaactgccttagccatgatttcgttagtagacctatttatgattcaattgcaattttcagataggatgtgaacatggaatttcattgaaaatagtttaattttttatataaaaggttttgtatataatgtgtgtcagtgactattttcaaaatcattttcatcaagacaccttttttctaaaataggcattgcatacacatatgcacacgtatgtgcatgtgccacacattttttgtataatgttgggtttgattataaaagtgttgtcaaatgttttatttatctgcatatagcagtggttggcttttttgaattgaaatttttgcgcattgatgcattgaaataaggaaaattatttatctctgagcactaaacttatttttgcatatttctgtaatattgcagtccccagatccagaacatgggaagttagggaaaatgtgtgattttgtgttttgaattactgtcagaattacatacacaattacaacaaactttttttaaaagacatttcattgtactgcaaaaatctgaatatttatatttcttgtttttttctttatatgttttgcattttaatatgttgagccactggaaatttgtaacagattaatttgttataggagtttaaatgtgttgtcattgtctccattgtctttgtccagagcctattattatggaaacaataaaatttattgtgtcagttgctttga

SEQ ID NO: 161317 - DNA, 1659 bp, Homo sapiens
  Payload ID: 11504
  Gene Symbol: NUP58
  Gene Name: nucleoporin 58kDa
  ENST ID: ENST00000381747
  CDS Start-End: 128-1659
gggctggaagttcccgccaggtccgtgccgggcgagagagatgctgcccggcccgcctcggctttgaggcgagagaagtgtcccagacccatttcgccttgctgacggcgtcgagccctggccagacatgtccacagggttctccttcgggtccgggactctgggctccaccaccgtggccgccggcgggaccagcacaggcggcgttttctccttcggaacgggagcgtctagcaacccttctgtggggctcaattttggaaatcttggaagtacttcaactccagcaactacatctgctccttcaagtggttttggaaccgggctctttggatctaaacctgccactgggttcactctaggaggaacaaatacaggaatagcaacaactataactacaggattaactctgggaacgccagccactacatctgcagctacaacaggcttcagtttaggattcaataaacctgcagcatctgccacaccatttgctctacctattacctctacctcagctagcggtctgactctttcgtctgctctgacatcaactccagcagcatccacaggatttactctaaataatttgggtgggacaacagccacaactacaactgcatcaacaggcctctctttagggggagccttagctggtttgggaggttcacttttccagagtacaaacacaggaacatcaggacttggacagaatgctttagggttgactttgggaactacagcagctacttcaactgcaggcaatgaaggccttggtggtatagatttcagtagctcctcagataaaaagagtgataaaacgggaacaagaccagaggatagtaaagctctgaaggatgaaaatctacctcctgtcatctgccaggatgttgaaaatctccagaaatttgtgaaggagcagaaacaagttcaagaagaaattagtagaatgtcttcaaaagcaatgcttaaggtacaagaagatattaaagctctgaagcagctcctgtcgttggctgccaatggaatacagagaaacactctcaacattgacaaattgaaaatagaaactgctcaggagttgaagaatgctgaaatagctttaagaacccagaagacaccacctggacttcaacatgaatatgcagctcctgctgactacttcagaatcttggttcagcaatttgaggtacagcttcagcagtacaggcagcagattgaagaactagaaaaccatcttgccactcaagcaaataattcacatataacccctcaagatttgtcaatggctatgcagaaaatttatcaaacatttgtagctttagcggcacaacttcagtctattcatgaaaatgtaaaggttctgaaagaacagtaccttggctacaggaaaatgttcttgggagatgctgttgatgtgtttgaaacaaggcgagcagaagccaagaagtggcagaacacacccagagttactactggacccactcctttcagcaccatgccaaacgcagcagccgttgccatggctgcaacacttacacagcagcaacagcctgctacaggtgataagtggtgtaatgtagcagagcttaagaatagaactcaattatcactttttgtgaacaagttggaattgtcatgttactgtgtaattgattt

SEQ ID NO: 161318 - DNA, 1408 bp, Homo sapiens
  Payload ID: 11504
  Gene Symbol: NUP58
  Gene Name: nucleoporin 58kDa
  ENST ID: ENST00000394327
  CDS Start-End: 1-1392
ctcaattttggaaatcttggaagtacttcaactccagcaactacatctgctccttcaagtggttttggaaccgggctctttggatctaaacctgccactgggttcactctaggaggaacaaatacaggaacgccagccactacatctgcagctacaacaggcttcagtttaggattcaataaacctgcagcatctgccacaccatttgctctacctattacctctacctcagctagcggtctgactctttcgtctgctctgacatcaactccagcagcatccacaggatttactctaaataatttgggtgggacaacagccacaactacaactgcatcaacaggcctctctttagggggagccttagctggtttgggaggttcacttttccagagtacaaacacaggaacatcaggacttggacagaatgctttagggttgactttgggaactacagcagctacttcaactgcaggcaatgaaggccttggtggtatagatttcagtagctcctcagataaaaagagtgataaaacgggaacaagaccagaggatagtaaagctctgaaggatgaaaatctacctcctgtcatctgccaggatgttgaaaatctccagaaatttgtgaaggagcagaaacaagttcaagaagaaattagtagaatgtcttcaaaagcaatgcttaaggtacaagaagatattaaagctctgaagcagctcctgtcgttggctgccaatggaatacagagaaacactctcaacattgacaaattgaaaatagaaactgctcaggagttgaagaatgctgaaatagctttaagaacccagaagacaccacctggacttcaacatgaatatgcagctcctgctgactacttcagaatcttggttcagcaatttgaggtacagcttcagcagtacaggcagcagattgaagaactagaaaaccatcttgccactcaagcaaataattcacatataacccctcaagatttgtcaatggctatgcagaaaatttatcaaacatttgtagctttagcggcacaacttcagtctattcatgaaaatgtaaaggttctgaaagaacagtaccttggctacaggaaaatgttcttgggagatgctgttgatgtgtttgaaacaaggcgagcagaagccaagaagtggcagaacacacccagagttactactggacccactcctttcagcaccatgccaaacgcagcagccgttgccatggctgcaacacttacacagcagcaacagcctgctacaggtgataagtggtgtaatgtagcagagcttaagaatagaactcaattatcactttttgtgaacaagttggaattgtcatgttactgtgtaattgatttgctttacaatgaacaataaatttaataaaataaaa

SEQ ID NO: 161319 - DNA, 563 bp, Homo sapiens
  Payload ID: 11504
  Gene Symbol: NUP58
  Gene Name: nucleoporin 58kDa
  ENST ID: ENST00000490231
  CDS Start-End: 150-260
agccttgccttcgccgccgttggggctggaagttcccgccaggtccgtgccgggcgagagagatgctgcccggcccgcctcggctttgaggcgagagaagtgtcccagacccatttcgccttgctgacggcgtcgagccctggccagacatgtccacagggttctccttcgggtccgggactctgggctccaccaccgtggccgccggcgggaccagcacaggcggcgttttctccttcggaacgggagcgtctagatgaaaactactccaatcaacttcttcaatctgttctgccacattttagccagacaacccttctgtggggctcaattttggaaatcttggaagtacttcaactccagcaactacatctgctccttcaagtggttttggaaccgggctctttggatctaaacctgccactgggttcactctaggaggaacaaatacaggaatagcaacaactataactacaggattaactctgggaacgccagccactacatctgcagctacaacaggcttcagtttaggattcaataaacctgcagcatctgccaca

SEQ ID NO: 161320 - DNA, 605 bp, Homo sapiens
  Payload ID: 11504
  Gene Symbol: NUP58
  Gene Name: nucleoporin 58kDa
  ENST ID: ENST00000481980
  CDS Start-End: 219-407
acacttccggcgggctacgtgcgcgcggcgagcgccgggcgtacttttgcgtggttgctccaccccctcagccttgccttcgccgccgttggggctggaagttcccgccaggtccgtgccgggcgagagagatgctgcccggcccgcctcggctttgaggcgagagaagtgtcccagacccatttcgccttgctgacggcgtcgagccctggccagacatgtccacagggttctccttcgggtccgggactctgggctccaccaccgtggccgccggcgggaccagcacaggcggcgttttctccttcggaacgggagcgtctagttccacaaccctgcttaggctattgtcattcgtggaacaaatatttattggacagattcccatgtgcaaggctctgttttagatgaaaactactccaatcaacttcttcaatctgttctgccacattttagccagacaacccttctgtggggctcaattttggaaatcttggaagtacttcaactccagcaactacatctgctccttcaagtggttttggaaccgggctctttggatctaaacctgccactgggttcactctaggaggaacaaatacagg

SEQ ID NO: 161321 - DNA, 6360 bp, Homo sapiens
  Payload ID: 11504
  Gene Symbol: NUP58
  Gene Name: nucleoporin 58kDa
  Uniprot ID: Q9BVL2
  ENST ID: ENST00000463407
  CDS Start-End: 144-1601
gccttcgccgccgttggggctggaagttcccgccaggtccgtgccgggcgagagagatgctgcccggcccgcctcggctttgaggcgagagaagtgtcccagacccatttcgccttgctgacggcgtcgagccctggccagacatgtccacagggttctccttcgggtccgggactctgggctccaccaccgtggccgccggcgggaccagcacaggcggcgttttctccttcggaacgggagcgtctagcaacccttctgtggggctcaattttggaaatcttggaagtacttcaactccagcaactacatctgctccttcaagtggttttggaaccgggctctttggatctaaacctgccactgggttcactctaggaggaacaaatacaggaatagcaacaactataactacaggattaactctgggaacgccagccactacatctgcagctacaacaggcttcagtttaggattcaataaacctgcagcatctgccacaccatttgctctacctattacctctacctcagctagcggtctgactctttcgtctgctctgacatcaactccagcagcatccacaggatttactctaaataatttgggtgggacaacagccacaactacaactgcatcaacaggcctctctttagggggagccttagctggtttgggaggttcacttttccagagtacaaacacaggaacatcaggacttggacagaatgctttagggttgactttgggaactacagcagctacttcaactgcaggcaatgaaggccttggtggtatagatttcagtagctcctcagataaaaagagtgataaaacgggaacaagaccagaggatagtaaagctctgaaggatgaaaatctacctcctgtcatctgccaggatgttgaaaatctccagaaatttgtgaaggagcagaaacaagttcaagaagaaattagtagaatgtcttcaaaagcaatgcttaaggtacaagaagatattaaagctctgaagcagctcctgtcgttggctgccaatggaatacagagaaacactctcaacattgacaaattgaaaatagaaactgctcaggagttgaagaatgctgaaatagctttaagaacccagaagacaccacctggacttcaacatgaatatgcagctcctgctgactacttcagaatcttggttcagcaatttgaggtacagcttcagcagtacaggcagcagattgaagaactagaaaaccatcttgccactcaagcaaataattcacatataacccctcaagatttgtcaatggctatgcagaaaatttatcaaacatttgtagctttagcggcacaacttcagtctattcatgaaaatgtaaaggttctgaaagaacagtaccttggctacaggaaaatgttcttgggagatgctgttgatgtgtttgaaacaaggcgagcagaagccaagaagtggcagaacacacccagagttactactggacccactcctttcagcaccatgccaaacgcagcagccgttgccatggctgcaacacttacacagcagcaacagcctgctacaggtctgaacgcattcaagttatagcttcttactgttccaatgcagaacatttatgtgcgtttttataagtcttccatttgtgtgagcactgaagaaatttctatgagtagctgttccaatacaatctaaaattgtgatggacacgattataaacatacctgataaaaaaggcagggtagtcttagcaataattatacatcaattagatattgaatattgtgaatctacttaatgttatttgctgtaatgctataaatgccctttagaacatggtgtttcactagtgaattacatttaagaataacattagattctgaaatcatgactgtaccatttattgttttaaagtcagagatcatccatccattctttgaatttttcatatatgatactgataggtggtgcattctcattttcctcatacatagtgattacaaagtacccacattcaggatgaagtatgcttttattgactgaaggtatgttgaagatcaataggcttgtttgtatgtatgttgactgtaaacagaatacaagccctctaaaccaaattttgaagatgatacatgctagaattgtacctttccaaggtgaacagaacagcaagagcaggaaaaagatgttttgagatgtggattgcacattaaggagcaactgggaagttgaacagatgaaaataattggtgacatggaaagcagattgttttatttcttggtttagttacacttctaattagagaaacattttttgtggtcattctacagtgttttatttggtcctgtgtctttcggaggttaatagttatcttaatcctgccatcccttttgtcaggtttgaagcttgacatggaaaaatagtcttaatcgatattgatttttttattttaatcattcataaatttcttagtaatgcttactattcaatagcatgtgtctttctgagagttccatatagtccagtagtacattataatacacacaaaaaaattaatacatatttagattgcattcaagctacctatactagggaagcattctctggttttcactattggcagtttaaaaaattgttcttcacatttggagatgacagaattgacttgccataagtaaagggttgatgatagatttatgccaaatcctccatatcccgtggctggacccatgtgaatagtggctcgcacgagcactgtctggtagctctctagctggctggagtgtaggattgcattgttaagttatggagggaaaaagtcattatgggattgattcctttgaggattgatatttcttcttaaaaggattcaatcccataattatgaccatcagctctcatgattacctaaccagttaatcaaaccaaccatagtactagtttactttttagagccagtattaatcctaaagtagataagtgtagatttggttaagtgttctttaaacatagtgaatttccattctattaaatagaacttgagaaatgtcagttatataaaaagttatgttgtaagtgaatatattctatgataaatacctaaacttgaagcaaaatctcctgtcaagggtttgtgtgtgtgtgtgtgtttaactttcttatctatagattattattttgagaaattcataggttttcacttatacattttgagcttgtggacatatggagatgtgtgttcattctctaaatgagtgcctactatgtgctgggctcgaggaatacaaaggtagacaatatagattttgtctttgccctctgtggtggttgacaatgttagcttaatctggagtattcttgaggagccttttgctcataggctttaattttgtctgtgacttttgccaggctttggggaaattgactgccttcactcttccctgaaactttgaagtccacataagggctttctcatcagatggcagaaattataatttattaacctaaacaaccttacagtgttttcgctttgaattgtatgaattcttagaactgagaagctaaacaacagtgataacaattttacattatcttttctttctccttttgtttctctaaaggtctcccaggccttcccagtcaaaattttcgttatttttagtcatgtcaccatgatgtgagatttctgagctctgttagatacatttagaaatgtccctatttatcaaatggtgttttgtaccccataagttatcccttatgccctgtgacttctgtgaaatctttgtttttaagtgccagtaacaaattttagaccatctagatgagggtagagagagcttatgcattgtttttatacatcactgttgatctatacaagatttgagttatcagaagggttttgcttttatttgcatatgaaatttttattaacatgaatatgggcacagagcaaatagcttcttagactgctgccttctgaaggtggcttctgtatctttctcagaggaggaggaatagacttaaacgacttctttgtcctccttcaattttttttttaatgaaaaagtatactagggcttaggcatgtgtgatttacagttatttgttctgaaggctgcagagaattgaaaatccagcaggctatttgtgtatgaaatcatgagcatcgataacgtggataacgtagttccatgttggcagaacttgacacttgtctataagtgcttcccaagcctcctgaaaaactgaagacatttacattaggcttttcagtataattttaatttaggataggttttttagcaatgtatctgggattgagttttgctattgtgttttgacactttaagagttcttgatgtttacataataagactttcttatgtgacttagctgctgttttaaggagagccaagacgttttgttaggaattcctaatttttagcttagtgtaggtttggacatttaaggtgtagtgttaaataggaaacattaagtatttcatcttagtttcttgtggttttgtgattttgttgtatttaataaccaaaggaacattccccattaaatcagtaagagtaaaatttttcaaactggggaaaacgcattttaggttttttaaagaaaaattattttaaaatgtgacttagaaataaccatactaattacattaggcatttggggtgatcatggaaaattataaaatatttttagcactttagtcctttttctgttaatgcagttttacttttaagaaagtaaaatttattctggaaaatatgaattacagcgctaaacctggttttgttgtgtgtgaatatattatatggtaacttttgtaaaatgttactctacatgaagatttcactttggccagtcattggtatatatcactacaaacttaattttatttatggaaataagaacctctcattggatgactattcaaatttcaaagcagacttcttgaattgtttacgtaacttttgcctgaaggatttagactgctttctaatagtgaaactaatatatatggtggccagagtgtaatatatgctaatactttggcatgggagatatttatcatgagtttttactattaaaaaatgttatacatttgcctacgagttttataaatgatgttgccttcagaatttgtgtgaaggtacaaaactaaaaatatcatgtatctgatgtgcaatggaaagtcttgtcatcattagatatgagttcttgattatattctgaatattgatgattagaaaaatcttatgttctgttgctcttaacaacagacccacacacaacaaaaagcatgctatttgagtaactcttacgacttacaaggctgagggctgtggtgtgcattattctttagggtcttccaccagcagtgcctcctattaacctgtgacaaacaagtctctcaatgttaaagaactggacatgtgttttttatgttttttgttaggaatcagaaagtataataatatgcttggtttctttttcctatagtaacattttacaaaagagctgctaggcaggtattttattctcaaagtgatctcaaactggatgtaaaattttaaattatttttttaatagtagtataagaattctggctgctattagttattgtttgttttctgggttagaagctattcgaaaagtccagtttctgtcccagtgtagcaaaatgtagttcctcggttgtttttctttaaatgctttataattttacactacctttttaatatacaaacctcattcttcattggataacttgaaggctttgatttctttaaaaatttaaattttagtgtgtatattactttgacagttccctcatctttgagatgcactgatcactgtgcttgaaaaagacaatactgaagattgtactatgaagtttattgaataattttcataaattatttatccaaatgagagatttttagatttttgtattctgcttagttttaaaaaaaaaaaatagtagtttaaaagagaggctagtaagtttgatgctattcttgccaaacaaactcagccaaaatctttaaagtaacaagagggaaaaggatgactaatcgttctgcttctgagtacattttccaaaacgttggaaagaaacttctgaattgaaatcttgaatgtattgaatctgtcaaggtacacagcggtgcctttgtaaatgttcattactttatttaatcaggtgataagtggtgtaatgtagcagagcttaagaatagaactcaattatcactttttgtgaacaagttggaattgtcatgttactgtgtaattgatttgctttacaatgaacaataaatttaataaaat

SEQ ID NO: 161322 - DNA, 551 bp, Homo sapiens
  Payload ID: 11504
  Gene Symbol: NUP58
  Gene Name: nucleoporin 58kDa
  ENST ID: ENST00000465068
  CDS Start-End: 150-536
agccttgccttcgccgccgttggggctggaagttcccgccaggtccgtgccgggcgagagagatgctgcccggcccgcctcggctttgaggcgagagaagtgtcccagacccatttcgccttgctgacggcgtcgagccctggccagacatgtccacagggttctccttcgggtccgggactctgggctccaccaccgtggccgccggcgggaccagcacaggcggcgttttctccttcggaacgggagcgtctagcaacccttctgtggggctcaattttggaaatcttggaagtacttcaactccagcaactacatctgctccttcaagtggttttggaaccgggctctttggatctaaacctgccactgggttcactctaggaggaacaaatacaggaatagcaacaactataactacaggattaactctggaaaacaacacatctgtttatcagcaaagttttggactggatcagctgcaaacacaagaacgccagccactacatctgcagctacaacaggcttcagtttaggattcaataaacctg

SEQ ID NO: 161323 - DNA, 2870 bp, Homo sapiens
  Payload ID: 11505
  Gene Symbol: NUP62
  Gene Name: nucleoporin 62kDa
  Uniprot ID: P37198
  ENST ID: ENST00000352066
  CDS Start-End: 606-2174
agctctttcactacggggcactggtgggctactgcgcaggaacaaccaagcacgaagaatcgtttagaaaaaaaaaaaacacaccctcccctggagtgctcaggcccagctgcacgcgggctgacaaacatcgagtctagaactctcccacccggccccgggcccagtgcgcatgcgcagccgcgcgccttcggcccaccgtactacttctgcgcctgcgcgaccgtgattccccgctcgcgactccccaccccccagggctccctaaagagggccacgagctgcgaaagggcgggaaaggcagttggagaagaggtaagcggttactcactccatggctgcagcaaggagaggcggcggcggcctcggctgaagaaagaaggtgggagcggagagcgcaggcgtgaaacccaccttgtcccatccacatcaggacatcccagctggagttcaaccttcatcccttctgtggcagttaggagactgaatcaaggtccagagaaggtggaggaatcctgatactgagcgaaatcttcccaaggctgcagacaccgacggatttgctttgggagccagagtagctgccgccaccagagtccggagccatgagcgggtttaattttggaggcactggggcccctacaggcgggttcacgtttggcactgcaaagacggcaacaaccacacctgctacagggttttctttctccacctctggcactggagggtttaattttggggctcccttccaaccagccacaagtaccccttccaccggcctgttctcacttgccacccagactccggccacacagacgacaggcttcacttttggaacagcgactcttgcttcggggggaactggattttctttggggatcggtgcttcaaagctcaacttgagcaacacagctgccaccccagccatggcaaaccccagcggctttgggctgggcagcagcaacctcactaatgccatatcgagcaccgtcacctccagccagggcacagcacccaccggctttgtgtttggcccctccaccacctctgtggctccagctaccacatctggaggcttctcattcactggtggaagcacggcccaaccctccggtttcaacattggctcagcagggaattcagcccagcccacggcacctgccacgttgcccttcactccggccacgccagcagccaccacagcaggtgccacacagccagctgctcccacacccacagccaccatcaccagcactgggcccagcctctttgcgtcaatagcaactgctccaacctcatctgccaccactggactctccctctgtacccctgtgaccacagcgggcgcccccactgctgggacacagggcttcagcttaaaggcacctggagcagcttccggcacctccacaacaacatccaccgctgccaccgccaccgccaccaccaccagcagcagcagcaccaccggctttgccttgaatttaaaaccactggcgccagccgggatccccagcaatacagcagctgccgtgaccgctccacctggccctggcgcagctgcaggggcggctgccagctccgccatgacctacgcgcagctggagagcctgatcaacaaatggagcctggagctagaggaccaggagcggcacttcctccagcaggccacccaggtcaacgcctgggaccgcacgctgatcgagaatggagaaaagatcaccagcctgcaccgcgaggtggagaaggtgaagctggaccagaagaggctggaccaggagctcgacttcatcctgtcccagcagaaggagctggaagacctgctgagcccactggaggagttggtcaaggagcagagcgggaccatctacctgcagcacgcggatgaggagcgtgagaaaacctacaagctggctgagaacatcgatgcacagctcaagcgcatggcccaggatctcaaggacatcatcgagcacctgaacacgtccggggcccccgccgacaccagtgacccactgcagcagatctgcaagatcctcaatgcgcacatggactcactgcagtggatcgaccagaactcggccctgctgcagaggaaggtggaggaggtgaccaaggtgtgcgagggccggcgcaaggagcaggagcgcagcttccggatcacctttgactgagcgacagcagccctggggcccgcaggtccctagggagttcatgaggggaatgcgccctgttgtctgtagtttggggttgtggcaagatacttgtttgtttgtttctttctttcacatgactgcccttgacatgatcgctgtgtgctttgcgtttttccatttaggagggtattctgggccttctgcccaggcagcagcctcatgggtgtggcttctgtggctttcatttgagtatctttggccccttttcacctactgcgaccacccacctcatcctggctcagcctggtgatggagaagtgctgatggtcttggtcccagccagggtcgtgggggcagccactctctccaaagcatagtcataggtgtcatgaaaaaataccaaatgtaagagaacctccaagtcagggcgcagtggctcacccctgtaatctcagcactttgggtggccaaggcgggcagatgacttgaggtcaggagttcgagaccagcctggccaacatggtgaaaccccgtctctactaaaaatacaaaaattagtcaggtgtggtggacgcctgtgatctcaatctcagctactcgggaggctgaggcaggagaatcacttgaacccaggaggtgttgcagtgaaccaagatcacaccactgcactccagcctaggcaacagagactctgtctcaaaaaaaaaaaaaaaa

SEQ ID NO: 161324 - DNA, 3479 bp, Homo sapiens
  Payload ID: 11505
  Gene Symbol: NUP62
  Gene Name: nucleoporin 62kDa
  Uniprot ID: P37198
  ENST ID: ENST00000422090
  CDS Start-End: 497-2065
attcagggtccgcagctctttcactacggggcactggtgggctactgcgcaggaacaaccaagcacgaagaatcgtttagaaaaaaaaaaaacacaccctcccctggagtgctcaggcccagctgcacgcgggctgacaaacatcgagtctagaactctcccacccggccccgggcccagtgcgcatgcgcagccgcgcgccttcggcccaccgtactacttctgcgcctgcgcgaccgtgattccccgctcgcgactccccaccccccagggctccctaaagagggccacgagctgcgaaagggcgggaaaggcagttggagaagaggtaagcggttactcactccatggctgcagcaaggagaggcggcggcggcctcggctgaagaaagaaggtgggagcggagagcgcaggcgtgaaatcttcccaaggctgcagacaccgacggatttgctttgggagccagagtagctgccgccaccagagtccggagccatgagcgggtttaattttggaggcactggggcccctacaggcgggttcacgtttggcactgcaaagacggcaacaaccacacctgctacagggttttctttctccacctctggcactggagggtttaattttggggctcccttccaaccagccacaagtaccccttccaccggcctgttctcacttgccacccagactccggccacacagacgacaggcttcacttttggaacagcgactcttgcttcggggggaactggattttctttggggatcggtgcttcaaagctcaacttgagcaacacagctgccaccccagccatggcaaaccccagcggctttgggctgggcagcagcaacctcactaatgccatatcgagcaccgtcacctccagccagggcacagcacccaccggctttgtgtttggcccctccaccacctctgtggctccagctaccacatctggaggcttctcattcactggtggaagcacggcccaaccctccggtttcaacattggctcagcagggaattcagcccagcccacggcacctgccacgttgcccttcactccggccacgccagcagccaccacagcaggtgccacacagccagctgctcccacacccacagccaccatcaccagcactgggcccagcctctttgcgtcaatagcaactgctccaacctcatctgccaccactggactctccctctgtacccctgtgaccacagcgggcgcccccactgctgggacacagggcttcagcttaaaggcacctggagcagcttccggcacctccacaacaacatccaccgctgccaccgccaccgccaccaccaccagcagcagcagcaccaccggctttgccttgaatttaaaaccactggcgccagccgggatccccagcaatacagcagctgccgtgaccgctccacctggccctggcgcagctgcaggggcggctgccagctccgccatgacctacgcgcagctggagagcctgatcaacaaatggagcctggagctagaggaccaggagcggcacttcctccagcaggccacccaggtcaacgcctgggaccgcacgctgatcgagaatggagaaaagatcaccagcctgcaccgcgaggtggagaaggtgaagctggaccagaagaggctggaccaggagctcgacttcatcctgtcccagcagaaggagctggaagacctgctgagcccactggaggagttggtcaaggagcagagcgggaccatctacctgcagcacgcggatgaggagcgtgagaaaacctacaagctggctgagaacatcgatgcacagctcaagcgcatggcccaggatctcaaggacatcatcgagcacctgaacacgtccggggcccccgccgacaccagtgacccactgcagcagatctgcaagatcctcaatgcgcacatggactcactgcagtggatcgaccagaactcggccctgctgcagaggaaggtggaggaggtgaccaaggtgtgcgagggccggcgcaaggagcaggagcgcagcttccggatcacctttgactgagcgacagcagccctggggcccgcaggtccctagggagttcatgaggggaatgcgccctgttgtctgtagtttggggttgtggcaagatacttgtttgtttgtttctttctttcacatgactgcccttgacatgatcgctgtgtgctttgcgtttttccatttaggagggtattctgggccttctgcccaggcagcagcctcatgggtgtggcttctgtggctttcatttgagtatctttggccccttttcacctactgcgaccacccacctcatcctggctcagcctggtgatggagaagtgctgatggtcttggtcccagccagggtcgtgggggcagccactctctccaaagcatagtcataggtgtcatgaaaaaataccaaatgtaagagaacctccaagtcagggcgcagtggctcacccctgtaatctcagcactttgggtggccaaggcgggcagatgacttgaggtcaggagttcgagaccagcctggccaacatggtgaaaccccgtctctactaaaaatacaaaaattagtcaggtgtggtggacgcctgtgatctcaatctcagctactcgggaggctgaggcaggagaatcacttgaacccaggaggtgttgcagtgaaccaagatcacaccactgcactccagcctaggcaacagagactctgtctcaaaaaaaaaaaaaaaaaaaaagaaactcccaggagacagcagcctagttttcgagtgtgagcttgtgcttgtgaaagctaaccatgctaaccaccaaggcaaagcagcacagtgtgaatagaacagagcgggatcaagaatttcacagaagacaggtcagctgaggggcctgcacacacagggtgttgaggaaccacagatgggcgccgagaggcctgccttttgcctggcccaggctcacccccaccttgggcctcacctcctccaggaagccttcccagctacccgaagctcaggtggccttcttgcaggtccccgtagcaccctgagcctgtaccttgggtggcacttgttatgctatcctgtgctagccgtttgtgcctcgtctcgctgttagattgtgagttcccatgggcagagacccactgtcgttccccgtgtgtccccagcccggtccctgtcacatttgttaaatgaaagaacaatgaagcccagtgtaacgtcagtccacagaaatagccacagcttccagtggtggccgtagacttggctcggaacttagtggcaccagagtaactctagtcagttacagtaaaatccactgtgtgtggaaggcagaagctagcggttgtatcccaagcatcttttgtatttgtctttatactttgctgaattctctgaaatacctattactgtatgttgcttttctaaataaatgtattgtgaaaccaaaa

SEQ ID NO: 161325 - DNA, 587 bp, Homo sapiens
  Payload ID: 11505
  Gene Symbol: NUP62
  Gene Name: nucleoporin 62kDa
  ENST ID: ENST00000600935
  CDS Start-End: 519-587
gattccccgctcgcgactccccaccccccagggctccctaaagagggccacgagctgcgaaagggcgggaaaggcagttggagaagaggtaagcggttactcactccatggctgcagcaaggagaggcggcggcggcctcggctgaagaaagaaggtgggagcggagagcgcaggcgtgggcctccctctttccatttccagcttttagagctgcttctgccttccttggctcctggctttctcacatcttcagattccaaagcgcatcactccagtctgctcgtgtcaccacaagctttcttcccttctccagtcagtcaaatccgtcttctaaggatactgctgatcatctttagggctcacgcctgtagtcctggcactttgagaggacaaagagggaggatcgcttgagcccaggagttgaagaccagggcaacagaaaatcttcccaaggctgcagacaccgacggatttgctttgggagccagagtagctgccgccaccagagtccggagccatgagcgggtttaattttggaggcactggggcccctacaggcgggttcacgtttggcactgcaaagacg

SEQ ID NO: 161326 - DNA, 894 bp, Homo sapiens
  Payload ID: 11505
  Gene Symbol: NUP62
  Gene Name: nucleoporin 62kDa
  ENST ID: ENST00000596437
  CDS Start-End: 668-894
gtactacttctgcgcctgcgcgaccgtgattccccgctcgcgactccccaccccccagggctccctaaagagggccacgagctgcgaaagggcgggaaaggcagttggagaagaggtaagcggttactcactccatggctgcagcaaggagaggcggcggcggcctcggctgaagaaagaaggtgggagcggagagcgcaggcgtgaaacccaccttgtcccatccacatcaggacatcccagctggagttcaaccttcatcccttctgtggcagttaggagactgaatcaaggtccagagaaggtggaggaatcctgatactgagcgggcctccctctttccatttccagcttttagagctgcttctgccttccttggctcctggctttctcacatcttcagattccaaagcgcatcactccagtctgctcgtgtcaccacaagctttcttcccttctccagtcagtcaaatccgtcttctaaggatactgctgatcatctttagggctcacgcctgtagtcctggcactttgagaggacaaagagggaggatcgcttgagcccaggagttgaagaccagggcaacagaaaatcttcccaaggctgcagacaccgacggatttgctttgggagccagagtagctgccgccaccagagtccggagccatgagcgggtttaattttggaggcactggggcccctacaggcgggttcacgtttggcactgcaaagacggcaacaaccacacctgctacagggttttctttctccacctctggcactggagggtttaattttggggctcccttccaaccagccacaagtaccccttccaccggcctgttctcacttgccacccagactccggccacacagacgacaggcttcacttt

SEQ ID NO: 161327 - DNA, 564 bp, Homo sapiens
  Payload ID: 11505
  Gene Symbol: NUP62
  Gene Name: nucleoporin 62kDa
  ENST ID: ENST00000599788
  CDS Start-End: 494-564
agggctccctaaagagggccacgagctgcgaaagggcgggaaaggcagttggagaagaggtaagcggttactcactccatggctgcagcaaggagaggcggcggcggcctcggctgaagaaagaaggtgggagcggagagcgcaggcgtgacagggcctccctctttccatttccagcttttagagctgcttctgccttccttggctcctggctttctcacatcttcagattccaaagcgcatcactccagtctgctcgtgtcaccacaagctttcttcccttctccagtcagtcaaatccgtcttctaaggatactgctgatcatctttagggctcacgcctgtagtcctggcactttgagaggacaaagagggaggatcgcttgagcccaggagttgaagaccagggcaacagaaaatcttcccaaggctgcagacaccgacggatttgctttgggagccagagtagctgccgccaccagagtccggagccatgagcgggtttaattttggaggcactggggcccctacaggcgggttcacgtttggcactgcaaagacggc

SEQ ID NO: 161328 - DNA, 533 bp, Homo sapiens
  Payload ID: 11505
  Gene Symbol: NUP62
  Gene Name: nucleoporin 62kDa
  ENST ID: ENST00000595761
  CDS Start-End: 132-533
agctcccgccaggcgactgcaacagtctcctcactcctcccacacagagtctcgaaatcttcccaaggctgcagacaccgacggatttgctttgggagccagagtagctgccgccaccagagtccggagccatgagcgggtttaattttggaggcactggggcccctacaggcgggttcacgtttggcactgcaaagacggcaacaaccacacctgctacagggttttctttctccacctctggcactggagggtttaattttggggctcccttccaaccagccacaagtaccccttccaccggcctgttctcacttgccacccagactccggccacacagacgacaggcttcacttttggaacagcgactcttgcttcggggggaactggattttctttggggatcggtgcttcaaagctcaacttgagcaacacagctgccaccccagccatggcaaaccccagcggctttgggctgggcagcagcaacctcactaatgccatatcgagcaccgtcacctccagccagggc

SEQ ID NO: 161329 - DNA, 1824 bp, Homo sapiens
  Payload ID: 11505
  Gene Symbol: NUP62
  Gene Name: nucleoporin 62kDa
  ENST ID: ENST00000597723
  CDS Start-End: 350-1690
agggctccctaaagagggccacgagctgcgaaagggcgggaaaggcagttggagaagaggtaagcggttactcactccatggctgcagcaaggagaggcggcggcggcctcggctgaagaaagaaggtgggagcggagagcgcaggcgtgaaacccaccttgtcccatccacatcaggacatcccagctggagttcaaccttcatcccttctgtggcagttaggagactgaatcaaggtccagagaaggtggaggaatcctgatactgagcgaaatcttcccaaggctgcagacaccgacggatttgctttgggagccagagtagctgccgccaccagagtccggagccatgagcgggtttaattttggaggcactggggcccctacaggcgggttcacgtttggcactgcaaagacggcaacaaccacacctgctacagggttttctttctccacctctggcactggagggtttaattttggggctcccttccaaccagccacaagtaccccttccaccggcctgttctcacttgccacccagactccggccacacagacgacaggcttcacttttggaacagcgactcttgcttcggggggaactggattttctttggggatcggtgcttcaaagctcaacttgagcaacacagctgccaccccagccatggcaaaccccagcggctttgggctgggcagcagcaacctcactaatgccatatcgagcaccgtcacctccagccagggcacagcacccaccggctttgtgtttggcccctccaccacctctgtggctccagctaccacatctggaggcttctcattcactggtggaagcacggcccaaccctccggtttcaacattggctcagcagggaattcagcccagcccacggcacctgccacgttgcccttcactccggccacgccagcagccaccacagcaggtgccacacagccagctgctcccacacccacagccaccatcaccagcactgggcccagcctctttgcgtcaatagcaactgctccaacctcatctgccaccactggactctccctctgtacccctgtgaccacagcgggcgcccccactgctgggacacagggcttcagcttaaaggcacctggagcagcttccggcacctccacaacaacatccaccgctgccaccgccaccgccacccaggtcaacgcctgggaccgcacgctgatcgagaatggagaaaagatcaccagcctgcaccgcgaggtggagaaggtgaagctggaccagaagaggctggaccaggagctcgacttcatcctgtcccagcagaaggagctggaagacctgctgagcccactggaggagttggtcaaggagcagagcgggaccatctacctgcagcacgcggatgaggagcgtgagaaaacctacaagctggctgagaacatcgatgcacagctcaagcgcatggcccaggatctcaaggacatcatcgagcacctgaacacgtccggggcccccgccgacaccagtgacccactgcagcagatctgcaagatcctcaatgcgcacatggactcactgcagtggatcgaccagaactcggccctgctgcagaggaaggtggaggaggtgaccaaggtgtgcgagggccggcgcaaggagcaggagcgcagcttccggatcacctttgactgagcgacagcagccctggggcccgcaggtccctagggagttcatgaggggaatgcgccctgttgtctgtagtttggggttgtggcaagatacttgtttgtttgtttctttctttcacatgactgcccttgacatga

SEQ ID NO: 161330 - DNA, 564 bp, Homo sapiens
  Payload ID: 11505
  Gene Symbol: NUP62
  Gene Name: nucleoporin 62kDa
  ENST ID: ENST00000594673
  CDS Start-End: 457-564
aaaggcagttggagaagaggtaagcggttactcactccatggctgcagcaaggagaggcggcggcggcctcggctgaagaaagaaggtgggagcggagagcgcaggcgtgccgaggtggatgtccgtcttttctctgttgcagaaacccaccttgtcccatccacatcaggacatcccagctggagttcaaccttcatcccttctgtggcagttaggagactgaatcaaggtccagagaaggtggaggaatcctgatactgagcggtccttaatgcaagtcggttatgcctgtaggttgaaaggcatcagggaggaaaatgggaccagaatgccaggtgacctaaggaggagagagagaggacagttgaaaacccacagaaatcttcccaaggctgcagacaccgacggatttgctttgggagccagagtagctgccgccaccagagtccggagccatgagcgggtttaattttggaggcactggggcccctacaggcgggttcacgtttggcactgcaaagacggcaacaaccacacctgctacagggttttctttctccacc

SEQ ID NO: 161331 - DNA, 567 bp, Homo sapiens
  Payload ID: 11505
  Gene Symbol: NUP62
  Gene Name: nucleoporin 62kDa
  ENST ID: ENST00000600645
  CDS Start-End: 270-567
gctcagcttctccctggaacctgctcccacagcatgtggcccggccctgtgcctgccctgagccctggttgtagagctgacatttgactctggctgccttgagggcagggaccgtggcttaaccagccactctgggcttcactttcctcatttgtcaagtggatctgccccaaagtttgctttgaggaaacgaaatcttcccaaggctgcagacaccgacggatttgctttgggagccagagtagctgccgccaccagagtccggagccatgagcgggtttaattttggaggcactggggcccctacaggcgggttcacgtttggcactgcaaagacggcaacaaccacacctgctacagggttttctttctccacctctggcactggagggtttaattttggggctcccttccaaccagccacaagtaccccttccaccggcctgttctcacttgccacccagactccggccacacagacgacaggcttcacttttggaacagcgactcttgcttcggggggaactggattttctttggggatcggtgcttcaaagctcaacttga

SEQ ID NO: 161332 - DNA, 473 bp, Homo sapiens
  Payload ID: 11505
  Gene Symbol: NUP62
  Gene Name: nucleoporin 62kDa
  ENST ID: ENST00000596680
  CDS Start-End: 418-473
agttggagaagaggtaagcggttactcactccatggctgcagcaaggagaggcggcggcggcctcggctgaagaaagaaggtgggagcggagagcgcaggcgtgaaacccaccttgtcccatccacatcaggacatcccagctggagttcaaccttcatcccttctgtggcagttaggagactgaatcaaggtccagagaaggtggaggaatcctgatactgagcggtccttaatgcaagtcggttatgcctgtaggttgaaaggcatcagggaggaaaatgggaccagaatgccaggtgacctaaggaggagagagagaggacagttgaaaacccacagaaatcttcccaaggctgcagacaccgacggatttgctttgggagccagagtagctgccgccaccagagtccggagccatgagcgggtttaattttggaggcactggggcccctacaggcgggttcacgtttgg

SEQ ID NO: 161333 - DNA, 3590 bp, Homo sapiens
  Payload ID: 11505
  Gene Symbol: NUP62
  Gene Name: nucleoporin 62kDa
  Uniprot ID: P37198
  ENST ID: ENST00000596217
  CDS Start-End: 1889-3457
gattccccgctcgcgactccccaccccccagggctccctaaagagggccacgagctgcgaaagggcgggaaaggcagttggagaagaggtaagcggttactcactccatggctgcagcaaggagaggcggcggcggcctcggctgaagaaagaaggtgggagcggagagcgcaggcgtggtgagcgcggagacgggccgggggcacaaaggggtcgaggctacagagccatggccggggctacgcaggcagaggcggcgacactgtagtgagaagagactgtgatccgaggacagggaatgaggcggccccggggactggggacagatatatactgggtggcggagcacggccctcccggatccttccgcgccccgccctcgcgcggccccaaccgggaggcagccgggtcccctcctcctggggatcaggggatccgagcctttccttcccactcctagggtccgggaccctcctccctctcagctggggatccgacctcttccctctgagccggggatccagccctctccttgtggctccggggtctggtttcctcctcctgactctaagctctggtttctttctctttctgcctctgaggtctgggcctgcttcctcctgtgattttgaggatccagcctcattctcttcccgcagacctgcaccagttcatttctctttccctttccttgcttgcagaatttcctgccagtcacttttcacttcttcatcccccagctgctgactctgagaaaccctcgtgggttagagtccagcatgagtcacagcactctcccaaatacagacctgccaggatggcctcgggcaaataacttaagttctcttacttcatttccctatctgtaaaataagaaaaatcaactcgcctggtgggtttatgagactcaaataagacgatgtctggcaagccttatgcacagagctcaactcatacattcctgttcaactgttttttttttttgagacggagtctctccgtctctgtcgcccaggctggagtgcagtggcgcgatctcggctcactgcaaactccgcctcccaggttcacgccattctcctgcctcagcctcccgagtagctgggactacaggcgcccgccaccacgcccggctaattttttgtatttttagtagagacggggtttcactgtgttagccaggatggtctcaatttcctggcctcgtgatccgcccgcctcggcctcccaaagtgctgggattacaggcgtgagccatcgctcccggcctcagcatattttattaataggaactctggggcccagtctcatttcttccttaccacttgtaagagccgcagacgttggactgtccaacacctgctgtcattcttctgtctccctcatccctctaaagtgtctgtttccagctatcctcatcttccattccaaatgatgggtgcccaggccccatcccctggcagggattcagacatcgaggccccagctgcgtccttttctccatcccttgcccttggcttcctttcaaaccgtccttcagcttccactggataggaactatctcccaaccctgccaaaaatggaagatctccgttttcgtttagtcacagggtagccatcttgccccttctcatgcactgggccctcctccaccagccgaggtggatgtccgtcttttctctgttgcagaaacccaccttgtcccatccacatcaggacatcccagctggagttcaaccttcatcccttctgtggcagttaggagactgaatcaaggtccagagaaggtggaggaatcctgatactgagcgaaatcttcccaaggctgcagacaccgacggatttgctttgggagccagagtagctgccgccaccagagtccggagccatgagcgggtttaattttggaggcactggggcccctacaggcgggttcacgtttggcactgcaaagacggcaacaaccacacctgctacagggttttctttctccacctctggcactggagggtttaattttggggctcccttccaaccagccacaagtaccccttccaccggcctgttctcacttgccacccagactccggccacacagacgacaggcttcacttttggaacagcgactcttgcttcggggggaactggattttctttggggatcggtgcttcaaagctcaacttgagcaacacagctgccaccccagccatggcaaaccccagcggctttgggctgggcagcagcaacctcactaatgccatatcgagcaccgtcacctccagccagggcacagcacccaccggctttgtgtttggcccctccaccacctctgtggctccagctaccacatctggaggcttctcattcactggtggaagcacggcccaaccctccggtttcaacattggctcagcagggaattcagcccagcccacggcacctgccacgttgcccttcactccggccacgccagcagccaccacagcaggtgccacacagccagctgctcccacacccacagccaccatcaccagcactgggcccagcctctttgcgtcaatagcaactgctccaacctcatctgccaccactggactctccctctgtacccctgtgaccacagcgggcgcccccactgctgggacacagggcttcagcttaaaggcacctggagcagcttccggcacctccacaacaacatccaccgctgccaccgccaccgccaccaccaccagcagcagcagcaccaccggctttgccttgaatttaaaaccactggcgccagccgggatccccagcaatacagcagctgccgtgaccgctccacctggccctggcgcagctgcaggggcggctgccagctccgccatgacctacgcgcagctggagagcctgatcaacaaatggagcctggagctagaggaccaggagcggcacttcctccagcaggccacccaggtcaacgcctgggaccgcacgctgatcgagaatggagaaaagatcaccagcctgcaccgcgaggtggagaaggtgaagctggaccagaagaggctggaccaggagctcgacttcatcctgtcccagcagaaggagctggaagacctgctgagcccactggaggagttggtcaaggagcagagcgggaccatctacctgcagcacgcggatgaggagcgtgagaaaacctacaagctggctgagaacatcgatgcacagctcaagcgcatggcccaggatctcaaggacatcatcgagcacctgaacacgtccggggcccccgccgacaccagtgacccactgcagcagatctgcaagatcctcaatgcgcacatggactcactgcagtggatcgaccagaactcggccctgctgcagaggaaggtggaggaggtgaccaaggtgtgcgagggccggcgcaaggagcaggagcgcagcttccggatcacctttgactgagcgacagcagccctggggcccgcaggtccctagggagttcatgaggggaatgcgccctgttgtctgtagtttggggttgtggcaagatacttgtttgtttgtttctttctttcacatgactgcccttgacatg

SEQ ID NO: 161334 - DNA, 579 bp, Homo sapiens
  Payload ID: 11505
  Gene Symbol: NUP62
  Gene Name: nucleoporin 62kDa
  ENST ID: ENST00000599567
  CDS Start-End: 280-579
gattccccgctcgcgactccccaccccccagggctccctaaagagggccacgagctgcgaaagggcgggaaaggcagttggagaagaggtccttaatgcaagtcggttatgcctgtaggttgaaaggcatcagggaggaaaatgggaccagaatgccaggtgacctaaggaggagagagagaggacagttgaaaacccacagaaatcttcccaaggctgcagacaccgacggatttgctttgggagccagagtagctgccgccaccagagtccggagccatgagcgggtttaattttggaggcactggggcccctacaggcgggttcacgtttggcactgcaaagacggcaacaaccacacctgctacagggttttctttctccacctctggcactggagggtttaattttggggctcccttccaaccagccacaagtaccccttccaccggcctgttctcacttgccacccagactccggccacacagacgacaggcttcacttttggaacagcgactcttgcttcggggggaactggattttctttggggatcggtgcttcaaagctcaacttgagc

SEQ ID NO: 161335 - DNA, 905 bp, Homo sapiens
  Payload ID: 11505
  Gene Symbol: NUP62
  Gene Name: nucleoporin 62kDa
  ENST ID: ENST00000593652
  CDS Start-End: 493-905
gattccccgctcgcgactccccaccccccagggctccctaaagagggccacgagctgcgaaagggcgggaaaggcagttggagaagaggtaagcggttactcactccatggctgcagcaaggagaggcggcggcggcctcggctgaagaaagaaggtgggagcggagagcgcaggcgtgaaacccaccttgtcccatccacatcaggacatcccagctggagttcaaccttcatcccttctgtggcagttaggagactgaatcaaggtccagagaaggtggaggaatcctgatactgagcggtccttaatgcaagtcggttatgcctgtaggttgaaaggcatcagggaggaaaatgggaccagaatgccaggtgacctaaggaggagagagagaggacagttgaaaacccacagaaatcttcccaaggctgcagacaccgacggatttgctttgggagccagagtagctgccgccaccagagtccggagccatgagcgggtttaattttggaggcactggggcccctacaggcgggttcacgtttggcactgcaaagacggcaacaaccacacctgctacagggttttctttctccacctctggcactggagggtttaattttggggctcccttccaaccagccacaagtaccccttccaccggcctgttctcacttgccacccagactccggccacacagacgacaggcttcacttttggaacagcgactcttgcttcggggggaactggattttctttggggatcggtgcttcaaagctcaacttgagcaacacagctgccaccccagccatggcaaaccccagcggctttgggctgggcagcagcaacctcactaatgccatatcgagcaccgtcacctccagccagggcacagcacccac

SEQ ID NO: 161336 - DNA, 2053 bp, Homo sapiens
  Payload ID: 11505
  Gene Symbol: NUP62
  Gene Name: nucleoporin 62kDa
  Uniprot ID: P37198
  ENST ID: ENST00000597029
  CDS Start-End: 351-1919
agggcgggaaaggcagttggagaagaggtaagcggttactcactccatggctgcagcaaggagaggcggcggcggcctcggctgaagaaagaaggtgggagcggagagcgcaggcgtgccgaggtggatgtccgtcttttctctgttgcagaaacccaccttgtcccatccacatcaggacatcccagctggagttcaaccttcatcccttctgtggcagttaggagactgaatcaaggtccagagaaggtggaggaatcctgatactgagcgaaatcttcccaaggctgcagacaccgacggatttgctttgggagccagagtagctgccgccaccagagtccggagccatgagcgggtttaattttggaggcactggggcccctacaggcgggttcacgtttggcactgcaaagacggcaacaaccacacctgctacagggttttctttctccacctctggcactggagggtttaattttggggctcccttccaaccagccacaagtaccccttccaccggcctgttctcacttgccacccagactccggccacacagacgacaggcttcacttttggaacagcgactcttgcttcggggggaactggattttctttggggatcggtgcttcaaagctcaacttgagcaacacagctgccaccccagccatggcaaaccccagcggctttgggctgggcagcagcaacctcactaatgccatatcgagcaccgtcacctccagccagggcacagcacccaccggctttgtgtttggcccctccaccacctctgtggctccagctaccacatctggaggcttctcattcactggtggaagcacggcccaaccctccggtttcaacattggctcagcagggaattcagcccagcccacggcacctgccacgttgcccttcactccggccacgccagcagccaccacagcaggtgccacacagccagctgctcccacacccacagccaccatcaccagcactgggcccagcctctttgcgtcaatagcaactgctccaacctcatctgccaccactggactctccctctgtacccctgtgaccacagcgggcgcccccactgctgggacacagggcttcagcttaaaggcacctggagcagcttccggcacctccacaacaacatccaccgctgccaccgccaccgccaccaccaccagcagcagcagcaccaccggctttgccttgaatttaaaaccactggcgccagccgggatccccagcaatacagcagctgccgtgaccgctccacctggccctggcgcagctgcaggggcggctgccagctccgccatgacctacgcgcagctggagagcctgatcaacaaatggagcctggagctagaggaccaggagcggcacttcctccagcaggccacccaggtcaacgcctgggaccgcacgctgatcgagaatggagaaaagatcaccagcctgcaccgcgaggtggagaaggtgaagctggaccagaagaggctggaccaggagctcgacttcatcctgtcccagcagaaggagctggaagacctgctgagcccactggaggagttggtcaaggagcagagcgggaccatctacctgcagcacgcggatgaggagcgtgagaaaacctacaagctggctgagaacatcgatgcacagctcaagcgcatggcccaggatctcaaggacatcatcgagcacctgaacacgtccggggcccccgccgacaccagtgacccactgcagcagatctgcaagatcctcaatgcgcacatggactcactgcagtggatcgaccagaactcggccctgctgcagaggaaggtggaggaggtgaccaaggtgtgcgagggccggcgcaaggagcaggagcgcagcttccggatcacctttgactgagcgacagcagccctggggcccgcaggtccctagggagttcatgaggggaatgcgccctgttgtctgtagtttggggttgtggcaagatacttgtttgtttgtttctttctttcacatgactgcccttgacatga

SEQ ID NO: 161337 - DNA, 1755 bp, Homo sapiens
  Payload ID: 11506
  Gene Symbol: NUP62CL
  Gene Name: nucleoporin 62kDa C-terminal like
  Uniprot ID: Q9H1M0
  ENST ID: ENST00000372466
  CDS Start-End: 253-807
agtctcggttagcttcacttcagcgggaacctgcccactaaggaggccgattctttccggctcgagcaggtccggacccgcccctctggcgtctagcagtctcggaggcctgcccgtatagttcagggccggacagcgagcggcggcgacttgccagtaagggtttggagtcatcagcaggtttaattttggaggaactttacaggtttggctccagcagctgctgttgccaccaccactagttcaagcaccatgcagtttacctcaatatcaaattctttgacctccactgctgctattgggctctcatttacaacttcaacgactaccaccgccactttcaccaccaacactactaccacaatcaccagtggctttactgtgaaccaaaaccaactgttatcaagagggtttgaaaaccttgtaccttatacttcaactgttagtgtagtagcaactcctgtgatgacatatggtcatctggagggtcttataaatgagtggaaccttgagctggaagatcaagagaagtactttcttctccaggccactcaggtcaatgcttgggaccatacattgattgagaatggtgagatgattcgtattttacatggagaagtgaacaaagtgaaactggatcagaaaagattggaacaagaattggattttatcctgtcacagcagcaggaactagaatttctgttgacttatttagaggagtctacgcgtgaccagagtggacttcattatctgcaggatgcagatgaggagcatgtggagatctccaccagatctgcagaattctgaatgcccatatggactccctgcagtggattgatcggaattcaggcatgctgcgaaggaaggtagaagtggtaacacgggttttcgaggattatcgtcacgaggagcatgcacacaatgtcaacactgctttttagtgaatgaccatatcttcagcatgtcgtttctggattattacctacaaattctgatgttaaatagagtagtatttatacttaatatttcatcttgatcataatgaattgtgcatcctttttttcatttaagtattgtactgttgagaattataccttagttttgtttttagtattagaaaatcaaaattatactagcccctttgtccagacagcaacctcttagatgctgactctatatgtgtaatttatgtcttactctccctggcatcagtacacatcatccttctcactccagttgaatcatagggtgatgtctgccaaaagtacatgccaacctatatagtgctagatactgtaaagtctcttctcctcaaaggaacctactgtctagtttgagatataattaatgcttgtctgcataaaaacaatatagataatataaagaagtgcagtatgaattatagaaagtgtgttatagagattcagagcagggaggaaaagttagggtagattattattaaagggttaaggaaaggtaagtttcaaggaatttggttatttttaatgtatggatatactggcattttatttggttttagcatatgatttatagttggtgatttccgtatatttgtttgtttttctttttttttgtttgtttgttttgttttgttttaaataagccttgttcttaggtttggaacagtctggtctcctgtgtttcatgtttcacctaagtcataaataaaggtaatgtcctaaaaaaaaacatgtaatactgaaattaactattaaaagtttttaagtgactaga

SEQ ID NO: 161338 - DNA, 618 bp, Homo sapiens
  Payload ID: 11506
  Gene Symbol: NUP62CL
  Gene Name: nucleoporin 62kDa C-terminal like
  ENST ID: ENST00000421752
  CDS Start-End: 209-618
agtctcggttagcttcacttcagcgggaacctgcccactaaggaggccgattctttccggctcgagcaggtccggacccgcccctctggcgtctagcagtctcggaggcctgcccgtatagttcagggccggacagcgagcggcggcgacttgccagtaaggtttggctccagcagctgctgttgccaccaccactagttcaagcaccatgcagtttacctcaatatcaaattctttgacctccactgctgctattgggctctcatttacaacttcaacgactaccaccgccactttcaccaccaacactactaccacaatcaccagtggctttactgtgaaccaaaaccaactgttatcaagagggtttgaaaaccttgtaccttatacttcaactgttagtgtagtagcaactcctgtgatgacatatggtcatctggagggtcttataaatgagtggaaccttgagctggaagatcaagagaagtactttcttctccaggccactcaggtcaatgcttgggaccatacattgattgagaatggtgagatgattcgtattttacatggagaagtgaacaaagtgaaactggatcagaaaagattggaacaagaatt

SEQ ID NO: 161339 - DNA, 688 bp, Homo sapiens
  Payload ID: 11506
  Gene Symbol: NUP62CL
  Gene Name: nucleoporin 62kDa C-terminal like
  ENST ID: ENST00000432145
  CDS Start-End: 1-595
tcctgtgatgacatatggtcatctggagggtcttataaatgagtggaaccttgagctggaagatcaagagaagtactttcttctccaggccactcaggtcaatgcttgggaccatacattgattgagaatggtgagatgattcgtattttacatggagaagtgaacaaagtgaaactggatcagaaaagattggaacaagaattggattttatcctgtcacagcagcaggaactagaatttctgttgacttatttagaggagtctacgcgtgaccagagtggacttcattatctgcaggatgcagatgaggagcatgtggagatttacagattagcagaaagtatagatgctcagctgaaacaaatggcccaagatctcaaggacgttgttaatcacctgaatacatttgaaagttcttctgacactactgatccgctccaccagatctgcagaattctgaatgcccatatggactccctgcagtggattgatcggaattcaggcatgctgcgaaggaaggtagaagtggtaacacgggttttcgaggattatcgtcacgaggagcatgcacacaatgtcaacactgctttttagtgaatgaccatatcttcagcatgtcgtttctggattattacctacaaattctgatgttaaatagagtagtatttatacttaatatttcatctt

SEQ ID NO: 161340 - DNA, 1515 bp, Homo sapiens
  Payload ID: 11506
  Gene Symbol: NUP62CL
  Gene Name: nucleoporin 62kDa C-terminal like
  Uniprot ID: Q9H1M0
  ENST ID: ENST00000484614
  CDS Start-End: 209-427
agtctcggttagcttcacttcagcgggaacctgcccactaaggaggccgattctttccggctcgagcaggtccggacccgcccctctggcgtctagcagtctcggaggcctgcccgtatagttcagggccggacagcgagcggcggcgacttgccagtaaggtttggctccagcagctgctgttgccaccaccactagttcaagcaccatgcagtttacctcaatatcaaattctttgacctccactgctgctattgggctctcatttacaacttcaacgactaccaccgccactttcaccaccaacactactaccacaatcaccagtggctttactgtgaaccaaaaccaactgttatcaagagggtttgaaaaccttgtaccttatacttcaactgttagattcgtattttacatggagaagtgaacaaagtgaaactggatcagaaaagattggaacaagaattggattttatcctgtcacagcagcaggaactagaatttctgttgacttatttagaggagtctacgcgtgaccagagtggacttcattatctgcaggatgcagatgaggagcatgtggagatctccaccagatctgcagaattctgaatgcccatatggactccctgcagtggattgatcggaattcaggcatgctgcgaaggaaggtagaagtggtaacacgggttttcgaggattatcgtcacgaggagcatgcacacaatgtcaacactgctttttagtgaatgaccatatcttcagcatgtcgtttctggattattacctacaaattctgatgttaaatagagtagtatttatacttaatatttcatcttgatcataatgaattgtgcatcctttttttcatttaagtattgtactgttgagaattataccttagttttgtttttagtattagaaaatcaaaattatactagcccctttgtccagacagcaacctcttagatgctgactctatatgtgtaatttatgtcttactctccctggcatcagtacacatcatccttctcactccagttgaatcatagggtgatgtctgccaaaagtacatgccaacctatatagtgctagatactgtaaagtctcttctcctcaaaggaacctactgtctagtttgagatataattaatgcttgtctgcataaaaacaatatagataatataaagaagtgcagtatgaattatagaaagtgtgttatagagattcagagcagggaggaaaagttagggtagattattattaaagggttaaggaaaggtaagtttcaaggaatttggttatttttaatgtatggatatactggcattttatttggttttagcatatgatttatagttggtgatttccgtatatttgtttgtttttctttttttttgtttgtttgttttgttttgttttaaataagccttgttcttaggtttggaacagtctggtctcctgtgtttcatgtttcacctaagtcataaataaaggtaatgtcctaaaaaaaaa

SEQ ID NO: 161341 - DNA, 2121 bp, Homo sapiens
  Payload ID: 11507
  Gene Symbol: NUP85
  Gene Name: nucleoporin 85kDa
  Uniprot ID: Q9BW27
  ENST ID: ENST00000245544
  CDS Start-End: 72-2042
gctctgagcgggaggcctgagcgggaagcattggcgtccgagcgacttctaggagcctggggttcggcgctatggaggagctcgatggcgagccaacagtcactttgattccaggcgtgaattccaagaagaaccaaatgtattttgactggggtccaggggagatgctggtatgtgaaacctccttcaacaaaaaagaaaaatcagagatggtgccaagttgcccctttatctatatcatccgtaaggatgtagatgtttactctcaaatcttgagaaaactcttcaatgaatcccatggaatctttctgggcctccagagaattgacgaagagttgactggaaaatccagaaaatctcaattggttcgagtgagtaaaaactaccgatcagtcatcagagcatgtatggaggaaatgcaccaggttgcaattgctgctaaagatccagccaatggccgccagttcagcagccaggtctccattttgtcagcaatggagctcatctggaacctgtgtgagattctttttattgaagtggccccagctggccctctcctcctccatctccttgactgggtccggctccatgtgtgcgaggtggacagtttgtcggcagatgttctgggcagtgagaatccaagcaaacatgacagcttctggaacttggtgaccatcttggtgctgcagggccggctggatgaggcccgacagatgctctccaaggaagccgatgccagccccgcctctgcaggcatatgccgaatcatgggggacctgatgaggacaatgcccattcttagtcccgggaacacccagacactgacagagctggagctgaagtggcagcactggcacgaggaatgtgagcggtacctccaggacagcacattcgccaccagccctcacctggagtctctcttgaagattatgctgggagacgaagctgccttgttagagcagaaggaacttctgagtaattggtatcatttcctagtgactcggctcttgtactccaatcccacagtaaaacccattgatctgcactactatgcccagtccagcctggacctgtttctgggaggtgagagcagcccagaacccctggacaacatcttgttggcagcctttgagtttgacatccatcaagtaatcaaagagtgcagcatcgccctgagcaactggtggtttgtggcccacctgacagacctgctggaccactgcaagctcctccagtcacacaacctctatttcggttccaacatgagagagttcctcctgctggagtacgcctcgggactgtttgctcatcccagcctgtggcagctgggggtcgattactttgattactgccccgagctgggccgagtctccctggagctgcacattgagcggatacctctgaacaccgagcagaaagccctgaaggtgctgcggatctgtgagcagcggcagatgactgaacaagttcgcagcatttgtaagatcttagccatgaaagccgtccgcaacaatcgcctgggttctgccctctcttggagcatccgtgctaaggatgccgcctttgccacgctcgtgtcagacaggttcctcagggattactgtgagcgaggctgcttttctgatttggatctcattgacaacctggggccagccatgatgctcagtgaccgactgacattcctgggaaagtatcgcgagttccaccgtatgtacggggagaagcgttttgccgacgcagcttctctccttctgtccttgatgacgtctcggattgcccctcggtctttctggatgactctgctgacagacgccttgccccttttggaacagaaacaggtgattttctcagcagaacagacttatgagttgatgcggtgtctggaggacttgacgtcaagaagacctgtgcatggagaatctgataccgagcagctccaggatgatgacatagagaccaccaaggtggaaatgctgagactttctctggcacgaaatcttgctcgggcaattataagagaaggctcactggaaggttcctgagaactgcttcaatgtggtatctttgtatggcaatgtatatagatttttttaaaagaataaatgttgttttgcaaatgta

SEQ ID NO: 161342 - DNA, 1926 bp, Homo sapiens
  Payload ID: 11507
  Gene Symbol: NUP85
  Gene Name: nucleoporin 85kDa
  ENST ID: ENST00000540768
  CDS Start-End: 1069-1848
tttaggaataaaacagatttgagcagaagaagtctgttggatgcagggagtataaaaggggaaagcatcctgctgtttccagtggcagaagagaaagagaagtaccatgaagaggggtgaacaacatcactctcgtgccggacacagacaaggaatgattaggcttgcagtcccccagtctcagcctctctccactctcacaagcaggaagggatctgagctctgttagtgggaaatcttggagtttgcatttctctgatcacgaggctacctcctatcctgttttgaaagaggaacagaaaagcagagcttgtcccaggaattgtgaaatgggctgcaatgtcttcagaggcagtagcagttttaggaagtgtgccctcctggctctggggaaaggttgaattggggtcttgtgggcacttgttttctcatgggatgtatcagtcagacccatgcacagttctgggcggcagggaagtgtgtctctttctggacttgagccagtgagctgttggcatgcctttttaaaggcattagaaaaaaggtttctttcttttttttcctttcctgttcacaccaccttcatatgaacatggagaagggaggtttctaagtgggcccctgatttactcctatgtcaataatcgtgccagaccctaaggggcagaaaaggcagccaggggatcctgactcagaggctgtagttcgtcagccctgctaaagggccaggggtttgtctctcagtgcctgggtgggcatgcttgactgctaaccccttagctgaaaggagatggcaggagtcctccacagggtcccttcttccctcctggcttacagcttcctctgaagacgggccagttccttgctgtctggcaagaggaaacagctggggtgcacttcactgggagttgggcaagatgtcggcagtttcctggtgcccttcaagtcctccaaaagtatcgagctaaaagcatcgccctgagcaactggtggtttgtggcccacctgacagacctgctggaccactgcaagctcctccagtcacacaacctctatttcggttccaacatgagagagttcctcctgctggagtacgcctcgggactgtttgctcatcccagcctgtggcagctgggggtcgattactttgattactgccccgagctgggccgagtctccctggagctgcacattgagcggatacctctgaacaccgagcagaaagccctgaaggtgctgcggatctgtgagcagcggcagatgactgaacaagttcgcagcatttgtaagatcttagccatgaaagccgtccgcaacaatcgcctgggttctgccctctcttggagcatccgtgctaaggatgccgcctttgccacgctcgtgtcagacaggttcctcagggattactgtgagcgaggctgcttttctgatttggatctcattgacaacctggggccagccatgatgctcagtgaccgactgacattcctgggaaagtatcgcgagttccaccgtatgtacggggagaagcgttttgccgacgcagcttctctccttctgtccttgatgacgtctcggattgcccctcggtctttctggatgactctgctgacagacgccttgccccttttggaacagaaacaggtgattttctcagcagaacagacttatgagttgatgcggtgtctggaggacttgacgtcaagaagacctgtgcatggagaatctgataccgagcagctccaggatgatgacatagagaccaccaaggtggaaatgctgagactttctctggcacgaaatcttgctcgggcaattataagagaaggctcactggaaggttcctgagaactgcttcaatgtggtatctttgtatggcaatgtatatagatttttttaaaagaataaatgttgttttgcaaatgt

SEQ ID NO: 161343 - DNA, 2233 bp, Homo sapiens
  Payload ID: 11507
  Gene Symbol: NUP85
  Gene Name: nucleoporin 85kDa
  ENST ID: ENST00000581104
  CDS Start-End: 43-552
attggcgtccgagcgacttctaggagcctggggttcggcgctatggaggagctcgatggcgagccaacagtcactttgattccaggcgtgaattccaagaagaaccaaatgtattttgactggggtccaggggagatgctggtatgtgaaacctccttcaacaaaaaagaaaaatcagagatggtgccaagttgcccctttatctatatcatccgtaaggatgtagatgtttactctcaaatcttgagaaaactcttcaatgaatcccatggaatctttctgggcctccagagaattgacgaagagttgactggaaaatccagaaaatctcaattggttcgagtgagtaaaaactaccgatcagtcatcagagcatgtatggaggaaatgcaccaggttgcaattgctgctaaagatccagccaatggccgccagttcagcagccaggtctccattttgtcagcaatggagctcatctggaacctgtgtgagattctttttattgaagtggccccaggtgaccatcttggtgctgcagggccggctggatgaggcccgacagatgctctccaaggaagccgatgccagccccgcctctgcaggcatatgccgaatcatgggggacctgatgaggacaatgcccattcttagtcccgggaacacccagacactgacagagctggagctgaagtggcagcactggcacgaggaatgtgagcggtacctccaggacagcacattcgccaccagccctcacctggagtctctcttgaagattatgctgggagacgaagctgccttgttagagcagaaggaacttctgagtaattggtatcatttcctagtgactcggctcttgtactccaatcccacagtaaaacccattgatctgcactactatgcccagtccagcctggacctgtttctgggaggtgagagcagcccagaacccctggacaacatcttgttggcagcctttgagtttgacatccatcaagtaatcaaagagtgcagcatcgccctgagcaactggtggtttgtggcccacctgacagacctgctggaccactgcaagctcctccagtcacacaacctctatttcggttccaacatgagagagttcctcctgctggagtacgcctcgggactgtttgctcatcccagcctgtggcagctgggggtcgattactttgattactgccccgagctgggccgagtctccctggagctgcacattgagcggatacctctgaacaccgagcagaaagccctgaaggtgctgcggatctgtgagcagcggcagatgactgaacaagttcgcagcatttgtaagatcttagccatgaaagccgtccgcaacaatcgcctgggttctgccctctcttggagcatccgtgctaaggatgccgcctttgccacgctcgtgtcagacaggttcctcagggattactgtgagcgaggctgcttttctgatttggatctcattgacaacctggggccagccatgatgctcagtgaccgactgacattcctgggaaagtatcgcgagttccaccgtatgtacggggagaagcgttttgccgacgcagcttctctccttctgtccttgatgacgtctcggattgcccctcggtctttctggatgactctgctgacagacgccttgccccttttggaacagaaacaggtgaaggttgcagcagcagtggttttctttgcttgtcagtccctgctagagcttagttgtatagctgttgccgatgtgcgtgtttcctcctttgtcgttctgcctgtgcgcgtgtattccccttagcgccctctctgggattccagactcacacaggaaacaaacactgcttgatttgaaatgaggtattcgtatacaaagcacactattgcgaagggtatgaaaggaagaacgtccgaacatgggcccctgccccaaccaatgcaggccagggctgggggcagccaagcaaggcaggctctcttccctaggtgattttctcagcagaacagacttatgagttgatgcggtgtctggaggacttgacgtcaagaagacctgtgcatggagaatctgataccgagcagctccaggatgatgacatagagaccaccaaggtggaaatgctgagactttctctggcacgaaatcttgctcgggcaattataagagaaggctcactggaaggttcctgagaactgcttcaatgtggtatctttgtatggc

SEQ ID NO: 161344 - DNA, 373 bp, Homo sapiens
  Payload ID: 11507
  Gene Symbol: NUP85
  Gene Name: nucleoporin 85kDa
  ENST ID: ENST00000579838
  CDS Start-End: 1-295
gtccttgatgacgtctcggattgcccctcggtctttctggatgactctgctgacagacgccttgccccttttggaacagaaacaggtgaaggtgattttctcagcagaacagacttatgagttgatgcggtgtctggaggacttgacgtcaagaagacctgtgcatggagaatctgataccgagcagctccaggatgatgacatagagaccaccaaggtggaaatgctgagactttctctggcacgaaatcttgctcgggcaattataagagaaggctcactggaaggttcctgagaactgcttcaatgtggtatctttgtatggcaatgtatatagatttttttaaaagaataaatgttgttttgcaaatgt

SEQ ID NO: 161345 - DNA, 553 bp, Homo sapiens
  Payload ID: 11507
  Gene Symbol: NUP85
  Gene Name: nucleoporin 85kDa
  ENST ID: ENST00000583569
  CDS Start-End: 193-553
agacgcccaggcggagtcttgtctcgcagccagctctgagcgggaggcctgagcgggaagcattggcgtccgagcgacttctaggagcctggggttcggcgctatggaggagctcgatggcgagccaacagtcactatttctatgccttattttactagttgattccaggcgtgaattccaagaagaaccaaatgtattttgactggggtccaggggagatgctggtatgtgaaacctccttcaacaaaaaagaaaaatcagagatggtgccaagttgcccctttatctatatcatccgtaaggatgtagatgtttactctcaaatcttgagaaaactcttcaatgaatcccatggaatctttctgggcctccagagaattgacgaagagttgactggaaaatccagaaaatctcaattggttcgagtgagtaaaaactaccgatcagtcatcagagcatgtatggaggaaatgcaccaggttgcaattgctgctaaagatccagccaatggccgccagttcagcagccaggtctccattttgtcagcaatgg

SEQ ID NO: 161346 - DNA, 1890 bp, Homo sapiens
  Payload ID: 11507
  Gene Symbol: NUP85
  Gene Name: nucleoporin 85kDa
  ENST ID: ENST00000579298
  CDS Start-End: 43-1878
attggcgtccgagcgacttctaggagcctggggttcggcgctatggaggagctcgatggcgagccaacagtcactttgattccaggcgtgaattccaagaagaaccaaatgtattttgactggggtccaggggagatgctggtatgtgaaacctccttcaacaaaaaagaaaaatcagagatggtgccaagttgcccctttatctatatcatccgtaaggatgtagatgtttactctcaaatcttgagaaaactcttcaatgaatcccatggaatctttctgggcctccagagaattgacgaagagttgactggaaaatccagaaaatctcaattggttcgagtgagtaaaaactaccgatcagtcatcagagcatgtatggaggaaatgcaccaggttgcaattgctgctaaagatccagccaatggccgccagttcagcagccaggtctccattttgtcagcaatggagctcatctggaacctgtgtgagattctttttattgaagtggccccagctggccctctcctcctccatctccttgactgggtccggctccatgtgtgcgaggtggacagtttgtcggcagatgttctgggcagtgagaatccaagcaaacatgacagcttctggaacttgcccgggaacacccagacactgacagagctggagctgaagtggcagcactggcacgaggaatgtgagcggtacctccaggacagcacattcgccaccagccctcacctggagtctctcttgaagattatgctgggagacgaagctgccttgttagagcagaaggaacttctgagtaattggtatcatttcctagtgactcggctcttgtactccaatcccacagtaaaacccattgatctgcactactatgcccagtccagcctggacctgtttctgggaggtgagagcagcccagaacccctggacaacatcttgttggcagcctttgagtttgacatccatcaagtaatcaaagagtgcagcatcgccctgagcaactggtggtttgtggcccacctgacagacctgctggaccactgcaagctcctccagtcacacaacctctatttcggttccaacatgagagagttcctcctgctggagtacgcctcgggactgtttgctcatcccagcctgtggcagctgggggtcgattactttgattactgccccgagctgggccgagtctccctggagctgcacattgagcggatacctctgaacaccgagcagaaagccctgaaggtgctgcggatctgtgagcagcggcagatgactgaacaagttcgcagcatttgtaagatcttagccatgaaagccgtccgcaacaatcgcctgggttctgccctctcttggagcatccgtgctaaggatgccgcctttgccacgctcgtgtcagacaggttcctcagggattactgtgagcgaggctgcttttctgatttggatctcattgacaacctggggccagccatgatgctcagtgaccgactgacattcctgggaaagtatcgcgagttccaccgtatgtacggggagaagcgttttgccgacgcagcttctctccttctgtccttgatgacgtctcggattgcccctcggtctttctggatgactctgctgacagacgccttgccccttttggaacagaaacaggtgattttctcagcagaacagacttatgagttgatgcggtgtctggaggacttgacgtcaagaagacctgtgcatggagaatctgataccgagcagctccaggatgatgacatagagaccaccaaggtggaaatgctgagactttctctggcacgaaatcttgctcgggcaattataagagaaggctcactggaaggttcctgagaactgcttcaa

SEQ ID NO: 161347 - DNA, 922 bp, Homo sapiens
  Payload ID: 11507
  Gene Symbol: NUP85
  Gene Name: nucleoporin 85kDa
  ENST ID: ENST00000578830
  CDS Start-End: 1-301
tctttttattgaagtggccccagctggccctctcctcctccatctccttgactgggtccggctccatgtgtgcgaggtggacagtttgtcggcagatgttctgggcagtgagaatccaagcaaacatgacagcttctggaacttgattatgctgggagacgaagctgccttgttagagcagaaggaacttctgagtaattggtatcatttcctagtgactcggctcttgtactccaatcccacagtaaaacccattgatctgcactactatgcccagcctggacctgtttctgggaggtgagagcagcccagaacccctggacaacatcttgttggcagcctttgagtttgacatccatcaagtaatcaaagagtgcagcatcgccctgagcaactggtggtttgtggcccacctgacagacctgctggaccactgcaagctcctccagtcacacaacctctatttcggttccaacatgagagagttcctcctgctggagtacgcctcgggactgtttgctcatcccagcctgtggcagctgggggtcgattactttgattactgccccgagctgggccgagtctccctggagctgcacattgagcggatacctctgaacaccgagcagaaagccctgaaggtgctgcggatctgtgagcagcggcagatgactgaacaaggtgagctggccctgctcccagcctactgtctgtgggacgcaggagtcaggggatcctgaggtcacactttatgcctaccccagccatcctcctcctcacgagccacactggagacgtggggctgtggacgccaagagttcgcagcatttgtaagatcttagccatgaaagccgtccgcaacaatcgcctgggttctgccctctcttggagcatccgtgctaaggatgccgcctttgccacg

SEQ ID NO: 161348 - DNA, 583 bp, Homo sapiens
  Payload ID: 11507
  Gene Symbol: NUP85
  Gene Name: nucleoporin 85kDa
  ENST ID: ENST00000580879
  CDS Start-End: 1-60
ttgttggcagcctttgagtttgacatccatcaagtaatcaaagagtgcagcttcctctgaagacgggccagttccttgctgtctggcaagaggaaacagctggggtgcacttcactgggagttgggcaagatgtcggcagtttcctggtgcccttcaagtcctccaaaagtatcgagctaaaagcatcgccctgagcaactggtggtttgtggcccacctgacagacctgctggaccactgcaagctcctccagtcacacaacctctatttcggttccaacatgagagagttcctcctgctggagtacgcctcgggactgtttgctcatcccagcctgtggcagctgggggtcgattactttgattactgccccgagctgggccgagtctccctggagctgcacattgagcggatacctctgaacaccgagcagaaagccctgaaggtgctgcggatctgtgagcagcggcagatgactgaacaagttcgcagcatttgtaagatcttagccatgaaagccgtccgcaacaatcgcctgggttctgccctctcttggagcatccgtgctaaggatgccgcctt

SEQ ID NO: 161349 - DNA, 2010 bp, Homo sapiens
  Payload ID: 11507
  Gene Symbol: NUP85
  Gene Name: nucleoporin 85kDa
  ENST ID: ENST00000579324
  CDS Start-End: 298-1932
ctgagcgggaagcattggcgtccgagcgacttctaggagcctggggttcggcgctatggaggagctcgatggcgagccaacagtcactaaaaatcagagatggtgccaagttgcccctttatctatatcatccgtaaggatgtagatgtttactctcaaatcttgagaaaactcttcaatgaatcccatggaatctttctgggcctccagagaattgacgaagagttgactggaaaatccagaaaatctcaattggttcgagtgagtaaaaactaccgatcagtcatcagagcatgtatggaggaaatgcaccaggttgcaattgctgctaaagatccagccaatggccgccagttcagcagccaggtctccattttgtcagcaatggagctcatctggaacctgtgtgagattctttttattgaagtggccccagctggccctctcctcctccatctccttgactgggtccggctccatgtgtgcgaggtggacagtttgtcggcagatgttctgggcagtgagaatccaagcaaacatgacagcttctggaacttggtgaccatcttggtgctgcagggccggctggatgaggcccgacagatgctctccaaggaagccgatgccagccccgcctctgcaggcatatgccgaatcatgggggacctgatgaggacaatgcccattcttagtcccgggaacacccagacactgacagagctggagctgaagtggcagcactggcacgaggaatgtgagcggtacctccaggacagcacattcgccaccagccctcacctggagtctctcttgaagattatgctgggagacgaagctgccttgttagagcagaaggaacttctgagtaattggtatcatttcctagtgactcggctcttgtactccaatcccacagtaaaacccattgatctgcactactatgcccagtccagcctggacctgtttctgggaggtgagagcagcccagaacccctggacaacatcttgttggcagcctttgagtttgacatccatcaagtaatcaaagagtgcagcatcgccctgagcaactggtggtttgtggcccacctgacagacctgctggaccactgcaagctcctccagtcacacaacctctatttcggttccaacatgagagagttcctcctgctggagtacgcctcgggactgtttgctcatcccagcctgtggcagctgggggtcgattactttgattactgccccgagctgggccgagtctccctggagctgcacattgagcggatacctctgaacaccgagcagaaagccctgaaggtgctgcggatctgtgagcagcggcagatgactgaacaagttcgcagcatttgtaagatcttagccatgaaagccgtccgcaacaatcgcctgggttctgccctctcttggagcatccgtgctaaggatgccgcctttgccacgctcgtgtcagacaggttcctcagggattactgtgagcgaggctgcttttctgatttggatctcattgacaacctggggccagccatgatgctcagtgaccgactgacattcctgggaaagtatcgcgagttccaccgtatgtacggggagaagcgttttgccgacgcagcttctctccttctgtccttgatgacgtctcggattgcccctcggtctttctggatgactctgctgacagacgccttgccccttttggaacagaaacaggtgattttctcagcagaacagacttatgagttgatgcggtgtctggaggacttgacgtcaagaagacctgtgcatggagaatctgataccgagcagctccaggatgatgacatagagaccaccaaggtggaaatgctgagactttctctggcacgaaatcttgctcgggcaattataagagaaggctcactggaaggttcctgagaactgcttcaatgtggtatctttgtatggcaatgtatatagatttttttaaaagaataaatgttgttttgcaaatgt

SEQ ID NO: 161350 - DNA, 528 bp, Homo sapiens
  Payload ID: 11507
  Gene Symbol: NUP85
  Gene Name: nucleoporin 85kDa
  ENST ID: ENST00000579900
  CDS Start-End: 1-345
gccatgatgctcagtgaccgactgacattcctgggaaagtatcgcgagttccaccgtatgtacggggagaagcgttttgccgacgcagcttctctccttctgtccttgatgacgtctcggattgcccctcggtctttctggatgactctgctgacagacgccttgccccttttggaacagaaacaggtgattttctcagcagaacagacttatgagttgatgcggtgtctggaggacttgacgtcaagaagacctgtgcatggagaatctgataccgagcagctccagtatggccctttggtattgctttcttttacatcgataatttgctggaagctactatgaatgatgatgacatagagaccaccaaggtggaaatgctgagactttctctggcacgaaatcttgctcgggcaattataagagaaggctcactggaaggttcctgagaactgcttcaatgtggtatctttgtatggcaatgtatatagatttttttaaaagaataaatgttgttttgcaaatgta

SEQ ID NO: 161351 - DNA, 817 bp, Homo sapiens
  Payload ID: 11507
  Gene Symbol: NUP85
  Gene Name: nucleoporin 85kDa
  ENST ID: ENST00000579557
  CDS Start-End: 1-817
gtgaccatcttggtgctgcagggccggctggatgaggcccgacagatgctctccaaggaagccgatgccagccccgcctctgcaggcatatgccgaatcatgggggacctgatgaggacaatgcccattcttagtcccgggaacacccagacactgacagagctggagctgaagtggcagcactggcacgaggaatgtgagcggtacctccaggacagcacattcgccaccagccctcacctggagtctctcttgaagattatgctgggagacgaagctgccttgttagagcagaaggaacttctgagtaattggtatcatttcctagtgactcggctcttgtactccaatcccacagtaaaacccattgatctgcactactatgcccagtccagcctggacctgtttctgggaggtgagagcagcccagaacccctggacaacatcttgttggcagcctttgagtttgacatccatcaagtaatcaaagagtgcagtttcggttccaacatgagagagttcctcctgctggagtacgcctcgggactgtttgctcatcccagcctgtggcagctgggggtcgattactttgattactgccccgagctgggccgagtctccctggagctgcacattgagcggatacctctgaacaccgagcagaaagccctgaaggtgctgcggatctgtgagcagcggcagatgactgaacaagttcgcagcatttgtaagatcttagccatgaaagccgtccgcaacaatcgcctgggttctgccctctcttggagcatccgtgctaaggatgccgcctttgcca

SEQ ID NO: 161352 - DNA, 907 bp, Homo sapiens
  Payload ID: 11507
  Gene Symbol: NUP85
  Gene Name: nucleoporin 85kDa
  ENST ID: ENST00000583070
  CDS Start-End: 1-907
ggcacgaggaatgtgagcggtacctccaggacagcacattcgccaccagccctcacctggagtctctcttgaagtccagcctggacctgtttctgggaggtgagagcagcccagaacccctggacaacatcttgttggcagcctttgagtttgacatccatcaagtaatcaaagagtgcagcatcgccctgagcaactggtggtttgtggcccacctgacagacctgctggaccactgcaagctcctccagtcacacaacctctatttcggttccaacatgagagagttcctcctgctggagtacgcctcgggactgtttgctcatcccagcctgtggcagctgggggtcgattactttgattactgccccgagctgggccgagtctccctggagctgcacattgagcggatacctctgaacaccgagcagaaagccctgaaggtgctgcggatctgtgagcagcggcagatgactgaacaagttcgcagcatttgtaagatcttagccatgaaagccgtccgcaacaatcgcctgggttctgccctctcttggagcatccgtgctaaggatgccgcctttgccacgctcgtgtcagacaggttcctcagggattactgtgagcgaggctgcttttctgatttggatctcattgacaacctggggccagccatgatgctcagtgaccgactgacattcctgggaaagtatcgcgagttccaccgtatgtacggggagaagcgttttgccgacgcagcttctctccttctgtccttgatgacgtctcggattgcccctcggtctttctggatgactctgctgacagacgccttgccccttttggaacagaaacaggtgattttctcagcagaacagacttatgagttgatgcggtgtctggaggactt

SEQ ID NO: 161353 - DNA, 575 bp, Homo sapiens
  Payload ID: 11507
  Gene Symbol: NUP85
  Gene Name: nucleoporin 85kDa
  ENST ID: ENST00000583877
  CDS Start-End: 1-575
cttgactgggtccggctccatgtgtgcgaggtggacagtttgtcggcagatgttctgggcagtgagaatccaagcaaacatgacagcttctggaacttgggccggctggatgaggcccgacagatgctctccaaggaagccgatgccagccccgcctctgcaggcatatgccgaatcatgggggacctgatgaggacaatgcccattcttagtcccgggaacacccagacactgacagagctggagctgaagtggcagcactggcacgaggaatgtgagcggtacctccaggacagcacattcgccaccagccctcacctggagtctctcttgaagattatgctgggagacgaagctgccttgttagagcagaaggaacttctgagtaattggtatcatttcctagtgactcggctcttgtactccaatcccacagtaaaacccattgatctgcactactatgcccagtccagcctggacctgtttctgggaggtgagagcagcccagaacccctggacaacatcttgttggcagcctttgagtttgacatccatcaagtaatcaaagagtgcag

SEQ ID NO: 161354 - DNA, 300 bp, Homo sapiens
  Payload ID: 11507
  Gene Symbol: NUP85
  Gene Name: nucleoporin 85kDa
  ENST ID: ENST00000584155
  CDS Start-End: 1-57
ctgacagacgccttgccccttttggaacagaaacagcagaacagacttatgagttgatgcggtgtctggaggacttgacgtcaagaagacctgtgcatggagaatctgataccgagcagctccaggatgatgacatagagaccaccaaggtggaaatgctgagactttctctggcacgaaatcttgctcgggcaattataagagaaggctcactggaaggttcctgagaactgcttcaatgtggtatctttgtatggcaatgtatatagatttttttaaaagaataaatgttgttttgca

SEQ ID NO: 161355 - DNA, 388 bp, Homo sapiens
  Payload ID: 11507
  Gene Symbol: NUP85
  Gene Name: nucleoporin 85kDa
  ENST ID: ENST00000578987
  CDS Start-End: 1-140
gggagaagcgttttgccgacgcagcttctctccttctgtccttgatgacgtctcggattgcccctcggtctttctggatgactctgctgacagacgccttgccccttttggaacagaaacagaacagacttatgagttgatgcggtgtctggaggacttgacgtcaagaagacctgtgcatggagaatctgataccgagcagctccaggatgatgacatagagaccaccaaggtggaaatgctgagactttctctggcacgaaatcttgctcgggcaattataagagaaggctcactggaaggttcctgagaactgcttcaatgtggtatctttgtatggcaatgtatatagatttttttaaaagaataaatgttgttttgcaaatgt

SEQ ID NO: 161356 - DNA, 2194 bp, Homo sapiens
  Payload ID: 11508
  Gene Symbol: NUP88
  Gene Name: nucleoporin 88kDa
  ENST ID: ENST00000225696
  CDS Start-End: 1-2090
ttggcctcggcggagagcttttcctgtgggacggagaagacagctccttcttagtcgttcgccttcggggccccagcggcggcggcgaagagcccgccctgtcccagtaccagagattgctttgcataaatccacccctgtttgaaatctatcaagtcttgttaagcccaacacaacatcatgtagcacttataggaataaaaggacttatggtattagaattacctaaaagatgggggaagaattctgaatttgaaggtggaaaatcaacagtgaattgtagtaccactccagttgcggagagatttttcaccagttccacctctctgactctaaagcatgctgcatggtatccaagtgaaatcctggatccccacgtagtgctgttaacatcagacaacgtaatcagaatttactcactacgtgagccgcagacacccactaacgtgataatactttcagaagccgaagaggaaagtctagtactcaataaaggaagggcgtataccgcatctctaggagagacagcagttgcatttgactttgggccattggcagcagtcccaaagactctatttggacaaaacggcaaagatgaagtagtggcatacccactgtacatcttatatgaaaatggagagactttcctgacatacatcagtctgttacacagccctggaaatattggaaagctgttgggtccattgcccatgcatcctgcggctgaagataactatggttatgatgcgtgtgctgtactctgcttaccctgtgtccccaatatcttagtgatcgctactgaatcaggaatgctgtatcactgtgtcgtgctagaaggggaagaagaagatgaccacacgtcagaaaagtcctgggattccaggattgacctcattccttctctgtatgtgtttgaatgtgttgagttggagcttgctttgaaactggcatctggagaggatgacccttttgattctgacttttcttgtccagtcaaacttcatagagatcccaagtgtccttcaagatatcactgtactcatgaagctggtgtacatagtgttgggctaacttggattcataaacttcacaaatttcttggatcagatgaagaagataaggatagtttacaggaactctctacagaacagaaatgctttgttgaacacatcctttgtacgaagccattgccctgcaggcagccagctccaattcgaggattttggattgtacctgacattctgggacccacgatgatctgcatcaccagtacctatgaatgcctcatatggccgttattaagtacagtccatccagcgtctcctcccctgctttgtactcgagaagatgttgaagtggcagagtctcccctccgtgttctggctgaaaccccagattcctttgaaaagcatattagaagcattttgcaacgtagtgttgccaatccagcatttttgaattgttttactcagctaaggaaaataaaggtagaaactttgtttttaagagcttctgaaaaggacatagcccctcctcctgaagaatgccttcagctcctcagcagagccacccaggtgttcagagagcagtacattctcaaacaggacttggcaaaggaggagattcagcggagggtcaaattattatgtgaccaaaaaaagaaacaactagaagatctcagttattgtcgagaagagaggaaaagtctgcgggaaatggctgagcgtttagctgacaaatatgaggaagctaaagaaaaacaagaggatatcatgaacaggatgaaaaaactacttcacagttttcactctgagctcccagttctctctgatagtgagcgagacatgaagaaagaattacagctgatacctgatcaacttcgacatttgggcaatgccatcaaacaggttactatgaaaaaggattatcaacagcaaaagatggagaaggtgttgagtcttccaaaacccaccattattctcagtgcctaccagcgaaagtgcattcagtccatcctgaaagaggagggtgaacatataagggaaatggtgaagcaaatcaatgatatccgcaatcatgtaaacttctgacaccaccaggagctgactcacacctgaactgaacaccattgaaggcttaaacccatattgtaaaacaggtagaattatctaatttataaaaaggtgttttgatg

SEQ ID NO: 161357 - DNA, 2916 bp, Homo sapiens
  Payload ID: 11508
  Gene Symbol: NUP88
  Gene Name: nucleoporin 88kDa
  Uniprot ID: Q99567
  ENST ID: ENST00000573584
  CDS Start-End: 511-2736
acagacccctgggaggtgtactttccgggtgcagaccgcgaatggatcgcagcgtattctgggaagtgttgttttatcgaccggccccacgtggagacagatttaggcatccaagcgaaatgcgtgaggccagcccgacctgcactgagggaggtaagtcttgagggaaagttctggatgcctgggtttacccagatggaggtgtccaataggcaattagatacacaagtctcaggctctccccaggtgctagatttccagcagcaccaccattatgttgacttctcgtcccgcccccttgggcttcagaaataatggtgattggctttcccttggtgacgcccctgcttggtgggctggcctcgccttcgccccccgacctggcacgagcctctcgagcttccgggccgtctgctcggtgattggccgaaacagtgagtggacggccgcggattggctgtgctcagcggcgggctgagcaactggagtgaggggagcagttgggccaagatggcggccgccgagggaccggtgggcgacggcgagctgtggcagacctggcttcctaaccacgtcgtgttcttgcggctccgggagggactgaaaaaccagagtccaaccgaagctgagaaaccagcttcttcgtcgttgccttcgtcgccgccgccgcagttgctgacgagaaacgtggtctttggcctcggcggagagcttttcctgtgggacggagaagacagctccttcttagtcgttcgccttcggggccccagcggcggcggcgaagagcccgccctgtcccagtaccagagattgctttgcataaatccacccctgtttgaaatctatcaagtcttgttaagcccaacacaacatcatgtagcacttataggaataaaaggacttatggtattagaattacctaaaagatgggggaagaattctgaatttgaaggtggaaaatcaacagtgaattgtagtaccactccagttgcggagagatttttcaccagttccacctctctgactctaaagcatgctgcatggtatccaagtgaaatcctggatccccacgtagtgctgttaacatcagacaacgtaatcagaatttactcactacgtgagccgcagacacccactaacgtgataatactttcagaagccgaagaggaaagtctagtactcaataaaggaagggcgtataccgcatctctaggagagacagcagttgcatttgactttgggccattggcagcagtcccaaagactctatttggacaaaacggcaaagatgaagtagtggcatacccactgtacatcttatatgaaaatggagagactttcctgacatacatcagtctgttacacagccctggaaatattggaaagctgttgggtccattgcccatgcatcctgcggctgaagataactatggttatgatgcgtgtgctgtactctgcttaccctgtgtccccaatatcttagtgatcgctactgaatcaggaatgctgtatcactgtgtcgtgctagaaggggaagaagaagatgaccacacgtcagaaaagtcctgggattccaggattgacctcattccttctctgtatgtgtttgaatgtgttgagttggagcttgctttgaaactggcatctggagaggatgacccttttgattctgacttttcttgtccagtcaaacttcatagagatcccaagtgtccttcaagatatcactgtactcatgaagctggtgtacatagtgttgggctaacttggattcataaacttcacaaatttcttggatcagatgaagaagataaggatagtttacaggaactctctacagaacagaaatgctttgttgaacacatcctttgtacgaagccattgccctgcaggcagccagctccaattcgaggattttggattgtacctgacattctgggacccacgatgatctgcatcaccagtacctatgaatgcctcatatggccgttattaagtacagtccatccagcgtctcctcccctgctttgtactcgagaagatgttgaagtggcagagtctcccctccgtgttctggctgaaaccccagattcctttgaaaagcatattagaagcattttgcaacgtagtgttgccaatccagcatttttgaaagcttctgaaaaggacatagcccctcctcctgaagaatgccttcagctcctcagcagagccacccaggtgttcagagagcagtacattctcaaacaggacttggcaaaggaggagattcagcggagggtcaaattattatgtgaccaaaaaaagaaacaactagaagatctcagttattgtcgagaagagaggaaaagtctgcgggaaatggctgagcgtttagctgacaaatatgaggaagctaaagaaaaacaagaggatatcatgaacaggatgaaaaaactacttcacagttttcactctgagctcccagttctctctgatagtgagcgagacatgaagaaagaattacagctgatacctgatcaacttcgacatttgggcaatgccatcaaacaggttactatgaaaaaggattatcaacagcaaaagatggagaaggtgttgagtcttccaaaacccaccattattctcagtgcctaccagcgaaagtgcattcagtccatcctgaaagaggagggtgaacatataagggaaatggtgaagcaaatcaatgatatccgcaatcatgtaaacttctgacaccaccaggagctgactcacacctgaactgaacaccattgaaggcttaaacccatattgtaaaacaggtagaattatctaatttataaaaaggtgttttgatgacctttggtgtggttcatctttttaaatatgttgttttataataattgagtaaatgcttttatttaaaatttggaa

SEQ ID NO: 161358 - DNA, 771 bp, Homo sapiens
  Payload ID: 11508
  Gene Symbol: NUP88
  Gene Name: nucleoporin 88kDa
  ENST ID: ENST00000572809
  CDS Start-End: 312-771
taataacattctatactgctgtgtagcatttgacataatcataacttaattatttataattattttgtgtcttttttttttttttgagatggagtttcgctcttgttgcccaggctggagtgcaatggcgccatctcggctcaccgcaacctccaccttccagtttcaagcgattcttctgcctcagccccccccgcgagtagctgggattacagagattgctttgcataaatccacccctgtttgaaatctatcaagtcttgttaagcccaacacaacatcatgtagcacttataggaataaaaggacttatggtattagaattacctaaaagatgggggaagaattctgaatttgaaggtggaaaatcaacagtgaattgtagtaccactccagttgcggagagatttttcaccagttccacctctctgactctaaagcatgctgcatggtatccaagtgaaatcctggatccccacgtagtgctgttaacatcagacaacgtaatcagaatttactcactacgtgagccgcagacacccactaacgtgataatactttcagaagccgaagaggaaagtctagtactcaataaaggaagggcgtataccgcatctctaggagagacagcagttgcatttgactttgggccattggcagcagtcccaaagactctatttggacaaaacggcaaagatgaagtagtggcatacccactgtacatcttatatgaaaatggagagactttcctgacatacatcagtctgttac

SEQ ID NO: 161359 - DNA, 615 bp, Homo sapiens
  Payload ID: 11508
  Gene Symbol: NUP88
  Gene Name: nucleoporin 88kDa
  ENST ID: ENST00000572290
  CDS Start-End: 12-398
gttgggccaagatggcggccgccgagggaccggtgggcgacggcgagctgtggcagacctggcttcctaaccacgtcgtgttcttgcggctccgggagggactgaaaaaccagagtccaaccgaagctgagaaaccagcttcttcgtcgttgccttcgtcgccgccgccgcagttgctgacgagaaacgtggtctttggcctcggcggagagcttttcctgtgggacggagaagacagctccttcttagtcgttcgccttcggggccccagcggcggcggcgaagagcccgccctgtcccagtaccaggctggagtgcaatggcgccatctcggctcaccgcaacctccaccttccagtttcaagcgattcttctgcctcagccccccccgcgagtagctgggattacagagattgctttgcataaatccacccctgtttgaaatctatcaagtcttgttaagcccaacacaacatcatgtagcacttataggaataaaaggacttatggtattagaattacctaaaagatgggggaagaattctgaatttgaaggtggaaaatcaacagtgaattgtagtaccactccagttgcggagagatttttcaccagtt

SEQ ID NO: 161360 - DNA, 800 bp, Homo sapiens
  Payload ID: 11508
  Gene Symbol: NUP88
  Gene Name: nucleoporin 88kDa
  ENST ID: ENST00000576708
  CDS Start-End: 1-332
atattagaagcattttgcaacgtagtgttgccaatccagcatttttgaaagcttctgaaaaggacatagcccctcctcctgaagaatgccttcagctcctcagcagagccacccaggtgttcagagagcagtacattctcaaacaggacttggcaaaggaggagattcagcggagggtcaaattattatgtgaccaaaaaaagaaacaactagaagatctcagttattgtcgagaagagaggaaaagtctgcgggaaatggctgagcgtttagctgacaaatatgaggaagctaaagaaaaacaagaggatatcatgaacagttctctctgatagtgagcgagacatgaagaaagaattacagctgatacctgatcaacttcgacatttgggcaatgccatcaaacaggttactatgaaaaaggattatcaacagcaaaagatggagaaggtgttgagtcttccaaaacccaccattattctcagtgcctaccagcgaaagtgcattcagtccatcctgaaagaggacatcaacagcagaccggcaattgcgcttttgatctaaaggaaagatgaaagcctggatcctgcaatacactgagattatagaaaactgcaaagcaaaccaaatccaggttgctctaacttaaattccgcaatgctagtcaggcagattgctccaacctgagagctgtgagttcaggtggggaggttcacattcactgtgattaactagctagctcctttctctgtcacaattacctggaatacccaaggcagactatgacaagggtcaggtga

SEQ ID NO: 161361 - DNA, 2741 bp, Homo sapiens
  Payload ID: 11509
  Gene Symbol: NUP93
  Gene Name: nucleoporin 93kDa
  Uniprot ID: Q8N1F7
  ENST ID: ENST00000308159
  CDS Start-End: 122-2581
gggagcggccagccttggccaatcaggaagcgggggagagcggcgcgagaagcggcggccgcgtcctcaagccggcacctgagcggcggagacggctgtagcacaaggatctgcatctccaatggatactgaggggtttggtgagctccttcagcaagctgaacagcttgctgctgagactgagggcatctcagagcttccccatgtggaacggaacttacaggagatccagcaggcgggagagcgcctgcgttcccgtaccctaacacgcacgtcccaggagacggcagatgtcaaggcgtcagttctcctcgggtctcggggacttgacatatcccacatctcccagcgattggagagtctgagtgcagccaccacctttgagcctcttgagcctgtgaaggacactgacattcagggcttcctgaagaatgagaaggacaatgccctgctgtctgccatcgaagagtcccggaagaggaccttcggcatggctgaggagtaccatcgggagtcaatgttggttgagtgggagcaagtgaaacagcgaattctgcacacactgctggcatcaggagaagacgcccttgactttactcaagaaagcgagccaagctacatcagtgatgtgggaccccctggtcgaagctctctggataacatcgagatggcctatgcgcggcaaatttatatctataatgagaaaattgtaaatggacacctgcagcctaacctggtggacctttgtgcttccgtcgcagagctcgatgataagagcatttccgacatgtggaccatggtaaaacaaatgacagacgtgttgttgacaccggcaacggatgccctgaagaaccgcagcagcgtggaagtgcgcatggagtttgtcaggcaggccttggcgtaccttgagcagagttataagaattacacccttgtgactgtctttggaaatttgcatcaggcccagctgggcggggtgcctgggacttaccaattggttcgaagtttcctgaacattaaactgccagctcccttgcctggactacaggatggagaggtggaaggccatcctgtgtgggcgctaatttactactgcatgcgctgtggagacctgcttgccgcttcacaggtagttaatcgagcccagcaccagctgggagagtttaaaacctggttccaggagtacatgaacagcaaggacagaagattgtccccagctacggaaaacaagctccggctgcattaccgtagggccctcaggaacaatacagatccctacaagcgggccgtgtactgtatcattggcagatgtgacgtcaccgacaaccagagtgaagtggcggacaaaactgaggattacctgtggctgaagttgaaccaagtgtgttttgacgacgatggcaccagctccccacaagacaggctcactctctcacagttccagaagcagttgttggaagactatggcgagtcccactttacggtgaaccagcaacccttcctctacttccaagtcctgttcctgacagcgcagtttgaagcagcagttgcctttcttttccgcatggagcggctgcgctgccatgctgtccatgtagcactggtgctgtttgagctgaagctgcttttaaagtcctctggacagagtgctcagctcctcagccacgagcctggtgaccctccttgcttgcggcggctgaacttcgtgcggctcctcatgctgtacacccggaagtttgagtccacggacccaagggaggccctccagtacttctatttcctcagggatgagaaagatagtcaaggagaaaacatgtttctgcgctgtgtgagtgagcttgtgattgaaagccgagagttcgatatgattcttgggaaactagagaatgacggaagtagaaagcctggagtcatagataagtttactagtgacacaaagcctattatcaacaaagttgcttctgtggcagaaaataaaggactgtttgaagaggcagcaaagctgtatgaccttgccaagaatgctgacaaggtactggagctgatgaacaaactgctgagccctgtcgtcccccagatcagtgccccgcaatccaacaaggagaggctgaagaacatggcactctccattgccgaacggtatagggctcaaggaataagcgcaaataaatttgtggactccacgttctatcttcttttggacttgatcaccttttttgacgagtatcatagtggtcatattgatagagcttttgatatcattgagcgcttgaagctggtgcccctgaatcaggaaagtgtggaagagagagtggctgccttcagaaatttcagtgatgaaatcaggcacaacctctcagaagtgcttcttgccaccatgaacatcttgttcacacagtttaagaggctcaaggggacaagtccatcctcgtcatccaggccccagcgagtcatcgaggaccgcgactctcaactccgaagtcaagcccgcactctgattacctttgctggaatgataccataccgaacgtctggggacaccaatgcgaggctggtgcagatggaggtcctcatgaattaagtgccatgctttgtgggagtctgggtcggcacactgtcagtacatcaggcacatgggcccactaggctggggtttctggttttgtttctgttgtgttttgttttggtttctgtattatgtatttttgtcaacgccaataaatttctttgatttgtatttc

SEQ ID NO: 161362 - DNA, 8257 bp, Homo sapiens
  Payload ID: 11509
  Gene Symbol: NUP93
  Gene Name: nucleoporin 93kDa
  Uniprot ID: Q8N1F7
  ENST ID: ENST00000542526
  CDS Start-End: 490-2580
attgcaaagaatcgatttctgagatgagacaatgagatgtggtttgcattttgtaaagatggaggaaacctctaacactgaccctgtatgggagatgactcaattatccacgccttggtacagttgcaaattatttccctttgtctgaagtgggtggatgccagcgccttcatcagagctccttaatttaatgtatggaaaatgtctcagccaccatttttaacaattagctgtatcatggtcgaggtgagctgtattctgaaggcagctgcaaggccatttcatttacattaggttccatggcacaggagctttgttactgtaaaactaagaaaatgaatttgcacattgtatagaagagttctttaggaaggtggagaatattcccagaaagaaaatggaattcttttgtctacaggcttcctgaagaatgagaaggacaatgccctgctgtctgccatcgaagagtcccggaagaggaccttcggcatggctgaggagtaccatcgggagtcaatgttggttgagtgggagcaagtgaaacagcgaattctgcacacactgctggcatcaggagaagacgcccttgactttactcaagaaagcgagccaagctacatcagtgatgtgggaccccctggtcgaagctctctggataacatcgagatggcctatgcgcggcaaatttatatctataatgagaaaattgtaaatggacacctgcagcctaacctggtggacctttgtgcttccgtcgcagagctcgatgataagagcatttccgacatgtggaccatggtaaaacaaatgacagacgtgttgttgacaccggcaacggatgccctgaagaaccgcagcagcgtggaagtgcgcatggagtttgtcaggcaggccttggcgtaccttgagcagagttataagaattacacccttgtgactgtctttggaaatttgcatcaggcccagctgggcggggtgcctgggacttaccaattggttcgaagtttcctgaacattaaactgccagctcccttgcctggactacaggatggagaggtggaaggccatcctgtgtgggcgctaatttactactgcatgcgctgtggagacctgcttgccgcttcacaggtagttaatcgagcccagcaccagctgggagagtttaaaacctggttccaggagtacatgaacagcaaggacagaagattgtccccagctacggaaaacaagctccggctgcattaccgtagggccctcaggaacaatacagatccctacaagcgggccgtgtactgtatcattggcagatgtgacgtcaccgacaaccagagtgaagtggcggacaaaactgaggattacctgtggctgaagttgaaccaagtgtgttttgacgacgatggcaccagctccccacaagacaggctcactctctcacagttccagaagcagttgttggaagactatggcgagtcccactttacggtgaaccagcaacccttcctctacttccaagtcctgttcctgacagcgcagtttgaagcagcagttgcctttcttttccgcatggagcggctgcgctgccatgctgtccatgtagcactggtgctgtttgagctgaagctgcttttaaagtcctctggacagagtgctcagctcctcagccacgagcctggtgaccctccttgcttgcggcggctgaacttcgtgcggctcctcatgctgtacacccggaagtttgagtccacggacccaagggaggccctccagtacttctatttcctcagggatgagaaagatagtcaaggagaaaacatgtttctgcgctgtgtgagtgagcttgtgattgaaagccgagagttcgatatgattcttgggaaactagagaatgacggaagtagaaagcctggagtcatagataagtttactagtgacacaaagcctattatcaacaaagttgcttctgtggcagaaaataaaggactgtttgaagaggcagcaaagctgtatgaccttgccaagaatgctgacaaggtactggagctgatgaacaaactgctgagccctgtcgtcccccagatcagtgccccgcaatccaacaaggagaggctgaagaacatggcactctccattgccgaacggtatagggctcaaggaataagcgcaaataaatttgtggactccacgttctatcttcttttggacttgatcaccttttttgacgagtatcatagtggtcatattgatagagcttttgatatcattgagcgcttgaagctggtgcccctgaatcaggaaagtgtggaagagagagtggctgccttcagaaatttcagtgatgaaatcaggcacaacctctcagaagtgcttcttgccaccatgaacatcttgttcacacagtttaagaggctcaaggggacaagtccatcctcgtcatccaggccccagcgagtcatcgaggaccgcgactctcaactccgaagtcaagcccgcactctgattacctttgctggaatgataccataccgaacgtctggggacaccaatgcgaggctggtgcagatggaggtcctcatgaattaagtgccatgctttgtgggagtctgggtcggcacactgtcagtacatcaggcacatgggcccactaggctggggtttctggttttgtttctgttgtgttttgttttggtttctgtattatgtatttttgtcaacgccaataaatttctttgatttgtatttcttttcaacattcttttattttctttttttttttctttgaaattttgtttacatttttatttgtgtaatgggaaataccgtcactagctcttgggccagggaatgagaggctatgtagatattcattatttggttaaattgaccttaattaattaaaaatctacccaaaatgagccaggaaacaaagcctttgggagttacttttatttagatataatattccatatagcagagtcacgattcattttcacatttttatttgaatgtgaaagtcaacctcagccttagaagatgtaagatttgtgtgtgaaatatcaagcactccatgtcctcctctagagagtgtgacttaagtccagatggtccaagaccatcccccaaatcatcagctctgattgcaggattcatcagtttgccgttctgttgcaatcccagtggagataaaagcatagacctagaaaaagccttaagaaggaaggttgcaagtgcccccagcttgcacttgaggaaggggtaaaccttgccactgcactcctctgtagctgctccactgtgagttgactgctcggccttgtacacacccctcctagaaagacgtttaagcccctatttcccttctctggtggtcagttcctctgctcagacgacccccttccccactcattaaggtaattggccaggcaggctcatgggtcacgtgctgagtctgcaatgtacagaatccagaccaccacatggcatcagcaccatgggtgtttgctccctgagcagtagttgtcacccatcatttgctctgtttcccccaccatcagtcccaaagccctagactaaaccagagagcaaattaggtcgtgtttgttcctgaatgggccaactggagccttgagacagtgggcagtggtctgctctgctggtttgatggacggctccctgaggtagactctttcccagcagaatgttaagatccccaaagggtccccaaaggtgcctttgcttgtagggagaagtttctgtcttgtcacagggtgtggtcatccccactgtctcccagttgttaaaataattgttaccttttcttttgggaagaaataatctgtagataatggaaccaactgctgcttatcggtaggattccatgttccaggaaggatgcggcctgagggtcagtggagctgtgttctgccttcctcctctagtcccatcttgtcaccctggaggactgtcttcaattgagctttactagaaagtcttgaaacatgagccctgcagaggccttgatttagcaagttgtgccctgcttatatgtgctgatttaagctaatcaaatgatttaatagtgctttttaaaaaagagtactcctggccgggtggggtggctcacacctgtaatcctagcactttgggaggccaaggcaggtgatcacctgagatcaggagttcaagaccagcctggccaacattgtgacaccccgtctatactaaaaatacaaaaattagccgggcatggtggcaggcacctgtaatcccagctacacaggaagctgagacagaattgcttgaacccgggaggcgaaggttgcagtgatctgagatcatgccactgcactccagcctgggtgaaagagcgatactccgtctcaaaaaaataaagagtactctggccgagtgcagtggctcacgcctgtaaccccagcactttgggaggccaaggcaggcagttcgcttgaggtaaggggtttgagaccagtctggccaacatggggaaaccccgtttctactaaaaatacaaaaatcagctgggcatggtggcaggcgcctgtaatcccagctactcgggaggctgaggcaggagaatcacttgaacccaagaggcggaggttgcagtgagccgagcttatgccactgcactccagcctaggcgatggagtgaggctctgattcaaaaataaaaataagagtactctgtggacttttcataaagtgcaacttagtgctttgtttttctaatactagattttacttgcagatagaaatataacaatgccacaaatgagaaggctcaagttgtttaaatacatgtttgctcctggcttacctcttcttcactatcccatgagaatcgtggatttgcctttccttgcatcctgcagttctacttgtctcagagagaactgcacaccagccctgcatccaggggatgaggttctttgacctgtagatgggtcctaaaatgagaagggagagaagcagccagaccttgagctgctctgctaggggagctgtgagttgggagaaaagtggtcactggttggcagttaaggacttgctgagagagacatttgtaggagaaagaagataagtaggttcataccagaagggccaggactcggatggagcaaatcccagttcttgtcctacaagctgattgtgcgattgagcacaggcctctggaattgtgcagagatgagaaacaggctgaatttgcaaggccacaacatcaggttgtcatgtacccatcattacagcttatgcccagaagtcctgaccctgtgacaggttattatcttaaaaactcatcttcagcccactttttcagagaactaactctttccttagatgttgggccaggatttcactatttacccagagaaactaagagaaagtggcactaggcgtcttgtcttccagatgtgagatttcgatctttctaatgaaattgggggcactttgagactgtcagggtttgttcctgtctcagaatggctcataataaactcactgaaacactcaaaggaaagtactgacttgatctggatccttttcagaggcctggagatttaatttcacagattctcttcttttggctcaacaacaacagcaacaaaaaactctttgactccccaacttcagagggaaaactgaagcgaaactggtgagctctgccacggcagatgccttcctttttcactcacgagctgggcgggctcatcaaagagcaggaagtgcccattttacactggggccaggatgcagacccagctcctgtcctccgcgaacttacagtctaattagagcctcttaaggacaatttggcagccactgttaactcttgatgcatcatttaaatcctagaacaggcagctttaaagcaaagaactacagacttttccgcagtgtccagcatttgctgaccaaaaaaaacctgagggtgatttttctctctttgaatttttacccttgcctgcacctagccagaacccttaatactaaatttgcagttatatgcagctctgccaacgccttcctgctttagactggatctctactatcctttttctctactaggcaccagaacctttgtctagttcattaggtggttcacatcacttgccaaatttccagcatgccactcaggaagtgacttgagcatgctgaatgctgagtcagaaaatgaacccctgggctggcgggttgacccaggcctgacaaagtcttggcagtccccacactgactgcgaactctcccttagcctcagtcagctgggaaaggaattgagccctgtgtcagcaaattgggagaaagtgttacatataaaattcttgatggaaatgtgtgttttatatcagaattgagcttttgttcctgcatctcagaaataccaggaagaagtcagcatctcattaaacaggagttgtctaaactgtggaagaaaatatcccccattctttatcctacgctgaatccacaagtcttcccatcttccaccatcttctgacagttccataatatattggtatccctcacagggcagggacaggaaggaaataaatctttctgccacttgtttccaaccgaaaaggaaaaaagttaaaaattactaaagtgttctgaaaagagatttcaagtggtctgtgctgcttttttgccttgttacgcacataacttgtgactggctagataggccacgtgtatttatcagccaagattccattgcagcagatgatttcaaaacctctttgtgtgctgggccgtgctaggtagctggaatatctgaggtaaattaagcactgatttgttcccagagttgtgcataattctttaaaagtaggctcgtttttttcgtttttttgtccaggatcacctaagtgaagtactcgtggttctaagttgctaacccagggaaagaggatattttcctgtcctaaccttggtttttgaaatatgcttctcctgtgtgccctctctggggtatctggcccacagtagattgctcagcagatatttgaatgagcagatgctttgctttgtcctcctgtgccaggctcctccccacatcctctggatcagctccacgtgcctagattcagactccgtgattcaccgtgggggcccttaataggcattcagtctgaaagaaggtggaggagaataatgtctcccaggatcaaatgagactcagggctgttccttcaaagacagaaacttgcagagctgcacagcagcagggaaacattgagaagggggtggaaatttgatgtactgtgaataatgaaggccggatctttaaaaagaaaaagggacggggtgctggcagaaacccagctctgcgctagcacaatctgtacacctggctgcctttgcccttgagcttctatttcttggggatggggagggcaaaaaagtttgccccagacactggcttctgtttgaacaggaagtggggagtcagtgatcccagaggggacttcagcatcaggacatatgctttggtggcctcagcagacctggcctaggcaggctttcaggtggcacccaggggctttatggcctgcaggtaaggccccttcatccgggtcagacttagcaaataaaaatataggacactcaattaagtttgcattttggataaacagtgaagaagttcctagtgtaagtatgtcccagttctatgtggctgccctacctgggcttgcctctgctggtactagctgcccagagaccttcaggcctgccacgggctgccgggagctctctagtggaattggattaccctgattttgtgcattgtttgtgcttttgtgggcatcggaaatgactgagatacgcagttttgaagagctaggcaggcagctgagcgggataatgtgggccccagttgacctcagtggctgtcatctactgtgtttttcaaccaggaatttcaaatactgtgtattttagaaagaaaggaaagagccaaagtacagccttttctcacttgatcagtaacttgtgttagaaactcagtgggggagaattctttgcgtttttcagttgactgattattttcctttttttcttttttgcttttctcgagtcactctgtgtggtgcttgtgggagaagggagagggtgggagagcgttggtggatgtgttctgcatgttcctttctgtacagtaacttctgcatttactctgtttaggatggttccttcaccactatccctgtctgtagccagtaaatttctggaatattc

SEQ ID NO: 161363 - DNA, 592 bp, Homo sapiens
  Payload ID: 11509
  Gene Symbol: NUP93
  Gene Name: nucleoporin 93kDa
  ENST ID: ENST00000568656
  CDS Start-End: 58-592
ttccttacctgctttgagtctgtggaaggagacaggaattctggatctgcatctccaatggatactgaggggtttggtgagctccttcagcaagctgaacagcttgctgctgagactgagggcatctcagagcttccccatgtggaacggaacttacaggagatccagcaggcgggagagcgcctgcgttcccgtaccctaacacgcacgtcccaggagacggcagatgtcaaggcgtcagttctcctcgggtctcggggacttgacatatcccacatctcccagcgattggagagtctgagtgcagccaccacctttgagcctcttgagcctgtgaaggacactgacattcagggcttcctgaagaatgagaaggacaatgccctgctgtctgccatcgaagagtcccggaagaggaccttcggcatggctgaggagtaccatcgggagtcaatgttggttgagtgggagcaagtgaaacagcgaattctgcacacactgctggcatcaggagaagacgcccttgactttactcaagaaagcgagccaagctacatcagtgatgtgggaccccctggtcgaagctctctgg

SEQ ID NO: 161364 - DNA, 630 bp, Homo sapiens
  Payload ID: 11509
  Gene Symbol: NUP93
  Gene Name: nucleoporin 93kDa
  ENST ID: ENST00000569863
  CDS Start-End: 254-630
gcgagaagcggcggccgcgtcctcaagccggcacctgagcggcggagacggctgtagcacaaggtcagttctcctcgggtctcggggacttgacatatcccacatctcccagcgattggagagtctgagtgcagccaccacctttgagcctcttgagcctgtgaaggacactgacattcagggcttcctgaagaatgagaaggacaatgccctgctgtctgccatcgaagagtcccggaagaggaccttcggcatggctgaggagtaccatcgggagtcaatgttggttgagtgggagcaagtgaaacagcgaattctgcacacactgctggcatcaggagaagacgcccttgactttactcaagaaagcgagccaagctacatcagtgatgtgggaccccctggtcgaagctctctggataacatcgagatggcctatgcgcggcaaatttatatctataatgagaaaattgtaaatggacacctgcagcctaacctggtggacctttgtgcttccgtcgcagagctcgatgataagagcatttccgacatgtggaccatggtaaaacaaatgacagacgtgttgttgacaccggcaacggatgccctgaagaaccgcagcagcgtgga

SEQ ID NO: 161365 - DNA, 584 bp, Homo sapiens
  Payload ID: 11509
  Gene Symbol: NUP93
  Gene Name: nucleoporin 93kDa
  ENST ID: ENST00000568283
  CDS Start-End: 465-584
aaatgcaccctggtaaatagagtggcagcatgttgttgcagtgcctctgaaagacaaggtcttggtttgtttgaaaatttgagataaatttggaagcagttaactcatttgatagaagaagtacttgattcttctgagaattgttcagatttgtatcttgccattctaatattttttcttttaaaaatgtattgggtggggcagaatttgcttaaatatttaaatagttggttattgggatttttgtgaacttcttctttaagtagcaagtagtgtggtctttaggatttttaaaggagatacatgtgaagtgcaaaattcttgtatgaggtggaatatgaaaatagaatttattttatttactaaaaccagatccttctttgggattgcagggcttcctgaagaatgagaaggacaatgccctgctgtctgccatcgaagagtcccggaagaggaccttcggcatggctgaggagtaccatcgggagtcaatgttggttgagtgggagcaagtgaaacagcgaattctgcacacactgctggcatcaggagaagacgcccttgactttactcaagaaagcgag

SEQ ID NO: 161366 - DNA, 442 bp, Homo sapiens
  Payload ID: 11509
  Gene Symbol: NUP93
  Gene Name: nucleoporin 93kDa
  ENST ID: ENST00000566678
  CDS Start-End: 1-397
ggagatccagcaggcgggagagcgcctgcgttcccgtaccctaacacgcacgtcccaggagacggcagatgtcaaggcgtcagttctcctcgggtctcggggacttgacatatcccacatctcccagcgattggagagtctgagtgcagccaccacctttgagcctcttgagcctgtgaaggacactgacattcagggcttcctgaagaatgagaaggacaatgccctgctgtctgccatcgaagagtcccggaagaggaccttcggcatggctgaggagtaccatcgggagtcaatgttggttgagtgggagcaagtgaaacagcgaattctgcacacactgctggcatcaggagaagacgcccttgactttactcaagaaagcgaggtagcttgaatgcaaaagataaactactgttaataaaaacatgaagtcaaagaa

SEQ ID NO: 161367 - DNA, 315 bp, Homo sapiens
  Payload ID: 11509
  Gene Symbol: NUP93
  Gene Name: nucleoporin 93kDa
  ENST ID: ENST00000567081
  CDS Start-End: 266-315
attcggctcctcttggcattggagttctggatttacccatgactaagattcctttgaaactctgacccagtgcagcattgcaaagaatcgatttctgagatgagacaatgagatgtggtttgcattttgtaaagatggaggaaacctctaacactgaccctgtatgggagatgactcaattatccacgccttgggcttcctgaagaatgagaaggacaatgccctgctgtctgccatcgaagagtcccggaagaggaccttcggcatggctgaggagtaccatcgggagtcaatgttggttgagtgggagcaagt

SEQ ID NO: 161368 - DNA, 604 bp, Homo sapiens
  Payload ID: 11509
  Gene Symbol: NUP93
  Gene Name: nucleoporin 93kDa
  ENST ID: ENST00000567641
  CDS Start-End: 135-604
agacaaatgcaccctggtaaatagagtggcagcatgttgttgcagtgcctctgaaagacaagggcttcctgaagaatgagaaggacaatgccctgctgtctgccatcgaagagtcccggaagaggaccttcggcatggctgaggagtaccatcgggagtcaatgttggttgagtgggagcaagtgaaacagcgaattctgcacacactgctggcatcaggagaagacgcccttgactttactcaagaaagcgagccaagctacatcagtgatgtgggaccccctggtcgaagctctctggataacatcgagatggcctatgcgcggcaaatttatatctataatgagaaaattgtaaatggacacctgcagcctaacctggtggacctttgtgcttccgtcgcagagctcgatgataagagcatttccgacatgtggaccatggtaaaacaaatgacagacgtgttgttgacaccggcaacggatgccctgaagaaccgcagcagcgtggaagtgcgcatggagtttgtcaggcaggccttggcgtaccttgagcagagttataagaattacacccttgtgactgtctttggaaatttgcatca

SEQ ID NO: 161369 - DNA, 797 bp, Homo sapiens
  Payload ID: 11509
  Gene Symbol: NUP93
  Gene Name: nucleoporin 93kDa
  ENST ID: ENST00000563858
  CDS Start-End: 109-797
cttggccaatcaggaagcgggggagagcggcgcgagaagcggcggccgcgtcctcaagccggcacctgagcggcggagacggctgtagcacaaggatctgcatctccaatggatactgaggggtttgagctcgatgataagagcatttccgacatgtggaccatggtaaaacaaatgacagacgtgttgttgacaccggcaacggatgccctgaagaaccgcagcagcgtggaagtgcgcatggagtttgtcaggcaggccttggcgtaccttgagcagagttataagaattacacccttgtgactgtctttggaaatttgcatcaggcccagctgggcggggtgcctgggacttaccaattggttcgaagtttcctgaacattaaactgccagctcccttgcctggactacaggatggagaggtggaaggccatcctgtgtgggcgctaatttactactgcatgcgctgtggagacctgcttgccgcttcacaggtagttaatcgagcccagcaccagctgggagagtttaaaacctggttccaggagtacatgaacagcaaggacagaagattgtccccagctacggaaaacaagctccggctgcattaccgtagggccctcaggaacaatacagatccctacaagcgggccgtgtactgtatcattggcagatgtgacgtcaccgacaaccagagtgaagtggcggacaaaactgaggattacctgtggctgaagttgaaccaagtgtgttttgacgacgatggcaccagctccccacaagacaggctcactct

SEQ ID NO: 161370 - DNA, 635 bp, Homo sapiens
  Payload ID: 11509
  Gene Symbol: NUP93
  Gene Name: nucleoporin 93kDa
  ENST ID: ENST00000563486
  CDS Start-End: 1-421
ggagctgatgaacaaactgctgagccctgtcgtcccccagatcagtgccccgcaatccaacaaggagaggctgaagaacatggcactctccattgccgaacggtatagggctcaaggaataagcgcaaataaatttgtggactccacgttctatcttcttttggacttgatcaccttttttgacgagtatcatagtggtcatattgatagagcttttgatatcattgagcgcttgaagctggtgcccctgaatcaggaaagtgtggaagagagagtggctgccttcagaaatttcagtgatgaagtaagttccttcttcctgagttgtggaattcctttttccccacttccaccaaaagctttttcttttcctgtacctaacagctttaagaattctagttacagtaactatccagactgagttttccagagtggttccctttcagataccttggcctggcttttctgtgagtgcatacatccccatcagattattgtctgaattcctaattgagaaaatacagtcacttcagtgattgacatgttcttgggagaaacaggtttctggttgatctgtgaagtctggtttaattcttctattatccgcttgtgctagagggtattttagtgcttaa

SEQ ID NO: 161371 - DNA, 589 bp, Homo sapiens
  Payload ID: 11509
  Gene Symbol: NUP93
  Gene Name: nucleoporin 93kDa
  ENST ID: ENST00000566315
  CDS Start-End: 136-589
aggaagcgggggagagcggcgcgagaagcggcggccgcgtcctcaagccggcacctgagcggcggagacggctgtagcacaaggttgcatgatctttgaagttgaaagagacaatatttgggatctgcatctccaatggatactgaggggtttggtgagctccttcagcaagctgaacagcttgctgctgagactgagggcatctcagagcttccccatgtggaacggaacttacaggagatccagcaggcgggagagcgcctgcgttcccgtaccctaacacgcacgtcccaggagacggcagatgtcaaggcgtcagttctcctcgggtctcggggacttgacatatcccacatctcccagcgattggagagtctgagtgcagccaccacctttgagcctcttgagcctgtgaaggacactgacattcagggcttcctgaagaatgagaaggacaatgccctgctgtctgccatcgaagagtcccggaagaggaccttcggcatggctgaggagtaccatcgggagtcaatgttggttgagtgggagcaagtgaaacagcgaattctgcacacactgctggcatcag

SEQ ID NO: 161372 - DNA, 583 bp, Homo sapiens
  Payload ID: 11509
  Gene Symbol: NUP93
  Gene Name: nucleoporin 93kDa
  ENST ID: ENST00000562496
  CDS Start-End: 175-583
actgcactccagcctgggcaccattgagcactgagtgaacgagactccgtctgcagtcccggcacctcgggaggccgaggttggcggatcactcgcggttaggggctggagaccggcccggccaacacagcgaaaccccgtctccaccaaaaccagtcaggatctgcatctccaatggatactgaggggtttggtgagctccttcagcaagctgaacagcttgctgctgagactgagggcatctcagagcttccccatgtggaacggaacttacaggagatccagcaggcgggagagcgcctgcgttcccgtaccctaacacgcacgtcccaggagacggcagatgtcaaggcgtcagttctcctcgggtctcggggacttgacatatcccacatctcccagcgattggagagtctgagtgcagccaccacctttgagcctcttgagcctgtgaaggacactgacattcagggcttcctgaagaatgagaaggacaatgccctgctgtctgccatcgaagagtcccggaagaggaccttcggcatggctgaggagtaccatcgggagtcaatgttggttgagt

SEQ ID NO: 161373 - DNA, 410 bp, Homo sapiens
  Payload ID: 11509
  Gene Symbol: NUP93
  Gene Name: nucleoporin 93kDa
  ENST ID: ENST00000569322
  CDS Start-End: 1-255
ttggacttgatcaccttttttgacgagtatcatagtggtcatattgatagagcttttgatatcattgagcgcttgaagctggtgcccctgaatcaggaaagtgtggaagagagagtggctgccttcagaaatttcagtgatgaacaactccgaagtcaagcccgcactctgattacctttgctggaatgataccataccgaacgtctggggacaccaatgcgaggctggtgcagatggaggtcctcatgaattaagtgccatgctttgtgggagtctgggtcggcacactgtcagtacatcaggcacatgggcccactaggctggggtttctggttttgtttctgttgtgttttgttttggtttctgtattatgtatttttgtcaacgccaataaatttctttgatttgt

SEQ ID NO: 161374 - DNA, 2875 bp, Homo sapiens
  Payload ID: 11509
  Gene Symbol: NUP93
  Gene Name: nucleoporin 93kDa
  Uniprot ID: Q8N1F7
  ENST ID: ENST00000564887
  CDS Start-End: 630-2720
atgcaagatgtcggaagtcatcaaagattcacatcagagtaattgcagtggtttgggttggggaaaaaaagtatcatagcattccttgcctacatgttgtctctccccctcttaaatcttaacttggtacagtccgttaacaataaaatacccttctgtaacctataaactgttactcccatcagtttgtgctttcaaactgatggctgacttctctgaatttgtgtagcgcacaacgaatggtgatgctgtgctccgggggctgcagtgcaccctttttaaagggaccctgcaatctcattgtttaatttgactctttagtgcttcagtcacatcagcacttgcagaggggttgttcttttcctttttcttctttctctctttttctcttctctctgtccttctccccacccccatccctcaattcaggcagtttggggtgggaaaaacttgagcactggttccgacagagctcatctcatataagaaggtttggaagagctgcagtgatcgacagcatcgaccgttctgtaactccttaaatttaagagctgcagggcttcctgaagaatgagaaggacaatgccctgctgtctgccatcgaagagtcccggaagaggaccttcggcatggctgaggagtaccatcgggagtcaatgttggttgagtgggagcaagtgaaacagcgaattctgcacacactgctggcatcaggagaagacgcccttgactttactcaagaaagcgagccaagctacatcagtgatgtgggaccccctggtcgaagctctctggataacatcgagatggcctatgcgcggcaaatttatatctataatgagaaaattgtaaatggacacctgcagcctaacctggtggacctttgtgcttccgtcgcagagctcgatgataagagcatttccgacatgtggaccatggtaaaacaaatgacagacgtgttgttgacaccggcaacggatgccctgaagaaccgcagcagcgtggaagtgcgcatggagtttgtcaggcaggccttggcgtaccttgagcagagttataagaattacacccttgtgactgtctttggaaatttgcatcaggcccagctgggcggggtgcctgggacttaccaattggttcgaagtttcctgaacattaaactgccagctcccttgcctggactacaggatggagaggtggaaggccatcctgtgtgggcgctaatttactactgcatgcgctgtggagacctgcttgccgcttcacaggtagttaatcgagcccagcaccagctgggagagtttaaaacctggttccaggagtacatgaacagcaaggacagaagattgtccccagctacggaaaacaagctccggctgcattaccgtagggccctcaggaacaatacagatccctacaagcgggccgtgtactgtatcattggcagatgtgacgtcaccgacaaccagagtgaagtggcggacaaaactgaggattacctgtggctgaagttgaaccaagtgtgttttgacgacgatggcaccagctccccacaagacaggctcactctctcacagttccagaagcagttgttggaagactatggcgagtcccactttacggtgaaccagcaacccttcctctacttccaagtcctgttcctgacagcgcagtttgaagcagcagttgcctttcttttccgcatggagcggctgcgctgccatgctgtccatgtagcactggtgctgtttgagctgaagctgcttttaaagtcctctggacagagtgctcagctcctcagccacgagcctggtgaccctccttgcttgcggcggctgaacttcgtgcggctcctcatgctgtacacccggaagtttgagtccacggacccaagggaggccctccagtacttctatttcctcagggatgagaaagatagtcaaggagaaaacatgtttctgcgctgtgtgagtgagcttgtgattgaaagccgagagttcgatatgattcttgggaaactagagaatgacggaagtagaaagcctggagtcatagataagtttactagtgacacaaagcctattatcaacaaagttgcttctgtggcagaaaataaaggactgtttgaagaggcagcaaagctgtatgaccttgccaagaatgctgacaaggtactggagctgatgaacaaactgctgagccctgtcgtcccccagatcagtgccccgcaatccaacaaggagaggctgaagaacatggcactctccattgccgaacggtatagggctcaaggaataagcgcaaataaatttgtggactccacgttctatcttcttttggacttgatcaccttttttgacgagtatcatagtggtcatattgatagagcttttgatatcattgagcgcttgaagctggtgcccctgaatcaggaaagtgtggaagagagagtggctgccttcagaaatttcagtgatgaaatcaggcacaacctctcagaagtgcttcttgccaccatgaacatcttgttcacacagtttaagaggctcaaggggacaagtccatcctcgtcatccaggccccagcgagtcatcgaggaccgcgactctcaactccgaagtcaagcccgcactctgattacctttgctggaatgataccataccgaacgtctggggacaccaatgcgaggctggtgcagatggaggtcctcatgaattaagtgccatgctttgtgggagtctgggtcggcacactgtcagtacatcaggcacatgggcccactaggctggggtttctggttttgtttctgttgtgttttgttttggtttctgtattatgtatttttgtcaacgccaataaatttctttgatttgt

SEQ ID NO: 161375 - DNA, 477 bp, Homo sapiens
  Payload ID: 11509
  Gene Symbol: NUP93
  Gene Name: nucleoporin 93kDa
  ENST ID: ENST00000563405
  CDS Start-End: 1-354
agtgacacaaagcctattatcaacaaagttgcttctgtggcagaaaataaaggactgtttgaagaggcagcaaagctgtatgaccttgccaagaatgctgacaaggtactggagctgatgaacaaactgctgagccctgtcgtcccccagatcagtgccccgcaatccaacaaggagaggctgaagaacatggcactctccattgccgaacggtatagggctcaaggaataagcgcaaataaatttgtggactccacgttctatcttcttttggacttgatcaccttttttgacgagtatcatagtggtcatattgatagagcttttgatgtaagtttcaggaaaggtgtttgaagtgcaggttaatgtacaccctcgaaaattcaaaacacttcatggaatttacttaaaacaaaggagctgttgccagtatgtttgttgtataaagaaagacaagtacaatcctgggacttaaaa

SEQ ID NO: 161376 - DNA, 2834 bp, Homo sapiens
  Payload ID: 11509
  Gene Symbol: NUP93
  Gene Name: nucleoporin 93kDa
  ENST ID: ENST00000569842
  CDS Start-End: 97-2739
ggaagcgggggagagcggcgcgagaagcggcggccgcgtcctcaagccggcacctgagcggcggagacggctgtagcacaaggatctgcatctccaatggatactgaggggtttggtgagctccttcagcaagctgaacagcttgctgctgagactgagggcatctcagagcttccccatgtggaacggaacttacaggagatccagcaggcgggagagcgcctgcgttcccgtaccctaacacgcacgtcccaggagacggcagatgtcaaggcgtcagttctcctcgggtctcggggacttgacatatcccacatctcccagcgattggagagtctgagtgcagccaccacctttgagcctcttgagcctgtgaaggacactgacattcagggcttcctgaagaatgagaaggacaatgccctgctgtctgccatcgaagagtcccggaagaggaccttcggcatggctgaggagtaccatcgggagtcaatgttggttgagtgggagcaagtgaaacagcgaattctgcacacactgctggcatcaggagaagacgcccttgactttactcaagaaagcgagccaagctacatcagtgatgtgggaccccctggtcgaagctctctggataacatcgagatggcctatgcgcggcaaatttatatctataatgagaaaattgtaaatggacacctgcagcctaacctggtggacctttgtgcttccgtcgcagagctcgatgataagagcatttccgacatgtggaccatggtaaaacaaatgacagacgtgttgttgacaccggcaacggatgccctgaagaaccgcagcagcgtggaagtgcgcatggagtttgtcaggcaggccttggcgtaccttgagcagagttataagaattacacccttgtgactgtctttggaaatttgcatcaggcccagctgggcggggtgcctgggacttaccaattggttcgaagtttcctgaacattaaactgccagctcccttgcctggactacaggatggagaggtggaaggccatcctgtgtgggcgctaatttactactgcatgcgctgtggagacctgcttgccgcttcacaggtagttaatcgagcccagcaccagctgggagagtttaaaacctggttccaggagtacatgaacagcaaggacagaagattgtccccagctacggaaaacaagctccggctgcattaccgtagggccctcaggaacaatacagatccctacaagcgggccgtgtactgtatcattggcagatgtgacgtcaccgacaaccagagtgaagtggcggacaaaactgaggattacctgtggctgaagttgaaccaagtgtgttttgacgacgatggcaccagctccccacaagacaggctcactctctcacagttccagaagcagttgttggaagactatggcgagtcccactttacggtgaaccagcaacccttcctctacttccaagtcctgttcctgacagcgcagtttgaagcagcagttgcctttcttttccgcatggagcggctgcgctgccatgctgtccatgtagcactggtgctgtttgagctgaagctgcttttaaagtcctctggacagagtgctcagctcctcagccacgagcctggtgaccctccttgcttgcggcggctgaacttcgtgcggctcctcatgctgtacacccggaagtttgagtccacggacccaagggaggccctccagtacttctatttcctcagggatgagaaagatagtcaaggagaaaacatgtttctgcgctgtgtgagtgagcttgtgattgaaagccgagagttcgatatgattcttgggaaactagagaatgacggaagtagaaagcctggagtcatagataagtttactagtgacacaaagcctattatcaacaaagttgcttctgtggcagaaaataaaggactgtttgaagaggcagcaaagctgtatgaccttgccaagaatgctgacaaggtactggagctgatgaacaaactgctgagccctgtcgtcccccagatcagtgccccgcaatccaacaaggagaggctgaagaacatggcactctccattgccgaacggtatagggctcaaggaataagcgcaaataaatttgtggactccacgttctatcttcttttggacttgatcaccttttttgacgagtatcatagtggtcatattgatagagcttttgatatcattgagcgcttgaagctggtgcccctgaatcaggaaagtgtggaagagagagtggctgccttcagaaatttcagtgatgaaatcaggcacaacctctcagaagtgcttcttgccaccatgaacatcttgttcacacagtttaagaggctcaaggggacaagtccatcctcgtcatccaggccccagcgagtcatcgaggaccgcgactctggcctggctctgttgcccaggctggaatgcaatgacacgatctcagctcactgcaacctctacctcttgggctcaagccaccctcccacctcaccctcccaagtagctgggactacagcaactccgaagtcaagcccgcactctgattacctttgctggaatgataccataccgaacgtctggggacaccaatgcgaggctggtgcagatggaggtcctcatgaattaagtgccatgctttgtgggagtctgggtcggcacactgtcagtacatcaggcacatgggcccactaggctggggtttctggttttgtttctgttgtgttttgttttggtttctgtattatgtatttttgtcaacgccaataaatttctttgatttgtatttc

SEQ ID NO: 161377 - DNA, 6973 bp, Homo sapiens
  Payload ID: 11510
  Gene Symbol: NUP98
  Gene Name: nucleoporin 98kDa
  Uniprot ID: P52948
  ENST ID: ENST00000324932
  CDS Start-End: 422-5824
aaccgcggcggcgaggggcgggactccacggccctctcaccgctcctaccctgtgcctccccgaactccttctgcccctcctcttccctctcgccccttcccccttcagttcggtttcaaaagacgcgttgcccaatgaataacagggtcgacccagagtggcggccgcgtccaccaattcgcggacggcgagggcggagcgtccgcaacgagcctctgacgccgggcggcgtgtgacgcagtcgggccctctgcgcgctgcgcccgaagcggcggtcggtggcaggggtggtagcggcggcggcgacggtttcgtgggggccgcgcgctgctctgtgagcggcgggtggcagcaggggactcctgacacttccccttccccaccgaaccgcgctttctgaaacaaagactcattttgaagatgtttaacaaatcatttggaacaccctttgggggtggcacaggtggctttggcacaacttcaacatttggacagaatactggctttggcactactagtggaggggcatttggaacatctgcatttggttctagcaacaatactggaggcctctttggaaattcacagactaaaccaggaggattgtttggaaccagttcatttagccagccagctacctccacaagcactggctttgggtttggtacgtcaacaggaacagcaaataccttgtttggaactgcaagcacagggaccagtctcttctcatcccaaaacaatgcctttgcacaaaataaaccaactggctttggcaattttggaaccagtactagcagtggaggactctttggaaccacaaataccacctctaatccttttggcagcacatctggctccctctttgggccaagtagttttacagctgctcctactgggactactattaaatttaaccctccaactggtacagatactatggtcaaagctggagttagcactaacataagtaccaagcaccagtgtattactgctatgaaagaatatgaaagcaagtcactagaggaacttcgtttagaggattatcaggctaacaggaagggcccacagaaccaggtgggagcaggtaccacaactggcttgtttgggtcttctccagccacttccagcgcaacaggactcttcagctcctccaccactaattcaggctttgcatatggtcagaacaaaactgcctttggaactagtacaactggatttggaacaaatccaggtggtctctttggccaacagaatcagcagactaccagcctcttcagcaaaccatttggccaggctacaaccacccagaacactggcttttcctttggtaataccagcaccataggacagccaagcaccaacaccatgggattatttggagtaacccaagcctcacagcctggaggtctttttgggacagctacaaacaccagcactgggacagcatttggaacaggaacaggtctctttgggcagaccaatactggatttggtgctgttggttcgaccctgtttggcaataacaagcttactacatttggaagcagcacaaccagtgcaccttcatttggtacaaccagtggcgggctctttggttttggcacaaataccagtgggaatagtatttttggaagtaaaccagcacctgggactcttggaactgggcttggtgcaggatttggaacagctcttggtgctggacaggcatctttgtttgggaacaaccaacctaagattggagggcctcttggtacaggagcctttggggcccctggatttaatactacgacagccactttgggctttggagccccccaggccccagtagctttgacagatccaaatgcttctgctgcccagcaggctgttctccagcagcacatcaatagtctaacatactcaccttttggagactctcctctcttccggaatccgatgtcagaccctaagaagaaggaagagagattgaaaccaacaaatccagcagcccagaaggctcttactacacctactcattataaactgacaccccgccctgccactagagtccggccaaaggctttacaaacaacaggcacagccaagtcacatctctttgatgggctggatgacgatgaaccatccctagccaatggagcattcatgcccaagaagagcattaagaagttggttttgaagaaccttaataatagcaatctcttttctcctgttaatcgtgattcagaaaatctagcttcaccatctgaatatccagaaaatggagagagatttagtttcctaagcaaacctgttgatgagaatcaccagcaggatggagatgaagattcccttgtttcacatttttatactaaccctattgccaaacctattcctcaaaccccagaaagtgctggaaataaacacagcaacagcaacagtgtggatgataccattgttgcattaaacatgcgtgctgctttgcgaaatgggctggaaggaagcagtgaagaaacgtcttttcatgatgagtcacttcaggatgaccgagaagaaatagaaaataattcttaccatatgcacccagcaggtattattctcactaaggttggttactatactattccatctatggatgaccttgctaaaattaccaatgaaaaaggagagtgcattgtctctgatttcactattggtcggaaaggttatggttcaatctattttgaaggagatgtgaatttgacaaatctaaatttggatgatattgtgcatatccggaggaaagaagtagttgtctacttagatgataaccaaaaaccacctgtgggtgaagggctaaataggaaggctgaagttacattggatggagtttggccaacagataaaacatctcgttgtttaataaagagcccagatcgccttgctgatatcaactatgaaggaagattggaagcagtttcaaggaaacagggagctcaattcaaagaataccggcctgaaactggttcttgggtgtttaaggtctcccatttttctaagtatggccttcaggattctgatgaagaggaggaggagcatccgtctaaaactagtacaaagaagttgaagactgctcctttgcctcctgcaagccagactacgcccttgcagatggctcttaatggcaaacctgcacctccacctcagagccagagcccagaggtggagcagttagggagggttgtggaactggacagtgacatggtagatatcacccaggagccagttttggataccatgttagaagagagcatgcctgaggatcaggaacctgtgtctgcctcaacacatattgcatcttcactgggaattaatccacatgtcttacagatcatgaaagcatcattgcttactgatgaagaagatgtagatatggcactggatcaacgcttcagtcgcctgccttccaaagcagatacttctcaagaaatctgttctcccagactccccatttcagcatcccactcgtcgaaaactcgttcactagttggtgggttactacaatcaaaatttacaagtggagcttttctttcaccaagtgtctctgtgcaagaatgtcgtactcccagagcagcatctttaatgaatatcccatccacatcctcttggtctgtccctccacccctgacttctgtgttcacaatgcccagcccagcccctgaggttccgttgaaaacagtgggtacacgtaggcaactaggcctagtccctcgtgaaaagtctgtcacctatggcaagggaaaactcttgatggacatggccctattcatgggacgctcatttcgtgttggttggggccccaactggactcttgctaatagtggagaacagctgaatggctctcatgaactagaaaatcatcagattgccgattccatggagtttggattcctgcccaatccagtagctgttaaacccctaactgagtccccattcaaagttcacttagaaaaactcagtttgagacaaagaaagccagatgaagacatgaaattatatcagacacctctggagctcaaattaaaacacagcactgtccatgtggatgaactgtgtcctctcattgtccccaatctgggagttgctgtcattcatgactatgcagattgggttaaagaagcatcaggagacttaccagaagcacaaattgtgaagcactggagcctgacatggacactatgtgaagccctatggggccacctgaaggagcttgacagccagctaaatgaaccccgtgaatacattcaaattctggagcgaagaagagctttctcccgctggctatcctgtactgccacacctcagattgaagaggaagtctccttaacccaaaaaaacagccctgtggaggctgtattcagctacctcacaggcaaaaggatcagtgaggcctgctctctggcccagcagtcaggggatcatcgtcttgctcttcttttatctcagtttgtgggtagccagtcagtccgggagctgctcaccatgcagttggtggactggcatcagctccaagcagactccttcatccaggatgagagactgcgcatctttgctctgttggctggaaaaccggtgtggcagctctcagaaaagaagcaaataaacgtgtgctcccagttggattggaaacgctccctggctatccatctttggtatttgcttccaccaacagcctccatttctagggcgctcagcatgtatgaagaagcatttcagaatacctctgacagtgacagatatgcctgctccccacttccttcgtatctggagggttctggctgtgtgatagcggaggagcaaaactcacagacaccacttcgagatgtctgctttcaccttctaaaactctacagtgacagacattatgatctcaaccagctgctggagcctcgaagcataacagcagatcctttggactaccgcctaagctggcacttgtgggaagtgctgagggctcttaactacacccatctctcagcgcagtgtgaaggtgtgctacaggccagttacgctggccagcttgaaagtgaggggctctgggagtgggccatctttgtcctcctgcacattgacaactcaggcatacgtgagaaggctgttcgagagctgcttacccggcactgccagctgttggagacccctgaatcttgggctaaagagactttccttacccagaagctccgtgtacctgccaaatggatccacgaggccaaagctgtgcgagcacacatggaatctgacaagcacttagaggccctttgcttatttaaggctgagcactggaaccgctgccacaagctcatcatccgacacttagcttctgatgccatcattaatgagaactatgactacctgaaggggttcttggaagacctggcacctccagagcgcagcagcctaattcaggattgggaaacatctgggcttgtttacctggactatattagagtcattgaaatgctccgccatatacagcaggtggattgctcaggtaatgacctggagcagttacacatcaaagtgacttcactgtgcagtcggatagagcagattcagtgttacagtgctaaagatcgcctggctcagtcagacatggccaaacgtgtagccaacctgctgcgcgtggtgctgagtctgcatcatcctcctgatagaacctccgactcaacaccagaccctcagcgagtccctttgcgcctcttggctccccacattggccggcttcccatgcctgaggactatgccatggacgaactgcgcagccttacccagtcctatctgcgagaactggctgttgggagcctgtgagccccaggcactttgcatcacagtcacatgcccattcacaccacacagaggttccctgccttgtttggattggcactgtttgccattctctgggttggctgtggcatctaccctccctccctgctgccagaagcagcatcctccacttgttcagggcttttcttaatactgaacgtagcataagggcttctggaacccagaagaggagacagtttaccatcctcaagatcattcagtgtttttcctttaaaaaaatggtcaataaagctcctttggcagaatcccccaaagaaccagggtattctttttccatccctagccattctggatcttgtgaccctccatgccaaccagcttccctactcctaccctggcccttttatactaggactccttaggaggagtgagacaggtgataatggatccttaacagatgaactatccacagaaggaagagggatccgtctcttaagtaattggttagttaacactgaattttggaggcaaaggagggttggcctgagttaggaaacaaaatgggatctttctgacacacttagggcagaagtgaatgcctgtcacggagggattgatcttcagggctgtttttgttcctgcctttagagttccatgaacaccatacctttgctactactatgtgcaggaacccttggtcacatgtgacatgtctgtgggaagctcccagagtttggtttggtccctggttttcagtcttgctgagactctgtctggatttgcctgcagagtttggataaaaaatggcaggttgggtaaccctccctgttcatcccatgttagctccaaagcatttcccaccctccatctaccccttccagaagcaaaaacaaaccatgactgaggcaggcatggagttgggcgttaggggcaggcagagggcctttgctacactgctgacagctatagggagccccaggtaatggcatgagatagctggtgttagggctatctcaggcaatatggccacacctgggtctttatgcatgaagataatgtaaaggtttttattaaaaaatatatatatgtataaataaatgatctagatattttcctctttttctgaagctactttcttaaaaaataaataaaatgtttatagcattcctggta

SEQ ID NO: 161378 - DNA, 5628 bp, Homo sapiens
  Payload ID: 11510
  Gene Symbol: NUP98
  Gene Name: nucleoporin 98kDa
  Uniprot ID: P52948
  ENST ID: ENST00000355260
  CDS Start-End: 88-5268
tgtgagcggcgggtggcagcaggggactcctgacacttccccttccccaccgaaccgcgctttctgaaacaaagactcattttgaagatgtttaacaaatcatttggaacaccctttgggggtggcacaggtggctttggcacaacttcaacatttggacagaatactggctttggcactactagtggaggggcatttggaacatctgcatttggttctagcaacaatactggaggcctctttggaaattcacagactaaaccaggaggattgtttggaaccagttcatttagccagccagctacctccacaagcactggctttgggtttggtacgtcaacaggaacagcaaataccttgtttggaactgcaagcacagggaccagtctcttctcatcccaaaacaatgcctttgcacaaaataaaccaactggctttggcaattttggaaccagtactagcagtggaggactctttggaaccacaaataccacctctaatccttttggcagcacatctggctccctctttgggccaagtagttttacagctgctcctactgggactactattaaatttaaccctccaactggtacagatactatggtcaaagctggagttagcactaacataagtaccaagcaccagtgtattactgctatgaaagaatatgaaagcaagtcactagaggaacttcgtttagaggattatcaggctaacaggaagggcccacagaaccaggtgggagcaggtaccacaactggcttgtttgggtcttctccagccacttccagcgcaacaggactcttcagctcctccaccactaattcaggctttgcatatggtcagaacaaaactgcctttggaactagtacaactggatttggaacaaatccaggtggtctctttggccaacagaatcagcagactaccagcctcttcagcaaaccatttggccaggctacaaccacccagaacactggcttttcctttggtaataccagcaccataggacagccaagcaccaacaccatgggattatttggagtaacccaagcctcacagcctggaggtctttttgggacagctacaaacaccagcactgggacagcatttggaacaggaacaggtctctttgggcagaccaatactggatttggtgctgttggttcgaccctgtttggcaataacaagcttactacatttggaagcagcacaaccagtgcaccttcatttggtacaaccagtggcgggctctttggttttggcacaaataccagtgggaatagtatttttggaagtaaaccagcacctgggactcttggaactgggcttggtgcaggatttggaacagctcttggtgctggacaggcatctttgtttgggaacaaccaacctaagattggagggcctcttggtacaggagcctttggggcccctggatttaatactacgacagccactttgggctttggagccccccaggccccagtagctttgacagatccaaatgcttctgctgcccagcaggctgttctccagcagcacatcaatagtctaacatactcaccttttggagactctcctctcttccggaatccgatgtcagaccctaagaagaaggaagagagattgaaaccaacaaatccagcagcccagaaggctcttactacacctactcattataaactgacaccccgccctgccactagagtccggccaaaggctttacaaacaacaggcacagccaagtcacatctctttgatgggctggatgacgatgaaccatccctagccaatggagcattcatgcccaagaagagcattaagaagttggttttgaagaaccttaataatagcaatctcttttctcctgttaatcgtgattcagaaaatctagcttcaccatctgaatatccagaaaatggagagagatttagtttcctaagcaaacctgttgatgagaatcaccagcaggatggagatgaagattcccttgtttcacatttttatactaaccctattgccaaacctattcctcaaaccccagaaagtgctggaaataaacacagcaacagcaacagtgtggatgataccattgttgcattaaacatgcgtgctgctttgcgaaatgggctggaaggaagcagtgaagaaacgtcttttcatgatgagtcacttcaggatgaccgagaagaaatagaaaataattcttaccatatgcacccagcaggtattattctcactaaggttggttactatactattccatctatggatgaccttgctaaaattaccaatgaaaaaggagagtgcattgtctctgatttcactattggtcggaaaggttatggttcaatctattttgaaggagatgtgaatttgacaaatctaaatttggatgatattgtgcatatccggaggaaagaagtagttgtctacttagatgataaccaaaaaccacctgtgggtgaagggctaaataggaaggctgaagttacattggatggagtttggccaacagataaaacatctcgttgtttaataaagagcccagatcgccttgctgatatcaactatgaaggaagattggaagcagtttcaaggaaacagggagctcaattcaaagaataccggcctgaaactggttcttgggtgtttaaggtctcccatttttctaagtatggccttcaggattctgatgaagaggaggaggagcatccgtctaaaactagtacaaagaagttgaagactgctcctttgcctcctgcaagccagactacgcccttgcagatggctcttaatggcaaacctgcacctccacctcagagccagagcccagaggtggagcagttagggagggttgtggaactggacagtgacatggtagatatcacccaggagccagttttggataccatgttagaagagagcatgcctgaggatcaggaacctgtgtctgcctcaacacatattgcatcttcactgggaattaatccacatgtcttacagatcatgaaagcatcattgcttactgatgaagaagatgtagatatggcactggatcaacgcttcagtcgcctgccttccaaagcagatacttctcaagaaatctgttctcccagactccccatttcagcatcccactcgtcgaaaactcgttcactagttggtgggttactacaatcaaaatttacaagtggagcttttctttcaccaagtgtctctgtgcaagaatgtcgtactcccagagcagcatctttaatgaatatcccatccacatcctcttggtctgtccctccacccctgacttctgtgttcacaatgcccagcccagcccctgaggttccgttgaaaacagtgggtacacgtaggcaactaggcctagtccctcgtgaaaagtctgtcacctatggcaagggaaaactcttgatggacatggccctattcatgggacgctcatttcgtgttggttggggccccaactggactcttgctaatagtggagaacagctgaatggctctcatgaactagaaaatcatcagattgccgattccatggagtttggattcctgcccaatccagtagctgttaaacccctaactgagtccccattcaaagttcacttagaaaaactcagtttgagacaaagaaagccagatgaagacatgaaattatatcagacacctctggagctcaaattaaaacacagcactgtccatgtggatgaactgtgtcctctcattgtccccaatctgggagttgctgtcattcatgactatgcagattgggttaaagaagcatcaggagacttaccagaagcacaaattgtgaagcactggagcctgacatggacactatgtgaagccctatggggccacctgaaggagcttgacagccagctaaatgaaccccgtgaatacattcaaattctggagcgaagaagagctttctcccgctggctatcctgtactgccacacctcagattgaagaggaagtctccttaacccaaaaaaacagccctgtggaggctgtattcagctacctcacaggcaaaaggatcagtgaggcctgctctctggcccagcagtcaggggatcatcgtcttgctcttcttttatctcagtttgtgggtagccagtcagtccgggagctgctcaccatgcagttggtggactggcatcagctccaagcagactccttcatccaggatgagagactgcgcatctttgctctgttggctggaaaaccggtgtggcagctctcagaaaagaagcaaataaacgtgtgctcccagttggattggaaacgctccctggctatccatctttggtatttgcttccaccaacagcctccatttctagggcgctcagcatgtatgaagaagcatttcagaatacctctgacagtgacagatatgcctgctccccacttccttcgtatctggagggttctggctgtgtgatagcggaggagcaaaactcacagacaccacttcgagatgtctgctttcaccttctaaaactctacagtgacagcatacgtgagaaggctgttcgagagctgcttacccggcactgccagctgttggagacccctgaatcttgggctaaagagactttccttacccagaagctccgtgtacctgccaaatggatccacgaggccaaagctgtgcgagcacacatggaatctgacaagcacttagaggccctttgcttatttaaggctgagcactggaaccgctgccacaagctcatcatccgacacttagcttctgatgccatcattaatgagaactatgactacctgaaggggttcttggaagacctggcacctccagagcgcagcagcctaattcaggattgggaaacatctgggcttgtttacctggactatattagagtcattgaaatgctccgccatatacagcaggtggattgctcaggtaatgacctggagcagttacacatcaaagtgacttcactgtgcagtcggatagagcagattcagtgttacagtgctaaagatcgcctggctcagtcagacatggccaaacgtgtagccaacctgctgcgcgtggtgctgagtctgcatcatcctcctgatagaacctccgactcaacaccagaccctcagcgagtccctttgcgcctcttggctccccacattggccggcttcccatgcctgaggactatgccatggacgaactgcgcagccttacccagtcctatctgcgagaactggctgttgggagcctgtgagccccaggcactttgcatcacagtcacatgcccattcacaccacacagaggttccctgccttgtttggattggcactgtttgccattctctgggttggctgtggcatctaccctccctccctgctgccagaagcagcatcctccacttgttcagggcttttcttaatactgaacgtagcataagggcttctggaacccagaagaggagacagtttaccatcctcaagatcattcagtgtttttcctttaaaaaaatggtcaataaagctcctttggcagaatcccccaaagaaccagggtattctttttccatccctagccattctggatcttgtgaccctccatgccaaccagcttccc

SEQ ID NO: 161379 - DNA, 7023 bp, Homo sapiens
  Payload ID: 11510
  Gene Symbol: NUP98
  Gene Name: nucleoporin 98kDa
  Uniprot ID: P52948
  ENST ID: ENST00000359171
  CDS Start-End: 422-5875
aaccgcggcggcgaggggcgggactccacggccctctcaccgctcctaccctgtgcctccccgaactccttctgcccctcctcttccctctcgccccttcccccttcagttcggtttcaaaagacgcgttgcccaatgaataacagggtcgacccagagtggcggccgcgtccaccaattcgcggacggcgagggcggagcgtccgcaacgagcctctgacgccgggcggcgtgtgacgcagtcgggccctctgcgcgctgcgcccgaagcggcggtcggtggcaggggtggtagcggcggcggcgacggtttcgtgggggccgcgcgctgctctgtgagcggcgggtggcagcaggggactcctgacacttccccttccccaccgaaccgcgctttctgaaacaaagactcattttgaagatgtttaacaaatcatttggaacaccctttgggggtggcacaggtggctttggcacaacttcaacatttggacagaatactggctttggcactactagtggaggggcatttggaacatctgcatttggttctagcaacaatactggaggcctctttggaaattcacagactaaaccaggaggattgtttggaaccagttcatttagccagccagctacctccacaagcactggctttgggtttggtacgtcaacaggaacagcaaataccttgtttggaactgcaagcacagggaccagtctcttctcatcccaaaacaatgcctttgcacaaaataaaccaactggctttggcaattttggaaccagtactagcagtggaggactctttggaaccacaaataccacctctaatccttttggcagcacatctggctccctctttgggccaagtagttttacagctgctcctactgggactactattaaatttaaccctccaactggtacagatactatggtcaaagctggagttagcactaacataagtaccaagcaccagtgtattactgctatgaaagaatatgaaagcaagtcactagaggaacttcgtttagaggattatcaggctaacaggaagggcccacagaaccaggtgggagcaggtaccacaactggcttgtttgggtcttctccagccacttccagcgcaacaggactcttcagctcctccaccactaattcaggctttgcatatggtcagaacaaaactgcctttggaactagtacaactggatttggaacaaatccaggtggtctctttggccaacagaatcagcagactaccagcctcttcagcaaaccatttggccaggctacaaccacccagaacactggcttttcctttggtaataccagcaccataggacagccaagcaccaacaccatgggattatttggagtaacccaagcctcacagcctggaggtctttttgggacagctacaaacaccagcactgggacagcatttggaacaggaacaggtctctttgggcagaccaatactggatttggtgctgttggttcgaccctgtttggcaataacaagcttactacatttggaagcagcacaaccagtgcaccttcatttggtacaaccagtggcgggctctttggtaacaaaccaaccctgactttaggaaccaatacaaacacttctaattttggttttggcacaaataccagtgggaatagtatttttggaagtaaaccagcacctgggactcttggaactgggcttggtgcaggatttggaacagctcttggtgctggacaggcatctttgtttgggaacaaccaacctaagattggagggcctcttggtacaggagcctttggggcccctggatttaatactacgacagccactttgggctttggagccccccaggccccagtagctttgacagatccaaatgcttctgctgcccagcaggctgttctccagcagcacatcaatagtctaacatactcaccttttggagactctcctctcttccggaatccgatgtcagaccctaagaagaaggaagagagattgaaaccaacaaatccagcagcccagaaggctcttactacacctactcattataaactgacaccccgccctgccactagagtccggccaaaggctttacaaacaacaggcacagccaagtcacatctctttgatgggctggatgacgatgaaccatccctagccaatggagcattcatgcccaagaagagcattaagaagttggttttgaagaaccttaataatagcaatctcttttctcctgttaatcgtgattcagaaaatctagcttcaccatctgaatatccagaaaatggagagagatttagtttcctaagcaaacctgttgatgagaatcaccagcaggatggagatgaagattcccttgtttcacatttttatactaaccctattgccaaacctattcctcaaaccccagaaagtgctggaaataaacacagcaacagcaacagtgtggatgataccattgttgcattaaacatgcgtgctgctttgcgaaatgggctggaaggaagcagtgaagaaacgtcttttcatgatgagtcacttcaggatgaccgagaagaaatagaaaataattcttaccatatgcacccagcaggtattattctcactaaggttggttactatactattccatctatggatgaccttgctaaaattaccaatgaaaaaggagagtgcattgtctctgatttcactattggtcggaaaggttatggttcaatctattttgaaggagatgtgaatttgacaaatctaaatttggatgatattgtgcatatccggaggaaagaagtagttgtctacttagatgataaccaaaaaccacctgtgggtgaagggctaaataggaaggctgaagttacattggatggagtttggccaacagataaaacatctcgttgtttaataaagagcccagatcgccttgctgatatcaactatgaaggaagattggaagcagtttcaaggaaacagggagctcaattcaaagaataccggcctgaaactggttcttgggtgtttaaggtctcccatttttctaagtatggccttcaggattctgatgaagaggaggaggagcatccgtctaaaactagtacaaagaagttgaagactgctcctttgcctcctgcaagccagactacgcccttgcagatggctcttaatggcaaacctgcacctccacctcagagccagagcccagaggtggagcagttagggagggttgtggaactggacagtgacatggtagatatcacccaggagccagttttggataccatgttagaagagagcatgcctgaggatcaggaacctgtgtctgcctcaacacatattgcatcttcactgggaattaatccacatgtcttacagatcatgaaagcatcattgcttactgatgaagaagatgtagatatggcactggatcaacgcttcagtcgcctgccttccaaagcagatacttctcaagaaatctgttctcccagactccccatttcagcatcccactcgtcgaaaactcgttcactagttggtgggttactacaatcaaaatttacaagtggagcttttctttcaccaagtgtctctgtgcaagaatgtcgtactcccagagcagcatctttaatgaatatcccatccacatcctcttggtctgtccctccacccctgacttctgtgttcacaatgcccagcccagcccctgaggttccgttgaaaacagtgggtacacgtaggcaactaggcctagtccctcgtgaaaagtctgtcacctatggcaagggaaaactcttgatggacatggccctattcatgggacgctcatttcgtgttggttggggccccaactggactcttgctaatagtggagaacagctgaatggctctcatgaactagaaaatcatcagattgccgattccatggagtttggattcctgcccaatccagtagctgttaaacccctaactgagtccccattcaaagttcacttagaaaaactcagtttgagacaaagaaagccagatgaagacatgaaattatatcagacacctctggagctcaaattaaaacacagcactgtccatgtggatgaactgtgtcctctcattgtccccaatctgggagttgctgtcattcatgactatgcagattgggttaaagaagcatcaggagacttaccagaagcacaaattgtgaagcactggagcctgacatggacactatgtgaagccctatggggccacctgaaggagcttgacagccagctaaatgaaccccgtgaatacattcaaattctggagcgaagaagagctttctcccgctggctatcctgtactgccacacctcagattgaagaggaagtctccttaacccaaaaaaacagccctgtggaggctgtattcagctacctcacaggcaaaaggatcagtgaggcctgctctctggcccagcagtcaggggatcatcgtcttgctcttcttttatctcagtttgtgggtagccagtcagtccgggagctgctcaccatgcagttggtggactggcatcagctccaagcagactccttcatccaggatgagagactgcgcatctttgctctgttggctggaaaaccggtgtggcagctctcagaaaagaagcaaataaacgtgtgctcccagttggattggaaacgctccctggctatccatctttggtatttgcttccaccaacagcctccatttctagggcgctcagcatgtatgaagaagcatttcagaatacctctgacagtgacagatatgcctgctccccacttccttcgtatctggagggttctggctgtgtgatagcggaggagcaaaactcacagacaccacttcgagatgtctgctttcaccttctaaaactctacagtgacagacattatgatctcaaccagctgctggagcctcgaagcataacagcagatcctttggactaccgcctaagctggcacttgtgggaagtgctgagggctcttaactacacccatctctcagcgcagtgtgaaggtgtgctacaggccagttacgctggccagcttgaaagtgaggggctctgggagtgggccatctttgtcctcctgcacattgacaactcaggcatacgtgagaaggctgttcgagagctgcttacccggcactgccagctgttggagacccctgaatcttgggctaaagagactttccttacccagaagctccgtgtacctgccaaatggatccacgaggccaaagctgtgcgagcacacatggaatctgacaagcacttagaggccctttgcttatttaaggctgagcactggaaccgctgccacaagctcatcatccgacacttagcttctgatgccatcattaatgagaactatgactacctgaaggggttcttggaagacctggcacctccagagcgcagcagcctaattcaggattgggaaacatctgggcttgtttacctggactatattagagtcattgaaatgctccgccatatacagcaggtggattgctcaggtaatgacctggagcagttacacatcaaagtgacttcactgtgcagtcggatagagcagattcagtgttacagtgctaaagatcgcctggctcagtcagacatggccaaacgtgtagccaacctgctgcgcgtggtgctgagtctgcatcatcctcctgatagaacctccgactcaacaccagaccctcagcgagtccctttgcgcctcttggctccccacattggccggcttcccatgcctgaggactatgccatggacgaactgcgcagccttacccagtcctatctgcgagaactggctgttgggagcctgtgagccccaggcactttgcatcacagtcacatgcccattcacaccacacagaggttccctgccttgtttggattggcactgtttgccattctctgggttggctgtggcatctaccctccctccctgctgccagaagcagcatcctccacttgttcagggcttttcttaatactgaacgtagcataagggcttctggaacccagaagaggagacagtttaccatcctcaagatcattcagtgtttttcctttaaaaaaatggtcaataaagctcctttggcagaatcccccaaagaaccagggtattctttttccatccctagccattctggatcttgtgaccctccatgccaaccagcttccctactcctaccctggcccttttatactaggactccttaggaggagtgagacaggtgataatggatccttaacagatgaactatccacagaaggaagagggatccgtctcttaagtaattggttagttaacactgaattttggaggcaaaggagggttggcctgagttaggaaacaaaatgggatctttctgacacacttagggcagaagtgaatgcctgtcacggagggattgatcttcagggctgtttttgttcctgcctttagagttccatgaacaccatacctttgctactactatgtgcaggaacccttggtcacatgtgacatgtctgtgggaagctcccagagtttggtttggtccctggttttcagtcttgctgagactctgtctggatttgcctgcagagtttggataaaaaatggcaggttgggtaaccctccctgttcatcccatgttagctccaaagcatttcccaccctccatctaccccttccagaagcaaaaacaaaccatgactgaggcaggcatggagttgggcgttaggggcaggcagagggcctttgctacactgctgacagctatagggagccccaggtaatggcatgagatagctggtgttagggctatctcaggcaatatggccacacctgggtctttatgcatgaagataatgtaaaggtttttattaaaaaatatatatatgtataaataaatgatctagatattttcctctttttctgaagctactttcttaaaaaataaataaaatgtttatagcattcctggt

SEQ ID NO: 161380 - DNA, 3923 bp, Homo sapiens
  Payload ID: 11510
  Gene Symbol: NUP98
  Gene Name: nucleoporin 98kDa
  Uniprot ID: P52948
  ENST ID: ENST00000397004
  CDS Start-End: 171-2933
ctgcgcgctgcgcccgaagcggcggtcggtggcaggggtggtagcggcggcggcgacggtttcgtgggggccgcgcgctgctctgtgagcggcgggtggcagcaggggactcctgacacttccccttccccaccgaaccgcgctttctgaaacaaagactcattttgaagatgtttaacaaatcatttggaacaccctttgggggtggcacaggtggctttggcacaacttcaacatttggacagaatactggctttggcactactagtggaggggcatttggaacatctgcatttggttctagcaacaatactggaggcctctttggaaattcacagactaaaccaggaggattgtttggaaccagttcatttagccagccagctacctccacaagcactggctttgggtttggtacgtcaacaggaacagcaaataccttgtttggaactgcaagcacagggaccagtctcttctcatcccaaaacaatgcctttgcacaaaataaaccaactggctttggcaattttggaaccagtactagcagtggaggactctttggaaccacaaataccacctctaatccttttggcagcacatctggctccctctttgggccaagtagttttacagctgctcctactgggactactattaaatttaaccctccaactggtacagatactatggtcaaagctggagttagcactaacataagtaccaagcaccagtgtattactgctatgaaagaatatgaaagcaagtcactagaggaacttcgtttagaggattatcaggctaacaggaagggcccacagaaccaggtgggagcaggtaccacaactggcttgtttgggtcttctccagccacttccagcgcaacaggactcttcagctcctccaccactaattcaggctttgcatatggtcagaacaaaactgcctttggaactagtacaactggatttggaacaaatccaggtggtctctttggccaacagaatcagcagactaccagcctcttcagcaaaccatttggccaggctacaaccacccagaacactggcttttcctttggtaataccagcaccataggacagccaagcaccaacaccatgggattatttggagtaacccaagcctcacagcctggaggtctttttgggacagctacaaacaccagcactgggacagcatttggaacaggaacaggtctctttgggcagaccaatactggatttggtgctgttggttcgaccctgtttggcaataacaagcttactacatttggaagcagcacaaccagtgcaccttcatttggtacaaccagtggcgggctctttggttttggcacaaataccagtgggaatagtatttttggaagtaaaccagcacctgggactcttggaactgggcttggtgcaggatttggaacagctcttggtgctggacaggcatctttgtttgggaacaaccaacctaagattggagggcctcttggtacaggagcctttggggcccctggatttaatactacgacagccactttgggctttggagccccccaggccccagtagctttgacagatccaaatgcttctgctgcccagcaggctgttctccagcagcacatcaatagtctaacatactcaccttttggagactctcctctcttccggaatccgatgtcagaccctaagaagaaggaagagagattgaaaccaacaaatccagcagcccagaaggctcttactacacctactcattataaactgacaccccgccctgccactagagtccggccaaaggctttacaaacaacaggcacagccaagtcacatctctttgatgggctggatgacgatgaaccatccctagccaatggagcattcatgcccaagaagagcattaagaagttggttttgaagaaccttaataatagcaatctcttttctcctgttaatcgtgattcagaaaatctagcttcaccatctgaatatccagaaaatggagagagatttagtttcctaagcaaacctgttgatgagaatcaccagcaggatggagatgaagattcccttgtttcacatttttatactaaccctattgccaaacctattcctcaaaccccagaaagtgctggaaataaacacagcaacagcaacagtgtggatgataccattgttgcattaaacatgcgtgctgctttgcgaaatgggctggaaggaagcagtgaagaaacgtcttttcatgatgagtcacttcaggatgaccgagaagaaatagaaaataattcttaccatatgcacccagcaggtattattctcactaaggttggttactatactattccatctatggatgaccttgctaaaattaccaatgaaaaaggagagtgcattgtctctgatttcactattggtcggaaaggttatggttcaatctattttgaaggagatgtgaatttgacaaatctaaatttggatgatattgtgcatatccggaggaaagaagtagttgtctacttagatgataaccaaaaaccacctgtgggtgaagggctaaataggaaggctgaagttacattggatggagtttggccaacagataaaacatctcgttgtttaataaagagcccagatcgccttgctgatatcaactatgaaggaagattggaagcagtttcaaggaaacagggagctcaattcaaagaataccggcctgaaactggttcttgggtgtttaaggtctcccatttttctaagtatggccttcaggattctgatgaagaggaggaggagcatccgtctaaaactagtacaaagaagttgaagactgctcctttgcctcctgcaagccagactacgcccttgcagatggctcttaatggcaaacctgcacctccacctcaggtagagaaaaaaggacagtgaatttgaatggaatccgtgataccgaagttgaaagcaagtcattcagctaatacaaagctgttttatgacccttggaactttgaagagtacaaacattggcaatcacgttgaaacaagtgcaagggagggcgtgaggtcttgcaggcatctgtctttttactggagagatttaaagaattctcttgctgtttggattattcctctacagattgtcatttttaaaccctttgttctctctcatttggacttgctgaattctctgctcagtgattaacttaagatttgctcatgtgggttcatgcacagtaaattctgcctttattgactacctgatgtgcagtttaatctttttctttacctccatggttttttaaaagttaaattagctttctgaaagggtttttaatctccatttttttaaagttgtttgcttatacttcgggtaaccttgatatttgtattttaatagtacataatctttatgaaaaatagtttgggaatgtaaatgaattattatttggcttggggagattagggcctacattgtttatcgcaattacttgtatcattgatacgggatttctttgtaaagcatcctctacctctcagctgctgaaagctagacctttggtattttccatgctataattcttatggctgctgaaatgtgtggtttttatgatttattaaataatctcttaggaggcatttctggagaatgtgtgtatatacatgtttgcgcgtacaggggaggggagggtatgataaatgtgggaaactggaaatatattgacttttatgtttataatcttggtagcatttagaatgcccctaagaaatctccattgacaaatgaaatgctatagacttggttttccagttatccatattcattttgtctgtcatatgctttgtatcatctccttctttcctaattttttataaccttatatatatatttattataaatatatgtatttctgagggaaa

SEQ ID NO: 161381 - DNA, 3698 bp, Homo sapiens
  Payload ID: 11510
  Gene Symbol: NUP98
  Gene Name: nucleoporin 98kDa
  Uniprot ID: P52948
  ENST ID: ENST00000397007
  CDS Start-End: 177-2990
ggccctctgcgcgctgcgcccgaagcggcggtcggtggcaggggtggtagcggcggcggcgacggtttcgtgggggccgcgcgctgctctgtgagcggcgggtggcagcaggggactcctgacacttccccttccccaccgaaccgcgctttctgaaacaaagactcattttgaagatgtttaacaaatcatttggaacaccctttgggggtggcacaggtggctttggcacaacttcaacatttggacagaatactggctttggcactactagtggaggggcatttggaacatctgcatttggttctagcaacaatactggaggcctctttggaaattcacagactaaaccaggaggattgtttggaaccagttcatttagccagccagctacctccacaagcactggctttgggtttggtacgtcaacaggaacagcaaataccttgtttggaactgcaagcacagggaccagtctcttctcatcccaaaacaatgcctttgcacaaaataaaccaactggctttggcaattttggaaccagtactagcagtggaggactctttggaaccacaaataccacctctaatccttttggcagcacatctggctccctctttgggccaagtagttttacagctgctcctactgggactactattaaatttaaccctccaactggtacagatactatggtcaaagctggagttagcactaacataagtaccaagcaccagtgtattactgctatgaaagaatatgaaagcaagtcactagaggaacttcgtttagaggattatcaggctaacaggaagggcccacagaaccaggtgggagcaggtaccacaactggcttgtttgggtcttctccagccacttccagcgcaacaggactcttcagctcctccaccactaattcaggctttgcatatggtcagaacaaaactgcctttggaactagtacaactggatttggaacaaatccaggtggtctctttggccaacagaatcagcagactaccagcctcttcagcaaaccatttggccaggctacaaccacccagaacactggcttttcctttggtaataccagcaccataggacagccaagcaccaacaccatgggattatttggagtaacccaagcctcacagcctggaggtctttttgggacagctacaaacaccagcactgggacagcatttggaacaggaacaggtctctttgggcagaccaatactggatttggtgctgttggttcgaccctgtttggcaataacaagcttactacatttggaagcagcacaaccagtgcaccttcatttggtacaaccagtggcgggctctttggtaacaaaccaaccctgactttaggaaccaatacaaacacttctaattttggttttggcacaaataccagtgggaatagtatttttggaagtaaaccagcacctgggactcttggaactgggcttggtgcaggatttggaacagctcttggtgctggacaggcatctttgtttgggaacaaccaacctaagattggagggcctcttggtacaggagcctttggggcccctggatttaatactacgacagccactttgggctttggagccccccaggccccagtagctttgacagatccaaatgcttctgctgcccagcaggctgttctccagcagcacatcaatagtctaacatactcaccttttggagactctcctctcttccggaatccgatgtcagaccctaagaagaaggaagagagattgaaaccaacaaatccagcagcccagaaggctcttactacacctactcattataaactgacaccccgccctgccactagagtccggccaaaggctttacaaacaacaggcacagccaagtcacatctctttgatgggctggatgacgatgaaccatccctagccaatggagcattcatgcccaagaagagcattaagaagttggttttgaagaaccttaataatagcaatctcttttctcctgttaatcgtgattcagaaaatctagcttcaccatctgaatatccagaaaatggagagagatttagtttcctaagcaaacctgttgatgagaatcaccagcaggatggagatgaagattcccttgtttcacatttttatactaaccctattgccaaacctattcctcaaaccccagaaagtgctggaaataaacacagcaacagcaacagtgtggatgataccattgttgcattaaacatgcgtgctgctttgcgaaatgggctggaaggaagcagtgaagaaacgtcttttcatgatgagtcacttcaggatgaccgagaagaaatagaaaataattcttaccatatgcacccagcaggtattattctcactaaggttggttactatactattccatctatggatgaccttgctaaaattaccaatgaaaaaggagagtgcattgtctctgatttcactattggtcggaaaggttatggttcaatctattttgaaggagatgtgaatttgacaaatctaaatttggatgatattgtgcatatccggaggaaagaagtagttgtctacttagatgataaccaaaaaccacctgtgggtgaagggctaaataggaaggctgaagttacattggatggagtttggccaacagataaaacatctcgttgtttaataaagagcccagatcgccttgctgatatcaactatgaaggaagattggaagcagtttcaaggaaacagggagctcaattcaaagaataccggcctgaaactggttcttgggtgtttaaggtctcccatttttctaagtatggccttcaggattctgatgaagaggaggaggagcatccgtctaaaactagtacaaagaagttgaagactgctcctttgcctcctgcaagccagactacgcccttgcagatggctcttaatggcaaacctgcacctccacctcaggtagagaaaaaaggacagtgaatttgaatggaatccgtgataccgaagttgaaagcaagtcattcagctaatacaaagctgttttatgacccttggaactttgaagagtacaaacattggcaatcacgttgaaacaagtgcaagggagggcgtgaggtcttgcaggcatctgtctttttactggagagatttaaagaattctcttgctgtttggattattcctctacagattgtcatttttaaaccctttgttctctctcatttggacttgctgaattctctgctcagtgattaacttaagatttgctcatgtgggttcatgcacagtaaattctgcctttattgactacctgatgtgcagtttaatctttttctttacctccatggttttttaaaagttaaattagctttctgaaagggtttttaatctccatttttttaaagttgtttgcttatacttcgggtaaccttgatatttgtattttaatagtacataatctttatgaaaaatagtttgggaatgtaaatgaattattatttggcttggggagattagggcctacattgtttatcgcaattacttgtatcattgatacgggatttctttgtaaagcatcctctacctctcagctgctgaaagctagacctttggtattttccatgctataattcttatggctgctgaaatgtgtggtttttatgatttattaaataatctcttaggaggca

SEQ ID NO: 161382 - DNA, 939 bp, Homo sapiens
  Payload ID: 11510
  Gene Symbol: NUP98
  Gene Name: nucleoporin 98kDa
  ENST ID: ENST00000397013
  CDS Start-End: 1-409
cctcttcagcaaaccatttggccaggctacaaccacccagaacactggcttttcctttggtaataccagcaccataggacagccaagcaccaacaccatgggattatttggagtaacccaagcctcacagcctggaggtctttttgggacagctacaaacaccagcactgggacagcatttggaacaggaacaggtctctttgggcagaccaatactggatttggtgctgttggttcgaccctgtttggcaataacaagcttactacatttggaagcagcacaaccagtgcaccttcatttggtacaaccagtggcgggctctttggtaacaaaccaaccctgactttaggaaccaatacaaacacttctaattttggtacatataaaaagcaggtttggctctcttaaagttacactgactataccacacgttattctcctgattcgtatgattggaaatatttaaaagttctcaggttttggcacaaataccagtgggaatagtatttttggaagtaaaccagcacctgggactcttggaactgggcttggtgcaggatttggaacagctcttggtgctggacaggcatctttgtttgggaacaaccaacctaagattggagggcctcttggtacaggagcctttggggcccctggatttaatactacgacagccactttgggctttggagccccccaggccccagtagctttgacagatccaaatgcttctgctgcccagcaggctgttctccagcagcacatcaatagtctaacatactcaccttttggagactctcctctcttccggaatccgatgtcagaccctaagaagaaggaagagattgaaaccaacaaatccagcagcccagaaggctcttactacacctactcattataaactgacaccccgccctgccactagagtccggccaaag

SEQ ID NO: 161383 - DNA, 2541 bp, Homo sapiens
  Payload ID: 11510
  Gene Symbol: NUP98
  Gene Name: nucleoporin 98kDa
  ENST ID: ENST00000429801
  CDS Start-End: 1-2260
gttagaagagagcatgcctgaggatcaggaacctgtgtctgcctcaacacatattgcatcttcactgggaattaatccacatgtcttacagatcatgaaagcatcattgcttactgatgaagaagatgtagatatggcactggatcaacgcttcagtcgcctgccttccaaagcagatacttctcaagaaatctgttctcccagactccccatttcagcatcccactcgtcgaaaactcgttcactagttggtgggttactacaatcaaaatttacaagtggagcttttctttcaccaagtgtctctgtgcaagaatgtcgtactcccagagcagcatctttaatgaatatcccatccacatcctcttgcctaactgagtccccattcaaagttcacttagaaaaactcagtttgagacaaagaaagccagatgaagacatgaaattatatcagacacctctggagctcaaattaaaacacagcactgtccatgtggatgaactgtgtcctctcattgtccccaatctgggagttgctgtcattcatgactatgcagattgggttaaagaagcatcaggagacttaccagaagcacaaattgtgaagcactggagcctgacatggacactatgtgaagccctatggggccacctgaaggagcttgacagccagctaaatgaaccccgtgaatacattcaaattctggagcgaagaagagctttctcccgctggctatcctgtactgccacacctcagattgaagaggaagtctccttaacccaaaaaaacagccctgtggaggctgtattcagctacctcacaggcaaaaggatcagtgaggcctgctctctggcccagcagtcaggggatcatcgtcttgctcttcttttatctcagtttgtgggtagccagtcagtccgggagctgctcaccatgcagttggtggactggcatcagctccaagcagactccttcatccaggatgagagactgcgcatctttgctctgttggctggaaaaccggtgtggcagctctcagaaaagaagcaaataaacgtgtgctcccagttggattggaaacgctccctggctatccatctttggtatttgcttccaccaacagcctccatttctagggcgctcagcatgtatgaagaagcatttcagaatacctctgacagtgacagatatgcctgctccccacttccttcgtatctggagggttctggctgtgtgatagcggaggagcaaaactcacagacaccacttcgagatgtctgctttcaccttctaaaactctacagtgacagacattatgatctcaaccagctgctggagcctcgaagcataacagcagatcctttggactaccgcctaagctggcacttgtgggaagtgctgagggctcttaactacacccatctctcagcgcagtgtgaaggtgtgctacaggccagttacgctggccagcttgaaagtgaggggctctgggagtgggccatctttgtcctcctgcacattgacaactcaggcatacgtgagaaggctgttcgagagctgcttacccggcactgccagctgttggagacccctgaatcttgggctaaagagactttccttacccagaagctccgtgtacctgccaaatggatccacgaggccaaagctgtgcgagcacacatggaatctgacaagcacttagaggccctttgcttatttaaggctgagcactggaaccgctgccacaagctcatcatccgacacttagcttctgatgccatcattaatgagaactatgactacctgaaggggttcttggaagacctggcacctccagagcgcagcagcctaattcaggattgggaaacatctgggcttgtttacctggactatattagagtcattgaaatgctccgccatatacagcaggtggattgctcaggtaatgacctggagcagttacacatcaaagtgacttcactgtgcagtcggatagagcagattcagtgttacagtgctaaagatcgcctggctcagtcagacatggccaaacgtgtagccaacctgctgcgcgtggtgctgagtctgcatcatcctcctgatagaacctccgactcaacaccagaccctcagcgagtccctttgcgcctcttggctccccacattggccggcttcccatgcctgaggactatgccatggacgaactgcgcagccttacccagtcctatctgcgagaactggctgttgggagcctgtgagccccaggcactttgcatcacagtcacatgcccattcacaccacacagaggttccctgccttgtttggattggcactgtttgccattctctgggttggctgtggcatctaccctccctccctgctgccagaagcagcatcctccacttgttcagggcttttcttaatactgaacgtagcataagggcttctggaacccagaagaggagacagtttaccatcctcaagatcattcagtgtttttcctttaaaaaaatggtcaataaagctcctttggcagaa

SEQ ID NO: 161384 - DNA, 536 bp, Homo sapiens
  Payload ID: 11510
  Gene Symbol: NUP98
  Gene Name: nucleoporin 98kDa
  ENST ID: ENST00000529379
  CDS Start-End: 1-536
agaccaatactggatttggtgctgttggttcgaccctgtttggcaataacaagcttactacatttggaagcagcacaaccagtgcaccttcatttggtacaaccagtggcgggctctttggttttggcacaaataccagtgggaatagtatttttggaagtaaaccagcacctgggactcttggaactgggcttggtgcaggatttggaacagctttgacagatccaaatgcttctgctgcccagcaggctgttctccagcagcacatcaatagtctaacatactcaccttttggagactctcctctcttccggaatccgatgtcagaccctaagaagaaggaagagagattgaaaccaacaaatccagcagcccagaaggctcttactacacctactcattataaactgacaccccgccctgccactagagtccggccaaaggctttacaaacaacaggcacagccaagtcacatctctttgatgggctggatgacgatgaaccatccctagccaatggagcattcatgcccaag

SEQ ID NO: 161385 - DNA, 580 bp, Homo sapiens
  Payload ID: 11510
  Gene Symbol: NUP98
  Gene Name: nucleoporin 98kDa
  ENST ID: ENST00000533346
  CDS Start-End: 1-281
atgactacctgaaggggttcttggaagacctggcacctccagagcgcagcagcctaattcaggattgggaaacatctgggcttgtttacctggactatattagagtcattgaaatgctccgccatatacagcaggtggattgctcaggtaatgacctggagcagttacacatcaaagtgacttcactgtgcagtcggatagagcagattcagtgttacagtgctaaagatcgcctggctcagtcaggtactgtccacaccatccttgccagctgggcctaattttgccctaggtctggccaggaggcctcacatccagagacctgcccccgctcttgcagtgccagggccatggggctccggagccaccacctcagcctgggccttctgcttctgtttctactccctgcaggtatgaagctcagtacaccagccctggcctctcctggtggtgctactattcctgttctcccaaaatccctttccatgtagtctctcttgtgtttctcctcagtacctgttctgagaacaagctctctatttggggagtgtggaggagaggggtgctgaagtgcgtgaga

SEQ ID NO: 161386 - DNA, 544 bp, Homo sapiens
  Payload ID: 11510
  Gene Symbol: NUP98
  Gene Name: nucleoporin 98kDa
  ENST ID: ENST00000529063
  CDS Start-End: 1-226
ctatggcaagggaaaactcttgatggacatggccctattcatgggacgctcatttcgtgttggttggggccccaactggactcttgctaatagtggagaacagctgaatggctctcatgaactagaaaatcatcagattgccgattccatggagtttggattcctgcccaatccagtagctgttaaaccttgtgaagcactggagcctgacatggacactatgtgaagccctatggggccacctgaaggagcttgacagccagctaaatgaaccccgtgaatacattcaaattctggagcgaagaagagctttctcccgctggctatcctgtactgccacacctcagattgaagaggaagtctccttaacccaaaaaaacagccctgtggaggctgtattcagctacctcacaggcaaaaggatcagtgaggcctgctctctggcccagcagtcaggggatcatcgtcttgctcttcttttatctcagtttgtgggtagccagtcagtccgggagctgctcaccatgcagttggtggactggca

SEQ ID NO: 161387 - DNA, 841 bp, Homo sapiens
  Payload ID: 11510
  Gene Symbol: NUP98
  Gene Name: nucleoporin 98kDa
  ENST ID: ENST00000524563
  CDS Start-End: 1-698
cagtccgggagctgctcaccatgcagttggtggactggcatcagctccaagcagactccttcatccaggatgagagactgcgcatctttgctctgttggctggaaaaccggtgtggcagctctcagaaaagaagcaaataaacgtgtgctcccagttggattggaaacgctccctggctatccatctttggtatttgcttccaccaacagcctccatttctagggcgctcagcatgtatgaagaagcatttcagaatacctctgacagtgacagatatgcctgctccccacttccttcgtatctggagggttctggctgtgtgatagcggaggagcaaaactcacagacaccacttcgagatgtctgctttcaccttctaaaactctacagtgacagacattatgatctcaaccagctgctggagcctcgaagcataacagcagatcctttggactaccgcctaagctggcacttgtgggaagtgctgagggctcttaactacacccatctctcagcgcagtgtgaagcatacgtgagaaggctgttcgagagctgcttacccggcactgccagctgttggagacccctgaatcttgggctaaagagactttccttacccagaagctccgtgtacctgccaaatggatccacgaggccaaagctgtgcgagcacacatggaatctgacaagcacttagaggccctttgcttatttaaggctgagcactggaaccgctgccacaagctcatcatccgacacttagcttctgatgccatcattaatgagaactatgactacctgaaggggttcttggaagacctggcacctccagagcgcagc

SEQ ID NO: 161388 - DNA, 553 bp, Homo sapiens
  Payload ID: 11510
  Gene Symbol: NUP98
  Gene Name: nucleoporin 98kDa
  ENST ID: ENST00000532475
  CDS Start-End: 182-553
agtcgggccctctgcgcgctgcgcccgaagcggcggtcggtggcaggggtggtagcggcggcggcgacggtttcgtgggggccgcgcgctgctctgtgagcggcgggtggcagcaggggactcctgacacttccccttccccaccgaaccgcgctttctgaaacaaagactcattttgaagatgtttaacaaatcatttggaacaccctttgggggtggcacaggtggctttggcacaacttcaacatttggacagaatactggctttggcactactagtggaggggcatttggaacatctgcatttggttctagcaacaatactggaggcctctttggaaattcacagactaaaccaggaggattgtttggaaccagttcatttagccagccagctacctccacaagcactggctttgggtttgattttggaaccagtactagcagtggaggactctttggaaccacaaataccacctctaatccttttggcagcacatctggctccctctttgggccaagtagttttacagctgctcctactgggactact

SEQ ID NO: 161389 - DNA, 705 bp, Homo sapiens
  Payload ID: 11510
  Gene Symbol: NUP98
  Gene Name: nucleoporin 98kDa
  ENST ID: ENST00000527104
  CDS Start-End: 1-705
tggaagcagcacaaccagtgcaccttcatttggttttggcacaaataccagtgggaatagtatttttggaagtaaaccagcacctgggactcttggaactgggcttggtgcaggatttggaacagctcttggtgctggacaggcatctttgtttgggaacaaccaacctaagattggagggcctcttggtacaggagcctttggggcccctggatttaatactacgacagccactttgggctttggagccccccaggccccagtagctttgacagatccaaatgcttctgctgcccagcaggctgttctccagcagcacatcaatagtctaacatactcaccttttggagactctcctctcttccggaatccgatgtcagaccctaagaagaaggaagagagattgaaaccaacaaatccagcagcccagaaggctcttactacacctactcattataaactgacaccccgccctgccactagagtccggccaaaggctttacaaacaacaggcacagccaagtcacatctctttgatgggctggatgacgatgaaccatccctagccaatggagcattcatgcccaagaagagcattaagaagttggttttgaagaaccttaataatagcaatctcttttctcctgttaatcgtgattcagaaaatctagcttcaccatctgaatatccagaaaatggagagag

SEQ ID NO: 161390 - DNA, 1795 bp, Homo sapiens
  Payload ID: 11511
  Gene Symbol: NUPL2
  Gene Name: nucleoporin like 2
  Uniprot ID: O15504
  ENST ID: ENST00000258742
  CDS Start-End: 260-1531
acgtaaccgttcaagcatccctccttcccaggacacactcaaagcgtcagagcggtccgctcttctcaagtcctattggctcaagtccatgcgtctcatggcactgccgggtgagaggcggaaaaaggccttcccaggcgcgagaagatgacgtcacagtagcccggccgggcgccgaggttgccttagggctctctgcccagtaacaggcatcgaacggtgcagactgaagacgccctccgtcagcgacgccgtcgcaatggccatttgtcaattcttccttcaaggccggtgccgctttggagatcggtgctggaacgaacatcccggtgctaggggtgcaggaggaggacggcagcaaccgcagcagcagccttcaggtaataatagacgtggatggaatacaactagccagagatattccaatgtcatccagccatccagtttctccaaatccacaccatgggggggcagcagagatcaagaaaagccatatttcagttcttttgattctggagcttcaactaacaggaaggaaggctttggattgtctgagaacccatttgcttcacttagtcctgatgagcagaaagatgaaaagaaacttctggaaggaattgtaaaagatatggaggtttgggaatcatcagggcagtggatgttttctgtttattcaccagtgaaaaagaaacctaatatttcaggttttacagacatttcaccagaggaattgaggcttgaataccataacttcttaaccagcaataacttacagagttatctaaattctgtccaacgtttaataaatcaatggaggaacagggtaaatgaactgaaaagtctaaatatatcaactaaagtagctttgctctctgatgtaaaggatggagtaaatcaagcagcacctgcatttggatttggcagcagtcaagcagcaacatttatgtcgccaggctttccagtcaataacagcagcagtgataatgctcagaactttagttttaaaacaaactctggatttgctgctgcctcttctggaagccctgctggttttgggagttccccagcatttggagctgcagcctctaccagttcaggtatctctacttctgctccagcttttggatttgggaagcctgaagtcacatcggctgcatcattttcattcaaaagccctgcagcttccagttttggatcacctggattttcaggacttccagcttccttggcaacaggtcctgtcagagctccagtggccccagcctttggaggtggcagttctgtggctggttttggtagtccgggctcacattctcacactgctttttctaagccatccagtgacacttttggaaatagcagcatatccacttctctgtcagcctcaagcagcatcattgcaacagataatgtgttattcacacccagagataaactaacagtagaagaactggaacaatttcaatccaagaaatttactctgggaaaaattccattaaagcctccacctctggaacttctaaatgtttaaaagggcaattttaaatacaaaaaagaatgatgtttaaaattgctttgagtgattcatacagagatgtatatatgcatacatgtatatattcataaggaatataagcttccatcaatagtgattttaaatttgatttttttcttaactctaaatatttaagtaaaaagtaacaaaaactctgcaagcaagggaatttttttgtactgtaattttgaatggaactgaaaaattatgcacgaataaagtacttttctcatgccatac

SEQ ID NO: 161391 - DNA, 680 bp, Homo sapiens
  Payload ID: 11511
  Gene Symbol: NUPL2
  Gene Name: nucleoporin like 2
  ENST ID: ENST00000410002
  CDS Start-End: 49-516
atcgaacggtgcagactgaagacgccctccgtcagcgacgccgtcgcaatggccatttgtcaattcttccttcaaggccggtgccgctttggagatcggtgctggaacgaacatcccggtgctaggggtgcaggaggaggacggcagcaaccgcagcagcagccttcaggtaataatagacgtggatggaatacaactagccagagatattccaatgtcatccagccatccagtttctccaaatccacaccatgggggggcagcagagatcaagaaaagccatatttcagttcttttgattctggagcttcaactaacaggaaggaaggctttggattgtctgagaacccatttgcttcacttagtcctgatgagcagaaagatgaaaagaaacttctggaaggaattgtaaaagatatggaggtttgggaatcatcagggcagtggatgttttctgtttattcaccagtgaaaaagaaacctaatatttcagtccctaagccctttctgggctgaaacctagaccaccgggctttcccaagcccactctgggtgttcctgggcctccgtccttttgaggaaacagtgggtaccttgcaaatgggagctcttgcaatcaatatcgcagaaccttgggatctttcctctgtctcagttctagttgctcattttctgtgagc

SEQ ID NO: 161392 - DNA, 1329 bp, Homo sapiens
  Payload ID: 11511
  Gene Symbol: NUPL2
  Gene Name: nucleoporin like 2
  ENST ID: ENST00000413919
  CDS Start-End: 23-1329
ctccgtcagcgacgccgtcgcaatggccatttgtcaattcttccttcaaggccggtgccgctttggagatcggtgctggaacgaacatcccggtgctaggggtgcaggaggaggacggcagcaaccgcagcagcagccttcaggtaataatagacgtggatggaatacaactagccagagatattccaatgtcatccagccatccagtttctccaaatccacaccatgggggggcagcagagatcaagaaaagccatatttcagttcttttgattctggagcttcaactaacaggaaggaaggctttggattgtctgagaacccatttgcttcacttagtcctgatgagcagaaagatgaaaagaaacttctggaaggaattgtaaaagatatggaggtttgggaatcatcagggcagtggatgttttctgtttattcaccagtgaaaaagaaacctaatatttcaggttttacagacatttcaccagaggaattgaggcttgaataccataacttcttaaccagcaataacttacagagttatctaaattctgtccaacgtttaataaatcaatggaggaacagggtaaatgaactgaaaagtctaaatatatcaactaaagtagctttgaaatgcctttggaagatatatacccacctgtctccaaagatctatggtcccgactgtggcaagttcattatctttctctctgatgtaaaggatggagtaaatcaagcagcacctgcatttggatttggcagcagtcaagcagcaacatttatgtcgccaggctttccagtcaataacagcagcagtgataatgctcagaactttagttttaaaacaaactctggatttgctgctgcctcttctggaagccctgctggttttgggagttccccagcatttggagctgcagcctctaccagttcaggtatctctacttctgctccagcttttggatttgggaagcctgaagtcacatcggctgcatcattttcattcaaaagccctgcagcttccagttttggatcacctggattttcaggacttccagcttccttggcaacaggtcctgtcagagctccagtggccccagcctttggaggtggcagttctgtggctggttttggtagtccgggctcacattctcacactgctttttctaagccatccagtgacacttttggaaatagcagcatatccacttctctgtcagcctcaagcagcatcattgcaacagataatgtgttattcacacccagagataaactaacagtagaagaactggaacaatttcaatccaagaaatttactctgggaaaaat

SEQ ID NO: 161393 - DNA, 1285 bp, Homo sapiens
  Payload ID: 11511
  Gene Symbol: NUPL2
  Gene Name: nucleoporin like 2
  ENST ID: ENST00000437140
  CDS Start-End: 21-155
ccgtcagcgacgccgtcgcaatggccatttgtcaattcttccttcaaggccggtgccgctttggagatcggtgctggaacgaacatcccggtgctaggggtgcaggaggaggacggcagcaaccgcagcagcagccttcagggaaggaattgtaaaagatatggaggtttgggaatcatcagggcagtggatgttttctgtttattcaccagtgaaaaagaaacctaatatttcaggttttacagacatttcaccagaggaattgaggcttgaataccataacttcttaaccagcaataacttacagagttatctaaattctgtccaacgtttaataaatcaatggaggaacagggtaaatgaactgaaaagtctaaatatatcaactaaagtagctttgctctctgatgtaaaggatggagtaaatcaagcagcacctgcatttggatttggcagcagtcaagcagcaacatttatgtcgccaggctttccagtcaataacagcagcagtgataatgctcagaactttagttttaaaacaaactctggatttgctgctgcctcttctggaagccctgctggttttgggagttccccagcatttggagctgcagcctctaccagttcaggtatctctacttctgctccagcttttggatttgggaagcctgaagtcacatcggctgcatcattttcattcaaaagccctgcagcttccagttttggatcacctggattttcaggacttccagcttccttggcaacaggtcctgtcagagctccagtggccccagcctttggaggtggcagttctgtggctggttttggtagtccgggctcacattctcacactgctttttctaagccatccagtgacacttttggaaatagcagcatatccacttctctgtcagcctcaagcagcatcattgcaacagataatgtgttattcacacccagagataaactaacagtagaagaactggaacaatttcaatccaagaaatttactctgggaaaaattccattaaagcctccacctctggaacttctaaatgtttaaaagggcaattttaaatacaaaaaagaatgatgtttaaaattgctttgagtgattcatacagagatgtatatatgcatacatgtatatattcataaggaatataagcttccatcaatagtgattttaaatttgatttttttcttaactctaaatatttaagtaaaaagtaacaaaaactctgcaagcaagggaatttttttgtactgtaattttgaatggaac

SEQ ID NO: 161394 - DNA, 1653 bp, Homo sapiens
  Payload ID: 11511
  Gene Symbol: NUPL2
  Gene Name: nucleoporin like 2
  Uniprot ID: O15504
  ENST ID: ENST00000438012
  CDS Start-End: 63-737
gcccagtaacaggcatcgaacggtgcagactgaagacgccctccgtcagcgacgccgtcgcaatggccatttgtcaattcttccttcaaggccggtgccgctttggagatcggtgctggaacgaacatcccggtgctaggggtgcaggaggaggacggcagcaaccgcagcagcagccttcaggtaataatagacgtggatggaatacaactagccagagatattccaatgtcatccagccatccagtttctccaaatccacaccatgggggggcagcagagatcaagaaaagccatatttcagttcttttgattctggagcttcaactaacaggaaggaaggctttggattgtctgagaacccatttgcttcacttagtcctgatgagcagaaagatgaaaagaaacttctggaaggaattgtaaaagatatggaggtttgggaatcatcagggcagtggatgttttctgtttattcaccagtgaaaaagaaacctaatatttcaggttttacagacatttcaccagaggaattgaggcttgaataccataacttcttaaccagcaataacttacagagttatctaaattctgtccaacgtttaataaatcaatggaggaacagggtaaatgaactgaaaagtctaaatatatcaactaaagtagctttgaaatgcctttggaagatatatacccacctgtctccaaagatctatggtcccgactgtgctctctgatgtaaaggatggagtaaatcaagcagcacctgcatttggatttggcagcagtcaagcagcaacatttatgtcgccaggctttccagtcaataacagcagcagtgataatgctcagaactttagttttaaaacaaactctggatttgctgctgcctcttctggaagccctgctggttttgggagttccccagcatttggagctgcagcctctaccagttcaggtatctctacttctgctccagcttttggatttgggaagcctgaagtcacatcggctgcatcattttcattcaaaagccctgcagcttccagttttggatcacctggattttcaggacttccagcttccttggcaacaggtcctgtcagagctccagtggccccagcctttggaggtggcagttctgtggctggttttggtagtccgggctcacattctcacactgctttttctaagccatccagtgacacttttggaaatagcagcatatccacttctctgtcagcctcaagcagcatcattgcaacagataatgtgttattcacacccagagataaactaacagtagaagaactggaacaatttcaatccaagaaatttactctgggaaaaattccattaaagcctccacctctggaacttctaaatgtttaaaagggcaattttaaatacaaaaaagaatgatgtttaaaattgctttgagtgattcatacagagatgtatatatgcatacatgtatatattcataaggaatataagcttccatcaatagtgattttaaatttgatttttttcttaactctaaatatttaagtaaaaagtaacaaaaactctgcaagcaagggaatttttttgtactgtaattttgaatggaactgaaaaattatgcacgaataaagtacttttctcatgcca

SEQ ID NO: 161395 - DNA, 249 bp, Homo sapiens
  Payload ID: 11511
  Gene Symbol: NUPL2
  Gene Name: nucleoporin like 2
  ENST ID: ENST00000548367
  CDS Start-End: 1-249
gtgatccatccgcctcagcctcccaaagtgctgcaactacagaaattacccaacagtcaatcccagaaatttttttttttgaggcagagtctcactctgtcacccaggctggagtgcagtggtgccatctcagctcactgcaagctccgcctcccgggttcacgccattctcctgcctcagtctcccgaatagctgggactacaggcacccaccaccacgcccagcttttttgtatttttagtagagac

SEQ ID NO: 161396 - DNA, 3036 bp, Homo sapiens
  Payload ID: 11512
  Gene Symbol: NXN
  Gene Name: nucleoredoxin
  Uniprot ID: Q6DKJ4
  ENST ID: ENST00000336868
  CDS Start-End: 93-1400
cccagcgcctgccgccgacgccgccgcctcctcccgccgcgcggaccgtggagcggggtcgcagccgcctgcccgccctgcggtgggccaggatgtcgggcttcctggaggagctgctcggcgagaagctggtgacgggcggcggcgaggaggtggacgtgcactcgctgggcgcccgcggcatctcgctgctgggtctctacttcggctgcagcctcagcgccccctgcgcgcagctcagcgccagcctggccgccttctacgggcgcctgcggggggacgcggcggccgggccggggccgggagcgggggccggggcggcggcggagcccgagccgcggcggcgcctggagatcgtcttcgtgtcctcggaccaggaccagcggcagtggcaggacttcgtgcgggacatgccgtggctggcgctgccctacaaggagaagcacaggaagctcaaactttggaacaaataccgaatttccaacattccatcactaatattcctcgacgccaccactgggaaggttgtgtgcaggaacgggctgctggtgatccgagatgacccagaaggtctggagttcccctggggaccgaaacccttcagggaagtcattgcagggcccttgcttagaaacaatgggcagtctctggagagcagcagcctggaggggtctcacgtgggcgtctatttctccgcacattggtgtccgccctgccgaagcctcacccgggtcctggtggaatcctaccggaagatcaaggaggcaggccagaacttcgagatcatcttcgttagtgcagacaggtcggaggagtccttcaaacagtacttcagtgagatgccctggctcgccgtcccctacacggatgaggcccggcggtcgcgcctcaaccggctgtacggaatccaaggcatccccacgctcatcatgctggacccgcagggcgaggtgatcacgcggcaggggcgggtggaggtgctgaacgacgaggactgccgggagttcccctggcaccccaagcccgtgctggagctctccgactccaacgccgcgcagcttaacgagggcccctgcctcgtcctttttgtagattctgaggatgacggagagtccgaggcggccaagcagctgattcagccgatagctgagaaaatcattgccaagtacaaagccaaagaggaggaggcaccccttctgttcttcgtagccggggaggatgacatgactgactccctgcgagattacaccaacctgcctgaggctgcccctttgctcaccatcctggacatgtcagcccgggccaagtacgtgatggacgtggaggagatcacccccgccatcgtggaggcctttgtgaatgacttcctagcagagaagctcaaaccggagcccatctagcgtggctccggcctcctgagacgttatttaaaactcagccttctcctcctccccctccttccttccgcccttggacttacccagcgtgccccgaatcccaccacccaagtgtccagcctctctgtggtgccttgtttctgcagtaaactcctcagccagcaccctggggtgtggaatcagcagcggcagagtccaccgtgtttggagactctgtttgggagcacgggatggccgggggcccggccagagcggggctgcatggctttcgcaaagtcactagcttttggtgaaggatctgccagggtgtcctgggcagagtgagcgtggagggccggtgggtcccgctcgggctctgactctgacgtcggcacacacggccccggacggccagaggggaaccgccgggtgacacctgcgtggaggctgagctgagaaagggcctccgcttagagctgcgggtgaggacgtccttttctaagcaacacagtcttcctcggtctgagagaaaagcagcccactcttgtgttctcaggcaggggatctccaaatgcaaaaggaagcttgtagaggttttttgggtgagaagaaaaatgtagctaaggtaatggttcatatcatacaaacagctcccacgatcctgaaattctgttaacgaatccttctctttggacatcttcccaagaaacttagccctgagtcctaggaggagcacctctgcaccagcacggacctctcgctccacccagctctgtgcccaaggcccctgatctctgctgaggtgcccacacccacgttcgatcacccctgccattcccttttattttcttttttttgagatggagtcttgctctgtcgcccaggctggagtgcagtggcaccatcttggctcacttcaacctccgcccccaaggttcaagtgattctcctgcctcagcctcccgagtagctgggattacaggcacccgccaccgtacctggctaatttttgtatttttagtagagatggggtttcaccatgttggccaggctggtctcgaactcctgacctcaggtgatccacccgcctcggcctcccaaagtgctgggattacaggcgtgagccgccgtgcccggcccccttttcttttcaaagcagaactacaaagatgagaaattaccagaagcctcgccttttcctaagcaccagcggaaggagctgtgccccgggatggagtgagggtggagggcgcgtcagccacgggtgggccttgtgtcgccttgtatcggcccaggtaggttgttggcctcttacttgggctgacctgacccccgaaagagaaacagacaactctgttctcaggattggggatggacggcttcggccaagcgttttagcctcattcactcaggccccactcagcactctgccagccaagaccattgatttggaaaatccggtccccacccgctaatgagctgttgacactgttgttccttgctgaattggattgttgacttgtagttcagaggcgtacaactagttggcgattagacttgttatgtgatgttaccagcctgaaatgcgatcaccccgtaggaaataaagcaggcatctctggacctcatccaccctgggcctctgctgtccttgatcaca

SEQ ID NO: 161397 - DNA, 1340 bp, Homo sapiens
  Payload ID: 11512
  Gene Symbol: NXN
  Gene Name: nucleoredoxin
  ENST ID: ENST00000537628
  CDS Start-End: 599-1159
accggaaccgagcaacggtaactgtgccccttcaccggaaccgagcaatggcagacgtgtcccttcaccggaacccagcaacggtaactgtgtcctttcaccgaaactgagcaatggttaacgtgtttcctcactcagttcccaggcattgctgctgctgatctggggaacacactgtatgagcctgacataaacctctacagagctctgtctcaaactttggaacaaataccgaatttccaacattccatcactaatattcctcgacgccaccactgggaaggttgtgtgcaggaacgggctgctggtgatccgagatgacccagaaggtctggagttcccctggggaccgaaacccttcagggaagtcattgcagggcccttgcttagaaacaatgggcagtctctggagagcagcagcctggaggggtctcacgtgggcgtctatttctccgcacattggtgtccgccctgccgaagcctcacccgggtcctggtggaatcctaccggaagatcaaggaggcaggccagaacttcgagatcatcttcgttagtgcagacaggtcggaggagtccttcaaacagtacttcagtgagatgccctggctcgccgtcccctacacggatgaggcccggcggtcgcgcctcaaccggctgtacggaatccaaggcatccccacgctcatcatgctggacccgcagggcgaggtgatcacgcggcaggggcgggtggaggtgctgaacgacgaggactgccgggagttcccctggcaccccaagcccgtgctggagctctccgactccaacgccgcgcagcttaacgagggcccctgcctcgtcctttttgtagattctgaggatgacggagagtccgaggcggccaagcagctgattcagccgatagctgagaaaatcattgccaagtacaaagccaaagaggaggaggcaccccttctgttcttcgtagccggggaggatgacatgactgactccctgcgagattacaccaacctgcctgaggctgcccctttgctcaccatcctggacatgtcagcccgggccaagtacgtgatggacgtggaggagatcacccccgccatcgtggaggcctttgtgaatgacttcctagcagagaagctcaaaccggagcccatctagcgtggctccggcctcctgagacgttatttaaaactcagccttctcctcctccccctccttccttccgcccttggacttacccagcgtgccccgaatcccaccacccaagtgtccagcctctctgtggtgccttgtttctgcagtaaactcctcagccagcaccctggggtgtggaatcagc

SEQ ID NO: 161398 - DNA, 2681 bp, Homo sapiens
  Payload ID: 11512
  Gene Symbol: NXN
  Gene Name: nucleoredoxin
  Uniprot ID: Q6DKJ4
  ENST ID: ENST00000575801
  CDS Start-End: 62-1045
aaacgtgccccttcaccggaaccgagcaacggtaactgtgccccttcaccggaaccgagcaatggcagacgtgtcccttcaccggaacccagcaacgctcaaactttggaacaaataccgaatttccaacattccatcactaatattcctcgacgccaccactgggaaggttgtgtgcaggaacgggctgctggtgatccgagatgacccagaaggtctggagttcccctggggaccgaaacccttcagggaagtcattgcagggcccttgcttagaaacaatgggcagtctctggagagcagcagcctggaggggtctcacgtgggcgtctatttctccgcacattggtgtccgccctgccgaagcctcacccgggtcctggtggaatcctaccggaagatcaaggaggcaggccagaacttcgagatcatcttcgttagtgcagacaggtcggaggagtccttcaaacagtacttcagtgagatgccctggctcgccgtcccctacacggatgaggcccggcggtcgcgcctcaaccggctgtacggaatccaaggcatccccacgctcatcatgctggacccgcagggcgaggtgatcacgcggcaggggcgggtggaggtgctgaacgacgaggactgccgggagttcccctggcaccccaagcccgtgctggagctctccgactccaacgccgcgcagcttaacgagggcccctgcctcgtcctttttgtagattctgaggatgacggagagtccgaggcggccaagcagctgattcagccgatagctgagaaaatcattgccaagtacaaagccaaagaggaggaggcaccccttctgttcttcgtagccggggaggatgacatgactgactccctgcgagattacaccaacctgcctgaggctgcccctttgctcaccatcctggacatgtcagcccgggccaagtacgtgatggacgtggaggagatcacccccgccatcgtggaggcctttgtgaatgacttcctagcagagaagctcaaaccggagcccatctagcgtggctccggcctcctgagacgttatttaaaactcagccttctcctcctccccctccttccttccgcccttggacttacccagcgtgccccgaatcccaccacccaagtgtccagcctctctgtggtgccttgtttctgcagtaaactcctcagccagcaccctggggtgtggaatcagcagcggcagagtccaccgtgtttggagactctgtttgggagcacgggatggccgggggcccggccagagcggggctgcatggctttcgcaaagtcactagcttttggtgaaggatctgccagggtgtcctgggcagagtgagcgtggagggccggtgggtcccgctcgggctctgactctgacgtcggcacacacggccccggacggccagaggggaaccgccgggtgacacctgcgtggaggctgagctgagaaagggcctccgcttagagctgcgggtgaggacgtccttttctaagcaacacagtcttcctcggtctgagagaaaagcagcccactcttgtgttctcaggcaggggatctccaaatgcaaaaggaagcttgtagaggttttttgggtgagaagaaaaatgtagctaaggtaatggttcatatcatacaaacagctcccacgatcctgaaattctgttaacgaatccttctctttggacatcttcccaagaaacttagccctgagtcctaggaggagcacctctgcaccagcacggacctctcgctccacccagctctgtgcccaaggcccctgatctctgctgaggtgcccacacccacgttcgatcacccctgccattcccttttattttcttttttttgagatggagtcttgctctgtcgcccaggctggagtgcagtggcaccatcttggctcacttcaacctccgcccccaaggttcaagtgattctcctgcctcagcctcccgagtagctgggattacaggcacccgccaccgtacctggctaatttttgtatttttagtagagatggggtttcaccatgttggccaggctggtctcgaactcctgacctcaggtgatccacccgcctcggcctcccaaagtgctgggattacaggcgtgagccgccgtgcccggcccccttttcttttcaaagcagaactacaaagatgagaaattaccagaagcctcgccttttcctaagcaccagcggaaggagctgtgccccgggatggagtgagggtggagggcgcgtcagccacgggtgggccttgtgtcgccttgtatcggcccaggtaggttgttggcctcttacttgggctgacctgacccccgaaagagaaacagacaactctgttctcaggattggggatggacggcttcggccaagcgttttagcctcattcactcaggccccactcagcactctgccagccaagaccattgatttggaaaatccggtccccacccgctaatgagctgttgacactgttgttccttgctgaattggattgttgacttgtagttcagaggcgtacaactagttggcgattagacttgttatgtgatgttaccagcctgaaatgcgatcaccccgtaggaaataaagcaggcatctctggacctcatccaccctgggcctctgctgtccttgatcaca

SEQ ID NO: 161399 - DNA, 1159 bp, Homo sapiens
  Payload ID: 11512
  Gene Symbol: NXN
  Gene Name: nucleoredoxin
  ENST ID: ENST00000571684
  CDS Start-End: 1-691
gtgcaggaacgggctgctggtgatccgagatgacccagaaggtctggagttcccctggggaccgaaacccttcagggaagtcattgcagggcccttgcttagaaacaatgggcagtctctggagagcagcagcctggaggggtctcacgtgggcgtctatttctccgcacattggtgtccgccctgccgaagcctcacccgggtcctggtggaatcctaccggaagatcaaggaggcaggccagaacttcgagatcatcttcgttagtgcagacaggtcggaggagtccttcaaacagtacttcagtgagatgccctggctcgccgtcccctacacggatgaggcccggcggtcgcgcctcaaccggctgtacggaatccaagattctgaggatgacggagagtccgaggcggccaagcagctgattcagccgatagctgagaaaatcattgccaagtacaaagccaaagaggaggaggcaccccttctgttcttcgtagccggggaggatgacatgactgactccctgcgagattacaccaacctgcctgaggctgcccctttgctcaccatcctggacatgtcagcccgggccaagtacgtgatggacgtggaggagatcacccccgccatcgtggaggcctttgtgaatgacttcctagcagagaagctcaaaccggagcccatctagcgtggctccggcctcctgagacgttatttaaaactcagccttctcctcctccccctccttccttccgcccttggacttacccagcgtgccccgaatcccaccacccaagtgtccagcctctctgtggtgccttgtttctgcagtaaactcctcagccagcaccctggggtgtggaatcagcagcggcagagtccaccgtgtttggagactctgtttgggagcacgggatggccgggggcccggccagagcggggctgcatggctttcgcaaagtcactagcttttggtgaaggatctgccagggtgtcctgggcagagtgagcgtggagggccggtgggtcccgctcgggctctgactctgacgtcggcacacacggccccggacggccagaggggaaccgccgggtgacacctgcgtggaggctgagctgagaaagggcctccgcttagagctgcgggtgaggacgt

SEQ ID NO: 161400 - DNA, 452 bp, Homo sapiens
  Payload ID: 11512
  Gene Symbol: NXN
  Gene Name: nucleoredoxin
  ENST ID: ENST00000627182
  CDS Start-End: 93-452
cccagcgcctgccgccgacgccgccgcctcctcccgccgcgcggaccgtggagcggggtcgcagccgcctgcccgccctgcggtgggccaggatgtcgggcttcctggaggagctgctcggcgagaagctggtgacgggcggcggcgaggaggtggacgtgcactcgctgggcgcccgcggcatctcgctgctgggtctctacttcggctgcagcctcagcgccccctgcgcgcagctcagcgccagcctggccgccttctacgggcgcctgcggggggacgcggcggccgggccggggccgggagcgggggccggggcggcggcggagcccgagccgcggcggcgcctggagatcgtcttcgtgtcctcggaccaggaccagcggcagtggcaggacttcgtgcgggacatgccgtggctggcgctgccctacaaggagaagcacaggaag

SEQ ID NO: 161401 - DNA, 452 bp, Homo sapiens; identical to SEQ ID NO: 161400
  Payload ID: 11512
  Gene Symbol: NXN
  Gene Name: nucleoredoxin
  ENST ID: ENST00000628478
  CDS Start-End: 93-452

SEQ ID NO: 161402 - DNA, 946 bp, Homo sapiens
  Payload ID: 11513
  Gene Symbol: NXNL1
  Gene Name: nucleoredoxin-like 1
  Uniprot ID: Q96CM4
  ENST ID: ENST00000301944
  CDS Start-End: 86-724
aaagatttctatttctgggagaggagccagtcagcagaccggggaccacacgccgcgctgtccccagcacccaacccaggttaccatggcctccctgttctctggccgcatcctgatccgcaacaatagcgaccaggacgagctggatacggaggctgaggtcagtcgcaggctggagaaccggctggtgctgctgttctttggtgctggggcttgtccacagtgccaggccttcgtgcccatcctcaaggacttcttcgtgcggctcacagatgagttctatgtactgcgggcggctcagctggccctggtgtacgtgtcccaggactccacggaggagcagcaggacctgttcctcaaggacatgccaaagaaatggcttttcctgccctttgaggatgatctgaggagggacctcgggcgccagttctcagtggagcgcctgccggcggtcgtggtgctcaagccggacggggacgtgctcactcgcgacggcgccgacgagatccagcgcctgggcaccgcctgcttcgccaactggcaggaggcggccgaggtgctggaccgcaacttccagctgccagaggacctggaggaccaggagccacggagcctcaccgagtgcctgcgccgccacaagtaccgcgtggaaaaggcggcgcgaggcgggcgcgaccccgggggagggggtggggaggagggcggggccggggggctgttctgacccgctagggtggaggagaggagtggggtttgttgatgaacctccacccccaccccacccccgcacgcctgtaatcccagcacttggggaggccaaggcgggaggatcgcttgagcccagaggttcgagatcaacctgggcaagagagtgagaccctgactctacgaaaattaaaagttagcccggtgtggtggcgcgcacctgtggcttagctaccctgaa

SEQ ID NO: 161403 - DNA, 805 bp, Homo sapiens
  Payload ID: 11514
  Gene Symbol: NXNL2
  Gene Name: nucleoredoxin-like 2
  Uniprot ID: Q5VZ03
  ENST ID: ENST00000375854
  CDS Start-End: 335-805
aggagtgtgggcggggcgcagttgggggagggtgcagagacctgagggcttgaggttgcctggctggccccgctcccagaggcgggtgccgcgctgtcgcccaggtatctggggtctctggtgtctgagtgtctcattgtcggcgcgaacacaattgctccagccacaggcgaggcctggccaaggtgtgggcgcatctggggcaggtcttgagaggtccagcgcccggtggtgcggacagaggcggggcaccgcggcgctcgccgccgcctccccgcaggtgatcatcctcctgcaggtgtcctcgggtctcaggtggctgcgtgtctgcgccatggttgacattctgggcgagcggcacctggtgacctgtaagggcgcgacggtggaggccgaggcggcgctgcagaacaaggtggtggcactgtacttcgcggcggcccggtgcgcgccgagccgcgacttcacgccgctgctctgcgacttctatacggcgctggtggccgaggcgcggcggcccgcgcccttcgaagtggtcttcgtgtcagccgacggcagctcccaggagatgctggacttcatgcgcgagctgcatggcgcctggctggcgctgcccttccacgacccctaccggcatgagctgaggaagaggtacaacgtcacagccatccccaagcttgtgattgtgaaacaaaatggggaggtcatcaccaacaaagggcggaagcagatccgggaacgggggttggcctgcttccaggactgggtggaggcggccgatatcttccagaatttctccgtttga

SEQ ID NO: 161404 - DNA, 1457 bp, Homo sapiens
  Payload ID: 11514
  Gene Symbol: NXNL2
  Gene Name: nucleoredoxin-like 2
  Uniprot ID: Q5VZ03
  ENST ID: ENST00000375855
  CDS Start-End: 331-738
gtgtgggcggggcgcagttgggggagggtgcagagacctgagggcttgaggttgcctggctggccccgctcccagaggcgggtgccgcgctgtcgcccaggtatctggggtctctggtgtctgagtgtctcattgtcggcgcgaacacaattgctccagccacaggcgaggcctggccaaggtgtgggcgcatctggggcaggtcttgagaggtccagcgcccggtggtgcggacagaggcggggcaccgcggcgctcgccgccgcctccccgcaggtgatcatcctcctgcaggtgtcctcgggtctcaggtggctgcgtgtctgcgccatggttgacattctgggcgagcggcacctggtgacctgtaagggcgcgacggtggaggccgaggcggcgctgcagaacaaggtggtggcactgtacttcgcggcggcccggtgcgcgccgagccgcgacttcacgccgctgctctgcgacttctatacggcgctggtggccgaggcgcggcggcccgcgcccttcgaagtggtcttcgtgtcagccgacggcagctcccaggagatgctggacttcatgcgcgagctgcatggcgcctggctggcgctgcccttccacgacccctaccggcaacggagtctcgctctgttgcccaggctggagtgcagtggcgtgatcttagctcactgcaacctttgcctcctgggttcaagtgattctctagccttagcctcctgagcatctgggactacagccattgctgtgaattacgtgagggaaagatattgaagaggagttggacactccgagagtgcagctgttctccccccgcaccatccgtgtcctgcattctgcgagtctgtgctcattaacaatgtgctgtgaccatgtgactcagcaatcctgctgctgggtatatacccgaaagaaaggaaaaggaagccagtatattgaagaggtatctgcacccccatgtttattgcagcactgttcacaacagccaagatttggaagcaacctaagtgtccatcaacagatgaatggataaagaaaacgtggtacatatacacaatggagtactcttcagccattaaaaaaatgagattctgtcatttgcaataatatagatggaaaaggaggcccttatgtgaagtgaaataagccaggcacagaaagacaaacatcacatgttctcacttatttgtgggatctaatgatcaaaacaattgaactcttggacatagagagtagaaggttggttaccagaagctggaaaggaaagtggggttgggaggaaggtgggaatggttaataggtacaaaaaaatacaaagaataaataagacctaatatttgatagcacaacagtgtgactactgtcaataatcatttaattgtacatttaaaaataactataattgcattgtttgtaacacaaaagataaatgcttgagggga

SEQ ID NO: 161405 - DNA, 739 bp, Homo sapiens
  Payload ID: 11514
  Gene Symbol: NXNL2
  Gene Name: nucleoredoxin-like 2
  ENST ID: ENST00000618633
  CDS Start-End: 335-739
aggagtgtgggcggggcgcagttgggggagggtgcagagacctgagggcttgaggttgcctggctggccccgctcccagaggcgggtgccgcgctgtcgcccaggtatctggggtctctggtgtctgagtgtctcattgtcggcgcgaacacaattgctccagccacaggcgaggcctggccaaggtgtgggcgcatctggggcaggtcttgagaggtccagcgcccggtggtgcggacagaggcggggcaccgcggcgctcgccgccgcctccccgcaggtgatcatcctcctgcaggtgtcctcgggtctcaggtggctgcgtgtctgcgccatggttgacattctgggcgagcggcacctggtgacctgtaagggcgcgacggtggaggccgaggcggcgctgcagaacaaggtggtggcactgtacttcgcggcggcccggtgcgcgccgagccgcgacttcacgccgctgctctgcgacttctatacggcgctggtggccgaggcgcggcggcccgcgcccttcgaagtggtcttcgtgtcagccgacggcagctcccaggagatgctggacttcatgcgcgagctgcatggcgcctggctggcgctgcccttccacgacccctaccggcataaagtttcgctcttgttgcccaggctagagtgcaatggcgcaggctcagctcactgcaacctctgcctcctgggttcaagtgattctcctgcctcagcctcc

SEQ ID NO: 161406 - DNA, 1762 bp, Homo sapiens
  Payload ID: 11515
  Gene Symbol: NTPCR
  Gene Name: nucleoside-triphosphatase, cancer-related
  ENST ID: ENST00000366627
  CDS Start-End: 72-758
ggacctgacctgaattgcgaccccaacctggactgctcccctgaccgcaacccctacccccgcccaccagtatggcccggcacgtgttcctaacggggcccccaggagttggaaaaacaacattgatccataaagccagtgaggttttaaaatcctctggtgtgcctgttgatggattttataccgaagaagtcagacagggagggagaagaataggattcgatgtcgtcacgttgtccggcacccgggggcctttatcgagagttgggttagagcctccacctggaaaacgtgaatgccgagttgggcagtatgtggtcgacctgacttcttttgagcagttggcactacccgtcttgaggaatgccgactgcagcagtggcccagggcaaagagtgtgcgtcatcgatgagattgggaagatggagctcttcagtcagcttttcattcaagctgttcgtcagacgctgtctaccccagggactataatccttggcacaatcccagttcctaaaggaaagccactggctcttgtagaagaaatcagaaacagaaaggatgtgaaggtgtttaattcaccgtactgtgtcatagaagaccagagcaaattctccagctgtgtatcacagtccactctcacagagcctggctggaggcagaagctactgcaatcactgctgaactcagagtggaagaaaagggcccctgtggtgcccacctctgtgtcgcctcctttctacctcaggtggattccttgaatgcaaacaacaggaatggactttggctaacttaagtgaaaacagcatcaaaaagccttataggctttggagctgtcccatgaagccaaaggaaaagctgactgtcctcatttcaagtggagccacagccgcccaggattgacgcagccaggaccagtagaaatgggatcacaggattgacgcagccaggaccggtagaaatgggatcacgggactgacgcagccaggaccagtagaaatgggatcacgggattgacgcagccaggaccagtagaaatgggatcagcttctggcacttgctgcgtgagctcactcctcttggggtgcagatctcagtcactcctcttggggtacagatctcagagaagttgccagggcctggcttgcccacttgttggctgggggcaagtttcctagaccgtacagtctcctaaagacaaccagagcactcttccaagaagggtgagcaggtgccaggaaccagaattgacgaggtccgctctgcatctcctcttcagacatgtattggcacctattgtatgccaggccccctcttcagatacaaccaccctgaacctcagaaggcttccacatgcactccctgctcttaccgggaaccttggctcagccccttttccatggttcacctgtcgaaattacatccaggcttaagcacccctggaagcctttcctgcccctgaccccacacatgcccctgttcctgcctgccccccagactccttcattgtccttgttcatgcctgtcctgtcctggtctgcgagctccatgaggtcagggtccttacctgtggtgcttctctatgcgcatctctgtgcctggctcctgtttgcccttccaccccatcagcgtgtgttgagtggatggatattatatgggccaagtaggaaggcactgtgatgggagcagagatggcccttcctttaccctggggcactcgggatggtgtggtagtgaaagaaaaataaacagatcatcgggtaaa

SEQ ID NO: 161407 - DNA, 6311 bp, Homo sapiens
  Payload ID: 11515
  Gene Symbol: NTPCR
  Gene Name: nucleoside-triphosphatase, cancer-related
  Uniprot ID: Q9BSD7
  ENST ID: ENST00000366628
  CDS Start-End: 88-660
gtcgcgaccctggtccggacctgacctgaattgcgaccccaacctggactgctcccctgaccgcaacccctacccccgcccaccagtatggcccggcacgtgttcctaacggggcccccaggagttggaaaaacaacattgatccataaagccagtgaggttttaaaatcctctggtgtgcctgttgatggattttataccgaagaagtcagacagggagggagaagaataggattcgatgtcgtcacgttgtccggcacccgggggcctttatcgagagttgggttagagcctccacctggaaaacgtgaatgccgagttgggcagtatgtggtcgacctgacttcttttgagcagttggcactacccgtcttgaggaatgccgactgcagcagtggcccagggcaaagagtgtgcgtcatcgatgagattgggaagatggagctcttcagtcagcttttcattcaagctgttcgtcagacgctgtctaccccagggactataatccttggcacaatcccagttcctaaaggaaagccactggctcttgtagaagaaatcagaaacagaaaggatgtgaaggtgtttaatgtcaccaaggaaaacagaaaccaccttctgccagatatcgtgacgtgcgtgcagagcagcaggaagtgaagacacgtgcattcctgccttccgtgaaggagtgcccagttcaagaggagcctgatggagccctgcctgtcgaggctgtatgcctatggggttatggaaccttgtgggcttttctagagaaaactcaacagctgtttcccataaaatgtttaaaagatcaaattagccttaatgctggattgtctgtacaagattaactatccattgtggcttatctatgcttaaagatttcttgtttatttcctcttgcagtcatgcacatgatttgggtaaactgtgagatgagaaatggttttcagagtattagatggaattcacccccgttgaagtttataaatgtgttcaggggaagcgggaggaaagagttcactgcctaatcagttttgcatgtcatgaaaattaaattcctctccaggtgcagcttcagcctcatgcaacttaaagtgataacagttatttgattttttaaaaaatattattccaaaagaaaaccattttaggtcatctcccccaactctgtttgcttactgcttaataaatataaaaataaatctgatggttacagacaggaggcattgtgtgggaggaatacacaacctttggaagtgttgatagcatctgatattcagccgaccagatgacaagagctcaggcccacgggtttgcataagagcactgctttgccttagtttactcgggagcaattttgaatctttctatgcctagtttcccttccagaaaagcaggaagtggctgtcatctcaggagtgatgtcacaccacagaaggaaactgtcaaccactccacacaactgtggagagtgcccagtgccaggggctgggcttatcaggaataatggtgtagcaatgcggagttcagcccataacaggggtactataaaaatgaagtaggaaagtagaagagacccctgaaaccccagaactgatagaggataaaaacttccctccaagtggtagatggtactggagtgataaacagttcagtgtttttaggtcatttttggtgaagatctatgaatttccaggatttttttttaacaaattagcattggctacaaacccactggtataagcagcagtgtgccttctctctaactgtggacaagtcgggcatgtggcgggtgaggagccctgggctgggcactggggcacagtgaatggggcgggaggggctcacatcaaaaccaaaatggcacgcagcccaggtctggttcctccatcagtgtctctttcctcagcgcttttcttccgaggtaactttgtgaagcttgacttggacttgcctagccttggagggaccacaacagggaggcctaatagattatgaactaagccctcaaaagggctacctgcccaggaggaggaagtgggcatctccttccacagtccctgcctggcggggctgttcagggagactgagttccgagctcaggatgtctggcaggctggctgtgacttccagccaccatcaccaggacaccggtgtgggctgcatgcctcagtgggccaggagaggcacggcctctgagttgggtagaggcttcccacaaaggcctgggaacctgatcctggccgtaaatctgaaagtaccacagccctcaggagaaccaagagatagggaggcaggctggggaaatgtcatcaatgtgcacccaggcgtggtggagctggtcagccccagctggagtgggaccccatcaagatggagcctttcctggcacctccgggaggccgttttgcgtttccgcccttcatgcatctgaaacaccaagggccatgttccttctggtgcttgtccttttgagcttggtgtttcagccgtgtctgttttgtagactttgattttgtcttaaatgagaaagaaagctggtgaaggttatttcaaagttaaatagctagtctgaggggcttatcactgaagccagttgtgcttatgtggggtgggagtgtcactgcctacttgaaagtatgcacttgtgtggaacagattcagggtggcccctagcacttggggctgcgggagcttctgcacactttccctttaacggtaaagagacaagcttggagtgtttaagtggttcgttcaggagcacagtgatagcggtgacaaaggagatttgaacccacgtctgcgtggctccaaagttcactctttcatcactccctgctgcgtccttcttgaggctttagcatttttagtgtgttttgtgcccccagacctcagagttgacatttagcagtgataaactgctgtaaatccaaagaacgtttagtgtctcttgtggtgaggtcctgaaatgattgttgtattagtcaaacagaatgatcatggagcatgtatggagatgtcagatgcaatccctgtattgtaaggcaatgacatttaatgaaggataagatgaattcacagataactagaactcagggccaaacgcacacagcctgtagcaacagtgtcatgctgagatttaaaggaagaagaggtgccgtggcagaactccacgtgaccgtcccctccctgcacgcagccaggatgagaggagcagagctgagcgccacctccctgtcggtgccacggctgaggtgaggagctcttgccggatggtggggtgggggcagcagggcagattgaagtcagggattctcttatacctgagtttggaatgcctcctattcaaacaaagcaaaatatctaacagatggttggatatgagtctcagggaggaattcaatttgaaaagcacagaattaacatgtattgcttatatgaagaatctcagctagaataacaaggtcggatgggaggaatcaggactgatttgaagcacgatttactaaatcattctttccttttcctccttagcagatcataccgccagctgcttaacacgtaatagtttaataaattgtttcttcttacctctcagtgagggtaagcacatgcagggagatgggtgagtcttttaaatggatagtgtcatctctgatgatcagccttgacagggagagatcctagtaaagctgcaaattcaggcactcagttcccagccctccagttatcaagggggtgggaacgctggtgggctggaaaatgtggaacagacctgctcctcttcttttcctgccaattaccgtattcatagaaggttgtgtctgtggatcacacctgtgtgtgtgctgatggcggatgcttgtgtagcatagtgacttgggacaaaacagcatggtagatgaggctggagacgggtgggctaagtaaacaggcattgcattgcacattttgtgggcaaagaagttgaagcatcgcatgattttaacaaattacttgccagatgatttcaacacactgcaaaatttagaatcaataatgccaaattggccacatgatttatataaaaccaagtgctatggttttaatattatctttagaggagaaaccattttgatctgtgtccaaataactcttttttttttttttttttttgagacagagtctcactctgtcgcttgagctggagtgcagtggtgctatctcggctcactgtaacctccgcctcctgggttcaagcgattctcctgcctcaacctcctgagtagctgggattacaggcacccgccaccacgcccagctaattttttgtatttttagtagagacggggtttcaccatgttggccaagctggtctcgaactcctgacctcatgatttgcctgcctcagcctacaaaagtgctgggattacaggcgtgagccaccgtgcccagcccccaaataactcttgaactggaaaataactctttagctatatactggcagaatatttgaacaactctagcaagaaatgtcagtttagggatgcctcctctaaatgggggcttagaatataacattttgcaggaagtcctttctgatacatagctgactagatgaaggaccagattaacaagttcatgagttgtaaatataaaagttgtgtaccacgataaaaaagaaaaagaagtatggctgcactgttgatggctggtcaaacagcccccaagaatcctggggtgactccaatactgccaccttttctctgtgggtgcagttgcctgcggatgtgtgtgcacatctgtgcctcggtatgcacactcgagatgcccgctctcatagacggtgcagagcgtcactgcattcctatctgattaatgtgaccttagtgttgtagatacactgtgtcactttcatcctccctcctccccacaaaagatgccacgagaactcgtgaactgtgataagcaatgaacagaataactgttgaagaagcacctcatgaacctccccagagaaacgggatggaggagcacccagggtgctcttgctctcttgcctgcgctgccatttccttccagcctgggtttctagctctttggggagattccccgttttgtggaatgctttctgtgtttcctacttctggatgcctaaggagtggccagtcatactcctggctgaccactgccaggcaccgtggttttcctcactgaactcaaggagtcaccctccgtggggaggccacactcacagctccaggcctgccatttagcccttggggcttggctgtaaagttgcccaagaggattacaggagctgccagccaagtttaatttggccaccttagagaactgcagcaaggccctatcagcttcccattagacaaacaactgcatttaaattaaataaagtttgcacctctagggagtgctgacctgaaaataagaaccttctgtctgtgattatagagtacacttgcttttattaattgctgattcttagtttacaaaaaaaaaaattagaaaagcattaccatttactttccaaggggcaagagattctctacaatacccttcccccaaccctctcctcaaatttccaaatcctaaatactttgaagaaatttgtgtgactgtttaaaattgagtatttccttctaactattgtcttttgaaaagggatggttcaccaggccagtgatactctatggactgcattttgggacctctaccccagcaaggatacaggttcctggggtcttgaagatgggaaaagttgtctcagaatttacccaaatgtcgttctcaccataaaagatatacttgtagaaatgagaagcttcagtataactcaaaacactggacgcagcaataactataaacattttaatttcaaaaacaaaggtgtgtgcgatgttgtgtgcacagtaagggttgcggggcttggagaacaagcacgcgtccctgtgaagcccgcagggtgctggcggcccaccaatcgcctggactacagtgaggagcattgtgtgactccgcggtggatttccatgcaccgaatggactcagtttctaaactcacatcctaacgtatcctggcttttcacagaatactggagacatgactgcatgcatgatcacggttcttgttgtgaagctgccaccatgttacgcttaacagctgcataaatattataaagaaatagggttttcttgacacttagatttaaccttaatgcatctgcccagctgatggtatcagacgtgctgctgttcatttctttttcatggtaacagtaatgtataaagtgccgatgatgtaa

SEQ ID NO: 161408 - DNA, 4441 bp, Homo sapiens
  Payload ID: 11516
  Gene Symbol: NAP1L1
  Gene Name: nucleosome assembly protein 1-like 1
  Uniprot ID: P55209
  ENST ID: ENST00000261182
  CDS Start-End: 413-1588
aaaagatatggtggggtgcttaacagaggaggttagacaccggcgggaaccagaggagcccaagcgcggcgcctgggcctcggggctgcaggagtcctcggtgggggtatggaggtcgccggggaaggaggacggttcagttgctaggcaacccggcctggacccgcctctcgctcgcgttgctgggagactacaaggccgggaggagggcggcgaaagggccctacgtgctgacgctaattgtatatgagcgcgagcggcgggctcttgggtcttttttagcgccatctgctcgcggcgccgcctcctgctcctcccgctgctgctgccgctgccgccctgagtcactgcctgcgcagctccggccgcctggctccccatactagtcgccgatatttggagttcttacaacatggcagacattgacaacaaagaacagtctgaacttgatcaagatttggatgatgttgaagaagtagaagaagaggaaactggtgaagaaacaaaactcaaagcacgtcagctaactgttcagatgatgcaaaatcctcagattcttgcagcccttcaagaaagacttgatggtctggtagaaacaccaacaggatacattgaaagcctgcctagggtagttaaaagacgagtgaatgctctcaaaaacctgcaagttaaatgtgcacagatagaagccaaattctatgaggaagttcacgatcttgaaaggaagtatgctgttctctatcagcctctatttgataagcgatttgaaattattaatgcaatttatgaacctacggaagaagaatgtgaatggaaaccagatgaagaagatgagatttcggaggaattgaaagaaaaggccaagattgaagatgagaaaaaagatgaagaaaaagaagaccccaaaggaattcctgaattttggttaactgtttttaagaatgttgacttgctcagtgatatggttcaggaacacgatgaacctattctgaagcacttgaaagatattaaagtgaagttctcagatgctggccagcctatgagttttgtcttagaatttcactttgaacccaatgaatattttacaaatgaagtgctgacaaagacatacaggatgaggtcagaaccagatgattctgatcccttttcttttgatggaccagaaattatgggttgtacagggtgccagatagattggaaaaaaggaaagaatgtcactttgaaaactattaagaagaagcagaaacacaagggacgtgggacagttcgtactgtgactaaaacagtttccaatgactctttctttaacttttttgcccctcctgaagttcctgagagtggagatctggatgatgatgctgaagctatccttgctgcagacttcgaaattggtcactttttacgtgagcgtataatcccaagatcagtgttatattttactggagaagctattgaagatgatgatgatgattatgatgaagaaggtgaagaagcggatgaggaaggggaagaagaaggagatgaggaaaatgatccagactatgacccaaagaaggatcaaaacccagcagagtgcaagcagcagtgaagcaggatgtatgtggccttgaggataacctgcactggtctaccttctgcttccctggaaaggatgaatttacatcatttgacaagcctattttcaagttatttgttgtttgtttgcttgtttttgtttttgcagctaaaataaaaatttcaaatacaattttagttcttacaagataatgtcttaattttgtaccaattcaggtagaagtagaggcctaccttgaattaagggttatactcagtttttaacacattgttgaagaaaaggtaccagctttggaacgagatgctatactaataagcaagtgtaaaaaaaaaaaaaaaagaggaagaaaatcttaagtgattgatgctgttttcttttaaaaaaaaaaaaaaaaattcattttctttgggttagagctagagagaaggccccaagcttctatggtttcttctaattcttattgcttaaagtatgagtatgtcacttacccgtgcttctgtttactgtgtaattaaaatgggtagtactgtttacctaactacctcatggatgtgttaaggcatattgagttaaatctcatataatgtttctcaatcttgttaaaagctcaaaattttgggcctatttgtaatgccagtgtgacactaagcattttgttcacaccacgctttgataactaaactggaaaacaaaggtgttaagtacctctgttctggatctgggcagtcagcactctttttagatctttgtgtggctcctatttttatagaagtggagggatgcactatttcacaaggtccaagatttgttttcagatatttttgatgactgtattgtaaatactacagggatagcactatagtattgtagtcatgagacttaaagtggaaataagactatttttgacaaaagatgccattaaatttcagactgtagagccacatttacaatacctcaggctaattactgttaattttggggttgaacttttttttgacagtgagggtggattattggattgtcattagaggaaggtctagatttcctgctcttaataaaattacattgaattgatttttagaggtaatgaaaacttcctttctgagaagttagtgttaaggtcttggaatgtgaacacattgtttgtagtgctatccattcctctcctgagattttaacttactactggaaatccttaaccaattataatagctttttttctttattttcaaaatgatttcctttgctttgattagacactatgtgctttttttttttaaccatagttcatcgaaatgcagctttttctgaacttcaaagatagaatcccatttttaatgaactgaagtagcaaaatcatctttttcattctttaggaaatagctattgccaaagtgaaggtgtagataatacctagtcttgttacataaaggggatgtggtttgcagaagaattttctttataaaattgaagttttaagggacgtcagtgtttatgccatttttccagttccaaaatgattccattccattctagaaatttgaagtatgtaacctgaaatccttaataaaatttggatttaattttataaaatgtactggtgatattttgggtgtttttttttaaatgaatgtatatactttttttttgaagagtggagagtagtgatgtctagagggagctattttgtgctgaggccactatgttctgtaaatatataattttaagagcaacctcacaatccctgctaagtggagtttattatttgaagactaaaatggaattccatagttcctgataggttatattctgggttattattctgagttatctacaaacatttttgagatttgtctttacactctgattgtagtttccagcagcccatgcacactgccaagtaagtctcattttttcctgttagaaatggtgaaatatcatataatcacttataaagaaaactgatatgaaaaaattttagagttgtttgctttatggtcactcaagtagggtaagtgttccacaaattccacaagttgatagtttaacatggatgtctgaaagccacatatataatttcttaggattcttaaattagtaaatctagcttactgaagcagtattagcatcactattttagattgcaaaaataccttaattgtgtggaactggcttgtagagtggtacttaagaaaaatgggattctacctctatttctgttttagcacacttaatcaggaaaggatatattaactttcataaaaatatttttgttgtgtgaataggttaatgatatggtaaggcccctaaaataactgaattaattgtttattgtaattgtaggccattcccattattaaaaataaagacaaaacttgaagtaactgaaaatcttatcgtgctatgtagaaatattgaactaatattcaaatatttgaatgctttggtttcagggattggtttaaaattggagtccttttttatgggttagtcttacaaaaatttaagcctttatatttttgactttaaatcaaaacaaatgttattttaaatgtacagaatagattggtagtgcagaagagtgtaagttcttcataggagctttagaaaagagaaatatgtgctaattcagtttttttttaatctgcactgtacatatatacttggtaattatgagcttgattttgtttttggaaatatgtgttcataatttaggtaatttgctacttaaagcactaagtctctgatacctgaaaagtacatgtaaatggtgatggtgaaataatactgcagttaacttaatagatgtatactggtgatttttgtatgctggattaaaactccagatattaaaatataacctgg

SEQ ID NO: 161409 - DNA, 1896 bp, Homo sapiens
  Payload ID: 11516
  Gene Symbol: NAP1L1
  Gene Name: nucleosome assembly protein 1-like 1
  Uniprot ID: P55209
  ENST ID: ENST00000393263
  CDS Start-End: 121-1296
tcgcggcgccgcctcctgctcctcccgctgctgctgccgctgccgccctgagtcactgcctgcgcagctccggccgcctggctccccatactagtcgccgatatttggagttcttacaacatggcagacattgacaacaaagaacagtctgaacttgatcaagatttggatgatgttgaagaagtagaagaagaggaaactggtgaagaaacaaaactcaaagcacgtcagctaactgttcagatgatgcaaaatcctcagattcttgcagcccttcaagaaagacttgatggtctggtagaaacaccaacaggatacattgaaagcctgcctagggtagttaaaagacgagtgaatgctctcaaaaacctgcaagttaaatgtgcacagatagaagccaaattctatgaggaagttcacgatcttgaaaggaagtatgctgttctctatcagcctctatttgataagcgatttgaaattattaatgcaatttatgaacctacggaagaagaatgtgaatggaaaccagatgaagaagatgagatttcggaggaattgaaagaaaaggccaagattgaagatgagaaaaaagatgaagaaaaagaagaccccaaaggaattcctgaattttggttaactgtttttaagaatgttgacttgctcagtgatatggttcaggaacacgatgaacctattctgaagcacttgaaagatattaaagtgaagttctcagatgctggccagcctatgagttttgtcttagaatttcactttgaacccaatgaatattttacaaatgaagtgctgacaaagacatacaggatgaggtcagaaccagatgattctgatcccttttcttttgatggaccagaaattatgggttgtacagggtgccagatagattggaaaaaaggaaagaatgtcactttgaaaactattaagaagaagcagaaacacaagggacgtgggacagttcgtactgtgactaaaacagtttccaatgactctttctttaacttttttgcccctcctgaagttcctgagagtggagatctggatgatgatgctgaagctatccttgctgcagacttcgaaattggtcactttttacgtgagcgtataatcccaagatcagtgttatattttactggagaagctattgaagatgatgatgatgattatgatgaagaaggtgaagaagcggatgaggaaggggaagaagaaggagatgaggaaaatgatccagactatgacccaaagaaggatcaaaacccagcagagtgcaagcagcagtgaagcaggatgtatgtggccttgaggataacctgcactggtctaccttctgcttccctggaaaggatgaatttacatcatttgacaagcctattttcaagttatttgttgtttgtttgcttgtttttgtttttgcagctaaaataaaaatttcaaatacaattttagttcttacaagataatgtcttaattttgtaccaattcaggtagaagtagaggcctaccttgaattaagggttatactcagtttttaacacattgttgaagaaaaggtaccagctttggaacgagatgctatactaataagcaagtgtaaaaaaaaaaaaaaaagaggaagaaaatcttaagtgattgatgctgttttcttttaaaaaaaaaaaaaaaaattcattttctttgggttagagctagagagaaggccccaagcttctatggtttcttctaattcttattgcttaaagtatgagtatgtcacttacccgtgcttctgtttactgtgtaattaaaatgggtagtactgtttacctaactacctcatggatgtgttaaggcatattgagttaaatctcatataatgtttctcaatcttgttaaaagctcaaa

SEQ ID NO: 161410 - DNA, 2031 bp, Homo sapiens
  Payload ID: 11516
  Gene Symbol: NAP1L1
  Gene Name: nucleosome assembly protein 1-like 1
  Uniprot ID: P55209
  ENST ID: ENST00000431879
  CDS Start-End: 226-1197
cttttttagcgccatctgctcgcggcgccgcctcctgctcctcccgctgctgctgccgctgccgccctgagtcactgcctgcgcagctccggccgcctggctccccatactagtcgccgcaaagaacagtctgaacttgatcaagatttggatgatgttgaagaagtagaagaagaggaaactggtgaagaaacaaaactcaaagcacgtcagctaactgttcagatgatgcaaaatcctcagattcttgcagcccttcaagaaagacttgatggtctggtagaaacaccaacaggatacattgaaagcctgcctagggtagttaaaagacgagtgaatgctctcaaaaacctgcaagttaaatgtgcacagatagaagccaaattctatgaggaagttcacgatcttgaaaggaagtatgctgttctctatcagcctctatttgataaggaggaattgaaagaaaaggccaagattgaagatgagaaaaaagatgaagaaaaagaagaccccaaaggaattcctgaattttggttaactgtttttaagaatgttgacttgctcagtgatatggttcaggaacacgatgaacctattctgaagcacttgaaagatattaaagtgaagttctcagatgctggccagcctatgagttttgtcttagaatttcactttgaacccaatgaatattttacaaatgaagtgctgacaaagacatacaggatgaggtcagaaccagatgattctgatcccttttcttttgatggaccagaaattatgggttgtacagggtgccagatagattggaaaaaaggaaagaatgtcactttgaaaactattaagaagaagcagaaacacaagggacgtgggacagttcgtactgtgactaaaacagtttccaatgactctttctttaacttttttgcccctcctgaagttcctgagagtggagatctggatgatgatgctgaagctatccttgctgcagacttcgaaattggtcactttttacgtgagcgtataatcccaagatcagtgttatattttactggagaagctattgaagatgatgatgatgattatgatgaagaaggtgaagaagcggatgaggaaggggaagaagaaggagatgaggaaaatgatccagactatgacccaaagaaggatcaaaacccagcagagtgcaagcagcagtgaagcaggatgtatgtggccttgaggataacctgcactgtaatagcctaaacacaactcttatttacttacagccttatgtttttgtattttcttggtagactaggtaatttttttttaaaggacaggaaactgatattttaaagaccaatttgttctacctagcattttaactagtttttctgccagctatgttgaatgcacaaattctgtcacgcatgttcattcattgctacataatttggttcttctggaatatttttatgtagctcttggagtacagctatgaaaattaacaactgttaaaggaaataccttttttttttttttgtaattttttccttgaagaaccaaagtattttttcagctggttgttgaatagggttaagtccgcttggattagctgtgcctttcattactttgttacagaaatgcagtgacttatactaagacaatttattgtttaaaaaaaaaattggcaagacaactatatggttaagaatttccagtatgaccacacccaataactgttattagagtgttaatggattattgtgttttaggtgacatagttaactgtaaagtaacctgactcagtatagttactggtaccacagtgaggtgaataaaacgggattttcagaagttagcctgaatttaactgtatttttaaatttaacctccattaactaagcatcttttctttgtggtagggtctaccttctgcttccctggaaaggatgaatttacatcatttgacaagcctattttcaagttatttgttgtttgtttgcttgtttttgtttttgcagctaaaataaaaatttcaaatacaat

SEQ ID NO: 161411 - DNA, 1597 bp, Homo sapiens
  Payload ID: 11516
  Gene Symbol: NAP1L1
  Gene Name: nucleosome assembly protein 1-like 1
  ENST ID: ENST00000544816
  CDS Start-End: 509-1135
gtgctgacgctaattgtatatgagcgcgagcggcgggctcttgggtcttttttagcgccatctgctcgcggcgccgcctcctgctcctcccgctgctgctgccgctgccgccctgagtcactgcctgcgcagctccggccgcctggctccccatactagtcgccgcctgcctagggtagttaaaagacgagtgaatgctctcaaaaacctgcaagttaaatgtgcacagatagaagccaaattctatgaggaagttcacgatcttgaaaggaagtatgctgttctctatcagcctctatttgataagcgatttgaaattattaatgcaatttatgaacctacggaagaagaatgtgaatggaaaccagatgaagaagatgagatttcggaggaattgaaagaaaaggccaagattgaagatgagaaaaaagatgaagaaaaagaagaccccaaaggaattcctgaattttggttaactgtttttaagaatgttgacttgctcagtgatatggttcaggaacacgatgaacctattctgaagcacttgaaagatattaaagtgaagttctcagatgctggccagcctatgagttttgtcttagaatttcactttgaacccaatgaatattttacaaatgaagtgctgacaaagacatacaggatgaggtcagaaccagatgattctgatcccttttcttttgatggaccagaaattatgggttgtacagggtgccagatagattggaaaaaaggaaagaatgtcactttgaaaactattaagaagaagcagaaacacaagggacgtgggacagttcgtactgtgactaaaacagtttccaatgactctttctttaacttttttgcccctcctgaagttcctgagagtggagatctggatgatgatgctgaagctatccttgctgcagacttcgaaattggtcactttttacgtgagcgtataatcccaagatcagtgttatattttactggagaagctattgaagatgatgatgatgattatgatgaagaaggtgaagaagcggatgaggaaggggaagaagaaggagatgaggaaaatgatccagactatgacccaaagaaggatcaaaacccagcagagtgcaagcagcagtgaagcaggatgtatgtggccttgaggataacctgcactgtaatagcctaaacacaactcttatttacttacagccttatgtttttgtattttcttggtagactaggtaatttttttttaaaggacaggaaactgatattttaaagaccaatttgttctacctagcattttaactagtttttctgccagctatgttgaatgcacaaattctgtcacgcatgttcattcattgctacataatttggttcttctggaatatttttatgtagctcttggagtacagctatgaaaattaacaactgttaaaggaaataccttttttttttttttgtaattttttccttgaagaaccaaagtattttttcagctggttgttgaatagggttaagtccgcttggattagctgtgcctttcattactttgttacagaaatgcagtgacttatactaagacaatttattgttt

SEQ ID NO: 161412 - DNA, 1675 bp, Homo sapiens
  Payload ID: 11516
  Gene Symbol: NAP1L1
  Gene Name: nucleosome assembly protein 1-like 1
  ENST ID: ENST00000542344
  CDS Start-End: 227-1276
ctacgtgctgacgctaattgtatatgagcgcgagcggcgggctcttgggtcttttttagcgccatctgctcgcggcgccgcctcctgctcctcccgctgctgctgccgctgccgccctgagtcactgcctgcgcagctccggccgcctggctccccatactagtcgccgatatttggagttcttacaacatggcagacattgacaacacgtcagctaactgttcagatgatgcaaaatcctcagattcttgcagcccttcaagaaagacttgatggtctggtagaaacaccaacaggatacattgaaagcctgcctagggtagttaaaagacgagtgaatgctctcaaaaacctgcaagttaaatgtgcacagatagaagccaaattctatgaggaagttcacgatcttgaaaggaagtatgctgttctctatcagcctctatttgataagcgatttgaaattattaatgcaatttatgaacctacggaagaagaatgtgaatggaaaccagatgaagaagatgagatttcggaattgaaagaaaaggccaagattgaagatgagaaaaaagatgaagaaaaagaagaccccaaaggaattcctgaattttggttaactgtttttaagaatgttgacttgctcagtgatatggttcaggaacacgatgaacctattctgaagcacttgaaagatattaaagtgaagttctcagatgctggccagcctatgagttttgtcttagaatttcactttgaacccaatgaatattttacaaatgaagtgctgacaaagacatacaggatgaggtcagaaccagatgattctgatcccttttcttttgatggaccagaaattatgggttgtacagggtgccagatagattggaaaaaaggaaagaatgtcactttgaaaactattaagaagaagcagaaacacaagggacgtgggacagttcgtactgtgactaaaacagtttccaatgactctttctttaacttttttgcccctcctgaagttcctgagagtggagatctggatgatgatgctgaagctatccttgctgcagacttcgaaattggtcactttttacgtgagcgtataatcccaagatcagtgttatattttactggagaagctattgaagatgatgatgatgattatgatgaagaaggtgaagaagcggatgaggaaggggaagaagaaggagatgaggaaaatgatccagactatgacccaaagaaggatcaaaacccagcagagtgcaagcagcagtgaagcaggatgtatgtggccttgaggataacctgcactgtaatagcctaaacacaactcttatttacttacagccttatgtttttgtattttcttggtagactaggtaatttttttttaaaggacaggaaactgatattttaaagaccaatttgttctacctagcattttaactagtttttctgccagctatgttgaatgcacaaattctgtcacgcatgttcattcattgctacataatttggttcttctggaatatttttatgtagctcttggagtacagctatgaaaattaacaactgttaaaggaaataccttttttttttttttgtaattttttccttgaagaaccaaagtattttttcagctggttgttgaatagggttaagtccgcttggatta

SEQ ID NO: 161413 - DNA, 1686 bp, Homo sapiens
  Payload ID: 11516
  Gene Symbol: NAP1L1
  Gene Name: nucleosome assembly protein 1-like 1
  ENST ID: ENST00000535020
  CDS Start-End: 67-1218
actgcctgcgcagctccggccgcctggctccccatactagtcgccgatatttggagttcttacaacatggcagacattgacaacaaagaacagtctgaacttgatcaagatttggatgatgttgaagaagtagaagaagaggaaactggtgaagaaacaaaactcaaagcacgtcagctaactgttcagatgatgcaaaatcctcagattcttgcagcccttcaagaaagacttgatggtctggtagaaacaccaacaggatacattgaaagcctgcctagggtagttaaaagacgagtgaatgctctcaaaaacctgcaagttaaatgtgcacagatagaagccaaattctatgaggaagttcacgatcttgaaaggaagtatgctgttctctatcagcctctatttgataagcgatttgaaattattaatgcaatttatgaacctacggaagaagaatgtgaatggaaaccagatgaagaagatgagatttcggaggaattgaaagaaaaggccaagattgaagatgagaaaaaagatgaagaaaaagaagaccccaaaggaattcctgaattttggttaactgtttttaagaatgttgacttgctcagtgatatggttcaggaacacgatgaacctattctgaagcacttgaaagatattaaagtgaagttctcagatgctggccagcctatgagttttgtcttagaatttcactttgaacccaatgaatattttacaaatgaagtgctgacaaagacatacaggatgaggtcagaaccagatgattctgatcccttttcttttgatggaccagaaattatgggttgtacagggtgccagatagattggaaaaaaggaaagaatgtcactttgaaaactattaagaagaagcagaaacacaagggacgtgggacagttcgtactgtgactaaaacagtttccaatgactctttctttaacttttttgcccctcctgaagttcctgagagtggagatctggatgatgatgctgaagctatccttgctgcagacttcgaaattggtcactttttacgtgagcgtataatcccaagatcagtgttatattttactggagaagctattgaagatgatgatgatgattatgatgaagaaggtgaagaagcggatgagggttatcagctctttgaagaagtcaaaagctgcagtaaacttttccaacgttggctgcagtaactattttcaataaaagctgtctggatgtctcaagttgtgttgggaaatttttcatattagaagctttcaaattaaattgtattatcatcaaagtctgtaatcatgaaaatctgttgatccgtagagtaacttgtattaaattttccctacattatgagccagtttacctactatgtacatacttcatggatgcattttgaactttaatataggaaggggaagaagaaggagatgaggaaaatgatccagactatgacccaaaggtgagcaaaattagtgctgctttctattaaatttaagatagctaaagtaagagttggtgtttttgaatatcaagtttctctccgttaaagtctttaataaataaagcctattgactggataactttgttttttcagtcccactggcattgtgaacagtacacataatttcagtggacgtttttctaaaaaacattgttttttgtt

SEQ ID NO: 161414 - DNA, 892 bp, Homo sapiens
  Payload ID: 11516
  Gene Symbol: NAP1L1
  Gene Name: nucleosome assembly protein 1-like 1
  ENST ID: ENST00000547529
  CDS Start-End: 1-532
aacaccaacaggatacattgaaagcctgcctagggtagttaaaagacgagtgaatgctctcaaaaacctgcaagttaaatgtgcacagatagaagccaaattctatgaggaagttcacgatcttgaaaggaagtatgctgttctctatcagcctctatttgataagcgatttgaaattattaatgcaatttatgaacctacggaagaagaatgtgaatggaaaccagatgaagaagatgagatttcggaggaattgaaagaaaaggccaagattgaagatgagaaaaaagatgaagaaaaagaagaccccaaaggaattcctgaattttggttaactgtttttaagaatgttgacttgctcagtgatatggttcaggaacacgatgaacctattctgaagcacttgaaagatattaaagtgaagttctcagatgctggccagcctatgagttttgtcttagaatttcactttgaacccaatgaatattttacaaatgaagtgctgacaaagacatacaggatgagttcctgagagtggagatctggatgatgatgctgaagctatccttgctgcagacttcgaaattggtcactttttacgtgagcgtataatcccaagatcagtgttatattttactggagaagctattgaagatgatgatgatgattatgatgaagaaggtgaagaagcggatgaggtaatgtttaccaaatgagcaaataattctctgtggttaacacattgagaagcaaattgaatgacttatgtattcctttgctataatcattctgtgatttgggataaaaacattttggaaaacatgattttagaattctacagccaaacaatgtatgtataaggtttcaataaataaattgcaaaactcagcaa

SEQ ID NO: 161415 - DNA, 760 bp, Homo sapiens
  Payload ID: 11516
  Gene Symbol: NAP1L1
  Gene Name: nucleosome assembly protein 1-like 1
  ENST ID: ENST00000547704
  CDS Start-End: 139-760
ttttttagcgccatctgctcgcggcgccgcctcctgctcctcccgctgctgctgccgctgccgccctgagtcactgcctgcgcagctccggccgcctggctccccatactagtcgccgatatttggagttcttacaacatggcagacattgacaacaaagaacagtctgaacttgatcaagatttggatgatgttgaagaagtagaagaagaggaaactggtgaagaaacaaaactcaaagcacgtcagctaactgttcagatgatgcaaaatcctcagattcttgcagcccttcaagaaagacttgatggtctggtagaaacaccaacaggatacattgaaagcctgcctagggtagttaaaagacgagtgaatgctctcaaaaacctgcaagttaaatgtgcacagatagaagccaaattctatgaggaagttcacgatcttgaaaggaagtatgctgttctctatcagcctctatttgataagcgatttgaaattattaatgcaatttatgaacctacggaagaagaatgtgaatggaaaccagatgaagaagatgagatttcggttagtaccaactttattttggaggaattgaaagaaaaggccaagattgaagatgagaaaaaagatgaagaaaaagaagaccccaaaggaattcctgaattttggttaactgtttttaagaatgttgacttgctcagtgatatggttcaggaacacgatgaacctattctgaagcacttgaaagatattaaag

SEQ ID NO: 161416 - DNA, 818 bp, Homo sapiens
  Payload ID: 11516
  Gene Symbol: NAP1L1
  Gene Name: nucleosome assembly protein 1-like 1
  ENST ID: ENST00000548273
  CDS Start-End: 190-818
ctacgtgctgacgctaattgtatatgagcgcgagcggcgggctcttgggtcttttttagcgccatctgctcgcggcgccgcctcctgctcctcccgctgctgctgccgctgccgccctgagtcactgcctgcgcagctccggccgcctggctccccatactagtcgccgcacgtcagctaactgttcagatgatgcaaaatcctcagattcttgcagcccttcaagaaagacttgatggtctggtagaaacaccaacaggatacattgaaagcctgcctagggtagttaaaagacgagtgaatgctctcaaaaacctgcaagttaaatgtgcacagatagaagccaaattctatgaggaagttcacgatcttgaaaggaagtatgctgttctctatcagcctctatttgataagcgatttgaaattattaatgcaatttatgaacctacggaagaagaatgtgaatggaaaccagatgaagaagatgagatttcggaggaattgaaagaaaaggccaagattgaagatgagaaaaaagatgaagaaaaagaagaccccaaaggaattcctgaattttggttaactgtttttaagaatgttgacttgctcagtgatatggttcaggaacacgatgaacctattctgaagcacttgaaagatattaaagtgaagttctcagatgctggccagcctatgagttttgtcttagaatttcactttgaacccaatgaatattttacaaatgaagtgctgacaaagacatacaggatgaggtcagaaccagatgattctgatcccttttcttttgatggaccaga

SEQ ID NO: 161417 - DNA, 1009 bp, Homo sapiens
  Payload ID: 11516
  Gene Symbol: NAP1L1
  Gene Name: nucleosome assembly protein 1-like 1
  ENST ID: ENST00000552147
  CDS Start-End: 1-597
actgttcagatgatgcaaaatcctcagattcttgcagcccttcaagaaagacttgatggtctggtagaaacaccaacaggatacattgaaagcctgcctagggtagttaaaagacgagtgaatgctctcaaaaacctgcaagttaaatgtgcacagatagaagccaaattctatgaggaagttcacgatcttgaaaggaagtatgctgttctctatcagcctctatttgataagcgatttgaaattattaatgcaatttatgaacctacggaagaagaatgtgaatggaaaccagatgaagaagatgagatttcggaattgaaagaaaaggccaagattgaagatgagaaaaaagatgaagaaaaagaagaccccaaaggaattcctgaattttggttaactgtttttaagaatgttgacttgctcagtgatatggttcaggaacacgatgaacctattctgaagcacttgaaagatattaaagtgaagttctcagatgctggccagcctatgagttttgtcttagaatttcactttgaacccaatgaatattttacaaatgaagtgctgacaaagacatacaggatgagttcctgagagtggagatctggatgatgatgctgaagctatccttgctgcagacttcgaaattggtcactttttacgtgagcgtataatcccaagatcagtgttatattttactggagaagctattgaagatgatgatgatgattatgatgaagaaggtgaagaagcggatgaggaaggggaagaagaaggagatgaggaaaatgatccagactatgacccaaagaaggatcaaaacccagcagagtgcaagcagcagtgaagcaggatgtatgtggccttgaggataacctgcactggtctaccttctgcttccctggaaaggatgaatttacatcatttgacaagcctattttcaagttatttgttgtttgtttgcttgtttttgtttttgcagctaaaataaaaatttcaaatacaa

SEQ ID NO: 161418 - DNA, 1526 bp, Homo sapiens
  Payload ID: 11516
  Gene Symbol: NAP1L1
  Gene Name: nucleosome assembly protein 1-like 1
  ENST ID: ENST00000552342
  CDS Start-End: 114-1253
gccgcctcctgctcctcccgctgctgctgccgctgccgccctgagtcactgcctgcgcagctccggccgcctggctccccatactagtcgccgatatttggagttcttacaacatggcagacattgacaacaaagaacagtctgaacttgatcaagatttggatgatgttgaagaagtagaagaagaggaaactggtgaagaaacaaaactcaaagcacgtcagctaactgttcagatgatgcaaaatcctcagattcttgcagcccttcaagaaagacttgatggtctggtagaaacaccaacaggatacattgaaagcctgcctagggtagttaaaagacgagtgaatgctctcaaaaacctgcaagttaaatgtgcacagatagaagccaaattctatgaggaagttcacgatcttgaaaggaagtatgctgttctctatcagcctctatttgataagcgatttgaaattattaatgcaatttatgaacctacggaagaagaatgtgaatggaaaccagatgaagaagatgagatttcgattccagcttcttgtttgggtgaattttccacagaggaattgaaagaaaaggccaagattgaagatgagaaaaaagatgaagaaaaagaagaccccaaaggaattcctgaattttggttaactgtttttaagaatgttgacttgctcagtgatatggttcaggaacacgatgaacctattctgaagcacttgaaagatattaaagtgaagttctcagatgctggccagcctatgagttttgtcttagaatttcactttgaacccaatgaatattttacaaatgaagtgctgacaaagacatacaggatgaggtcagaaccagatgattctgatcccttttcttttgatggaccagaaattatgggttgtacagggtgccagatagattggaaaaaaggaaagaatgtcactttgaaaactattaagaagaagcagaaacacaagggacgtgggacagttcgtactgtgactaaaacagtttccaatgactctttctttaacttttttgcccctcctgaagttcctgagagtggagatctggatgatgatgctgaagctatccttgctgcagacttcgaaattggtcactttttacgtgagcgtataatcccaagatcagtgttatattttactggagaagctattgaagatgatgatgatgattatgatgaagaaggtgaagaagcggatgaggtaatgtttaccaaatgagcaaataattctctgtggttaacacattgagaagcaaattgaatgacttatgtattcctttgctataatcattctgtgatttgggataaaaacattttggaaaacatgattttagaattctacagccaaacaatgtatgtataaggtttcaataaataaattgcaaaactcagcaacatttttttatttcaaataattttgttctgctgcagggttatcagctctttgaagaagtcaaaagctgcagtaaacttttccaacgttggctgcagt

SEQ ID NO: 161419 - DNA, 1838 bp, Homo sapiens
  Payload ID: 11516
  Gene Symbol: NAP1L1
  Gene Name: nucleosome assembly protein 1-like 1
  Uniprot ID: P55209
  ENST ID: ENST00000549596
  CDS Start-End: 140-1246
cttttttagcgccatctgctcgcggcgccgcctcctgctcctcccgctgctgctgccgctgccgccctgagtcactgcctgcgcagctccggccgcctggctccccatactagtcgccgatatttggagttcttacaacatggcagacattgacaacaaagaacagtctgaacttgatcaagatttggatgatgttgaagaagtagaagaagaggaaactggtgaagaaacaaaactcaaagcacgtcagctaactgttcagatgatgcaaaatcctcagattcttgcagcccttcaagaaagacttgatggtctggtagaaacaccaacaggatacattgaaagcctgcctagggtagttaaaagacgagtgaatgctctcaaaaacctgcaagttaaatgtgcacagatagaagccaaattctatgaggaagttcacgatcttgaaaggaagtatgctgttctctatcagcctctatttgataagcgatttgaaattattaatgcaatttatgaacctacggaagaagaatgtgaatggaaaccagatgaagaagatgagatttcggaggaattgaaagaaaaggccaagattgaagatgagaaaaaagatgaagaaaaagaagaccccaaaggaattcctgaattttggttaactgtttttaagaatgttgacttgctcagtgatatggttcaggaacacgatgaacctattctgaagcacttgaaagatattaaagtgaagttctcagatgctggccagcctatgagttttgtcttagaatttcactttgaacccaatgaatattttacaaatgaagtgctgacaaagacatacaggatgaggtcagaaccagatgattctgatcccttttcttttgatggaccagaaattatgggttgtacagggtgccagatagattggaaaaaaggaaagaatgtcactttgaaaactattaagaagaagcagaaacacaagggacgtgggacagttcgtactgtgactaaaacagtttccaatgactctttctttaacttttttgcccctcctgaagttcctgagagtggagatctggatgatgatgctgaagctatccttgctgcagacttcgaaattggtcactttttacgtgagcgtataatcccaagatcagtgttatattttactggagaagctattgaagatgatgatgatgattatgatgaagaaggtgaagaagcggatgaggtaatgtttaccaaatgagcaaataattctctgtggttaacacattgagaagcaaattgaatgacttatgtattcctttgctataatcattctgtgatttgggataaaaacattttggaaaacatgattttagaattctacagccaaacaatgtatgtataaggtttcaataaataaattgcaaaactcagcaacatttttttatttcaaataattttgttctgctgcagggttatcagctctttgaagaagtcaaaagctgcagtaaacttttccaacgttggctgcagtaactattttcaataaaagctgtctggatgtctcaagttgtgttgggaaatttttcatattagaagctttcaaattaaattgtattatcatcaaagtctgtaatcatgaaaatctgttgatccgtagagtaacttgtattaaattttccctacattatgagccagtttacctactatgtacatacttcatggatgcattttgaactttaatataggaaggggaagaagaaggagatgaggaaaatgatccagactatgacccaaaggtgagcaaaattagtgctgctttctattaaatttaagatagctaaagtaagagt

SEQ ID NO: 161420 - DNA, 851 bp, Homo sapiens
  Payload ID: 11516
  Gene Symbol: NAP1L1
  Gene Name: nucleosome assembly protein 1-like 1
  ENST ID: ENST00000550934
  CDS Start-End: 140-851
cttttttagcgccatctgctcgcggcgccgcctcctgctcctcccgctgctgctgccgctgccgccctgagtcactgcctgcgcagctccggccgcctggctccccatactagtcgccgatatttggagttcttacaacatggcagacattgacaacaaagaacagtctgaacttgatcaagatttggatgatgttgaagaagtagaagaagaggaaactggtgaagaaacaaaactcaaagcacgtcagctaactgttcagatgatgcaaaatcctcagattcttgcagcccttcaagaaagacttgatggtctggtagaaacaccaacaggatacattgaaagcctgcctagggtagttaaaagacgagtgaatgctctcaaaaacctgcaagttaaatgtgcacagatagaagccaaattctatgaggaagttcacgatcttgaaaggaagtatgctgttctctatcagcctctatttgataaggaggaattgaaagaaaaggccaagattgaagatgagaaaaaagatgaagaaaaagaagaccccaaaggaattcctgaattttggttaactgtttttaagaatgttgacttgctcagtgatatggttcaggaacacgatgaacctattctgaagcacttgaaagatattaaagtgaagttctcagatgctggccagcctatgagttttgtcttagaatttcactttgaacccaatgaatattttacaaatgaagtgctgacaaagacatacaggatgaggtcagaaccagatgattctgatcccttttcttttgatggaccagaaattatgggttgtacagggtgccagatagattggaaaaaag

SEQ ID NO: 161421 - DNA, 1967 bp, Homo sapiens
  Payload ID: 11516
  Gene Symbol: NAP1L1
  Gene Name: nucleosome assembly protein 1-like 1
  ENST ID: ENST00000547773
  CDS Start-End: 184-1170
gctgacgctaattgtatatgagcgcgagcggcgggctcttgggtcttttttagcgccatctgctcgcggcgccgcctcctgctcctcccgctgctgctgccgctgccgccctgagtcactgcctgcgcagctccggccgcctggctccccatactagtcgccgatatttggagttcttacaacatggcagacattgacaacctgcctagggtagttaaaagacgagtgaatgctctcaaaaacctgcaagttaaatgtgcacagatagaagccaaattctatgaggaagttcacgatcttgaaaggaagtatgctgttctctatcagcctctatttgataagcgatttgaaattattaatgcaatttatgaacctacggaagaagaatgtgaatggaaaccagatgaagaagatgagatttcggaggaattgaaagaaaaggccaagattgaagatgagaaaaaagatgaagaaaaagaagaccccaaaggaattcctgaattttggttaactgtttttaagaatgttgacttgctcagtgatatggttcaggaacacgatgaacctattctgaagcacttgaaagatattaaagtgaagttctcagatgctggccagcctatgagttttgtcttagaatttcactttgaacccaatgaatattttacaaatgaagtgctgacaaagacatacaggatgaggtcagaaccagatgattctgatcccttttcttttgatggaccagaaattatgggttgtacagggtgccagatagattggaaaaaaggaaagaatgtcactttgaaaactattaagaagaagcagaaacacaagggacgtgggacagttcgtactgtgactaaaacagtttccaatgactctttctttaacttttttgcccctcctgaagttcctgagagtggagatctggatgatgatgctgaagctatccttgctgcagacttcgaaattggtcactttttacgtgagcgtataatcccaagatcagtgttatattttactggagaagctattgaagatgatgatgatgattatgatgaagaaggtgaagaagcggatgaggaaggggaagaagaaggagatgaggaaaatgatccagactatgacccaaagaaggatcaaaacccagcagagtgcaagcagcagtgaagcaggatgtatgtggccttgaggataacctgcactgtaatagcctaaacacaactcttatttacttacagccttatgtttttgtattttcttggtagactaggtaatttttttttaaaggacaggaaactgatattttaaagaccaatttgttctacctagcattttaactagtttttctgccagctatgttgaatgcacaaattctgtcacgcatgttcattcattgctacataatttggttcttctggaatatttttatgtagctcttggagtacagctatgaaaattaacaactgttaaaggaaataccttttttttttttttgtaattttttccttgaagaaccaaagtattttttcagctggttgttgaatagggttaagtccgcttggattagctgtgcctttcattactttgttacagaaatgcagtgacttatactaagacaatttattgtttaaaaaaaaaattggcaagacaactatatggttaagaatttccagtatgaccacacccaataactgttattagagtgttaatggattattgtgttttaggtgacatagttaactgtaaagtaacctgactcagtatagttactggtaccacagtgaggtgaataaaacgggattttcagaagttagcctgaatttaactgtatttttaaatttaacctccattaactaagcatcttttctttgtggtagggtctaccttctgcttccctggaaaggatgaatttacatcatttgacaagcctattttcaagttatttgttgtttgtttgcttgttt

SEQ ID NO: 161422 - DNA, 460 bp, Homo sapiens
  Payload ID: 11516
  Gene Symbol: NAP1L1
  Gene Name: nucleosome assembly protein 1-like 1
  ENST ID: ENST00000551524
  CDS Start-End: 118-460
gccagttaggaaaacttcatgagattggattgtcctattaaaaaagcataatacattttcataaaatccttctttcgatgcccttttttttttaaagcacgtcagctaactgttcagatgatgcaaaatcctcagattcttgcagcccttcaagaaagacttgatggtctggtagaaacaccaacaggatacattgaaagcctgcctagggtagttaaaagacgagtgaatgctctcaaaaacctgcaagttaaatgtgcacagatagaagccaaattctatgaggaagttcacgatcttgaaaggaagtatgctgttctctatcagcctctatttgataagcgatttgaaattattaatgcaatttatgaacctacggaagaagaatgtgaatggaaaccagatgaagaagatgagatttcggaggaattgaaagaaaaggccaagattgaagatgaga

SEQ ID NO: 161423 - DNA, 1074 bp, Homo sapiens
  Payload ID: 11516
  Gene Symbol: NAP1L1
  Gene Name: nucleosome assembly protein 1-like 1
  ENST ID: ENST00000551992
  CDS Start-End: 283-1074
ggcggaggctgcgaattccgacgggagggaggggctgtggagggacgagtccccgaggcggggagggggcgggggaggctgcgacgctcccgggctctccgcccattgggggcggccgcgcggggaggggaaacccccggcggcttcgctccacacgtggtaatgggcttcatggccactggctgggcctggttggagacccttgccctcggtctgtgcttactttgaaagttgtagagacggtggaatgtgaaaaggaaggatatttggagttcttacaacatggcagacattgacaacaaagaacagtctgaacttgatcaagatttggatgatgttgaagaagtagaagaagaggaaactggtgaagaaacaaaactcaaagcacgtcagctaactgttcagatgatgcaaaatcctcagattcttgcagcccttcaagaaagacttgatggtctggtagaaacaccaacaggatacattgaaagcctgcctagggtagttaaaagacgagtgaatgctctcaaaaacctgcaagttaaatgtgcacagatagaagccaaattctatgaggaagttcacgatcttgaaaggaagtatgctgttctctatcagcctctatttgataagcgatttgaaattattaatgcaatttatgaacctacggaagaagaatgtgaatggaaaccagatgaagaagatgagatttcggaggaattgaaagaaaaggccaagattgaagatgagaaaaaagatgaagaaaaagaagaccccaaaggaattcctgaattttggttaactgtttttaagaatgttgacttgctcagtgatatggttcaggaacacgatgaacctattctgaagcacttgaaagatattaaagtgaagttctcagatgctggccagcctatgagttttgtcttagaatttcactttgaacccaatgaatattttacaaatgaagtgctgacaaagacatacaggatgaggtcagaaccagatgattctgatcccttttcttttgatggaccagaaattatgggttgtacagggtgccagatagattggaaaaaa

SEQ ID NO: 161424 - DNA, 786 bp, Homo sapiens
  Payload ID: 11516
  Gene Symbol: NAP1L1
  Gene Name: nucleosome assembly protein 1-like 1
  ENST ID: ENST00000551600
  CDS Start-End: 140-786
cttttttagcgccatctgctcgcggcgccgcctcctgctcctcccgctgctgctgccgctgccgccctgagtcactgcctgcgcagctccggccgcctggctccccatactagtcgccgatatttggagttcttacaacatggcagacattgacaacaaagaacagtctgaacttgatcaagatttggatgatgttgaagaagtagaagaagaggaaactggtgaagaaacaaaactcaaagcacgtcagctaactgttcagatgatgcaaaatcctcagattcttgcagcccttcaagaaagacttgatggtctggtagaaacaccaacaggatacattgaaagcctgcctagggtagttaaaagacgagtgaatgctctcaaaaacctgcaagttaaatgtgcacagatagaagccaaattctatgaggaagttcacgatcttgaaaggaagtatgctgttctctatcagcctctatttgataaggctgaggattgttgccattttcaagtgaagacatggaggcttctaagtgacttgcccacaatgaataatggcagagctgtgacacacattcagtgctgtgaggaattgaaagaaaaggccaagattgaagatgagaaaaaagatgaagaaaaagaagaccccaaaggaattcctgaattttggttaactgtttttaagaatgttgacttgctcagtgatatggttcaggaacacgatgaacctattctgaagcacttgaaagatattaaagtgaagttctcagatgctggccagcctat

SEQ ID NO: 161425 - DNA, 623 bp, Homo sapiens
  Payload ID: 11516
  Gene Symbol: NAP1L1
  Gene Name: nucleosome assembly protein 1-like 1
  ENST ID: ENST00000547479
  CDS Start-End: 140-623
cttttttagcgccatctgctcgcggcgccgcctcctgctcctcccgctgctgctgccgctgccgccctgagtcactgcctgcgcagctccggccgcctggctccccatactagtcgccgatatttggagttcttacaacatggcagacattgacaacaaagaacagtctgaacttgatcaagatttggatgatgttgaagaagtagaagaagaggaaactggtgaagaaacaaaactcaaagcacgtcagctaactgttcagatgatgcaaaatcctcagattcttgcagcccttcaagaaagacttgatggtctggtagaaacaccaacaggatacattgaaagggtctcattctgtcagccaggctggagtgcagtggtggtgcaatcttgctcaattcagcctcgacatcccaggctcagcctgcctagggtagttaaaagacgagtgaatgctctcaaaaacctgcaagttaaatgtgcacagatagaagccaaattctatgaggaagttcacgatcttgaaaggaagtatgctgttctctatcagcctctatttgataagcgatttgaaattattaatgcaatttatgaacctacggaagaagaatgtgaatggaaac

SEQ ID NO: 161426 - DNA, 1339 bp, Homo sapiens
  Payload ID: 11516
  Gene Symbol: NAP1L1
  Gene Name: nucleosome assembly protein 1-like 1
  ENST ID: ENST00000548044
  CDS Start-End: 207-1190
tcgcggcgccgcctcctgctcctcccgctgctgctgccgctgccgccctgagtcactgcctgcgcagctccggccgcctggctccccatactagtcgccgcaaagaacagtctgaacttgatcaagatttggatgatgttgaagaagtagaagaagaggaaactggtgaagaaacaaaactcaaagcacgtcagctaactgttcagatgatgcaaaatcctcagattcttgcagcccttcaagaaagacttgatggtctggtagaaacaccaacaggatacattgaaagcctgcctagggtagttaaaagacgagtgaatgctctcaaaaacctgcaagttaaatgtgcacagatagaagccaaattctatgaggaagttcacgatcttgaaaggaagtatgctgttctctatcagcctctatttgataagcgatttgaaattattaatgcaatttatgaacctacggaagaagaatgtgaatggaaaccagatgaagaagatgagatttcggaggaattgaaagaaaaggccaagattgaagatgagaaaaaagatgaagaaaaagaagaccccaaaggaattcctgaattttggttaactgtttttaagaatgttgacttgctcagtgatatggttcaggaacacgatgaacctattctgaagcacttgaaagatattaaagtgaagttctcagatgctggccagcctatgagttttgtcttagaatttcactttgaacccaatgaatattttacaaatgaagtgctgacaaagacatacaggatgaggtcagaaccagatgattctgatcccttttcttttgatggaccagaaattatgggttgtacagggtgccagatagattggaaaaaaggaaagaatgtcactttgaaaactattaagaagaagcagaaacacaagggacgtgggacagttcgtactgtgactaaaacagtttccaatgactctttctttaacttttttgcccctcctgaagttcctgagagtggagatctggatgatgatgctgaagctatccttgctgcagacttcgaaattggtcactttttacgtgagcgtataatcccaagatcagtgttatattttactggagaagctattgaagatgatgatgatgattatgatgaagaaggtgaagaagcggatgaggtaatgtttaccaaatgagcaaataattctctgtggttaacacattgagaagcaaattgaatgacttatgtattcctttgctataatcattctgtgatttgggataaaaacattttggaaaacatgattttagaattctacagccaaacaatgtatgtataaggttt

SEQ ID NO: 161427 - DNA, 1981 bp, Homo sapiens
  Payload ID: 11516
  Gene Symbol: NAP1L1
  Gene Name: nucleosome assembly protein 1-like 1
  ENST ID: ENST00000552056
  CDS Start-End: 1-1158
aaagaacagtctgaacttgatcaagatttggatgatgttgaagaagtagaagaagaggaaactggtgaagaaacaaaactcaaagcacgtcagctaactgttcagatgatgcaaaatcctcagattcttgcagcccttcaagaaagacttgatggtctggtagaaacaccaacaggatacattgaaagcctgcctagggtagttaaaagacgagtgaatgctctcaaaaacctgcaagttaaatgtgcacagatagaagccaaattctatgaggaagttcacgatcttgaaaggaagtatgctgttctctatcagcctctatttgataagcgatttgaaattattaatgcaatttatgaacctacggaagaagaatgtgaatggaaaccagatgaagaagatgagatttcggaggaattgaaagaaaaggccaagattgaagatgagaaaaaagatgaagaaaaagaagaccccaaaggaattcctgaattttggttaactgtttttaagaatgttgacttgctcagtgatatggttcaggaacacgatgaacctattctgaagcacttgaaagatattaaagtgaagttctcagatgctggccagcctatgagttttgtcttagaatttcactttgaacccaatgaatattttacaaatgaagtgctgacaaagacatacaggatgaggtcagaaccagatgattctgatcccttttcttttgatggaccagaaattatgggttgtacagggtgccagatagattggaaaaaaggaaagaatgtcactttgaaaactattaagaagaagcagaaacacaagggacgtgggacagttcgtactgtgactaaaacagtttccaatgactctttctttaacttttttgcccctcctgaagttcctgagagtggagatctggatgatgatgctgaagctatccttgctgcagacttcgaaattggtcactttttacgtgagcgtataatcccaagatcagtgttatattttactggagaagctattgaagatgatgatgatgattatgatgaagaaggtgaagaagcggatgaggaaggggaagaagaaggagatgaggaaaatgatccagactatgacccaaagaaggatcaaaacccagcagagtgcaagcagcagtgaagcaggatggtctaccttctgcttccctggaaaggatgaatttacatcatttgacaagcctattttcaagttatttgttgtttgtttgcttgtttttgtttttgcagctaaaataaaaatttcaaatacaattttagttcttacaagataatgtcttaattttgtaccaattcaggtagaagtagaggcctaccttgaattaagggttatactcagtttttaacacattgttgaagaaaaggtaccagctttggaacgagatgctatactaataagcaagtgtaaaaaaaaaaaaaaaagaggaagaaaatcttaagtgattgatgctgttttcttttaaaaaaaaaaaaaaaaattcattttctttgggttagagctagagagaaggccccaagcttctatggtttcttctaattcttattgcttaaagtatgagtatgtcacttacccgtgcttctgtttactgtgtaattaaaatgggtagtactgtttacctaactacctcatggatgtgttaaggcatattgagttaaatctcatataatgtttctcaatcttgttaaaagctcaaaattttgggcctatttgtaatgccagtgtgacactaagcattttgttcacaccacgctttgataactaaactggaaaacaaaggtgttaagtacctctgttctggatctgggcagtcagcactctttttagatctttgtgtggctcctatttttatagaagtggagggatgcactatttcacaaggtccaagatttgttttcagatatttttgatgactgtattgtaaatactacagggatagcactatagt

SEQ ID NO: 161428 - DNA, 13505 bp, Homo sapiens
  Payload ID: 11516
  Gene Symbol: NAP1L1
  Gene Name: nucleosome assembly protein 1-like 1
  Uniprot ID: P55209
  ENST ID: ENST00000618691
  CDS Start-End: 488-1663
cgggcgccgggcacgcgggccaggccttccccacaactgatggggttgaaatttcctttccggctcagcagggagaaaagatatggtggggtgcttaacagaggaggttagacaccggcgggaaccagaggagcccaagcgcggcgcctgggcctcggggctgcaggagtcctcggtgggggtatggaggtcgccggggaaggaggacggttcagttgctaggcaacccggcctggacccgcctctcgctcgcgttgctgggagactacaaggccgggaggagggcggcgaaagggccctacgtgctgacgctaattgtatatgagcgcgagcggcgggctcttgggtcttttttagcgccatctgctcgcggcgccgcctcctgctcctcccgctgctgctgccgctgccgccctgagtcactgcctgcgcagctccggccgcctggctccccatactagtcgccgatatttggagttcttacaacatggcagacattgacaacaaagaacagtctgaacttgatcaagatttggatgatgttgaagaagtagaagaagaggaaactggtgaagaaacaaaactcaaagcacgtcagctaactgttcagatgatgcaaaatcctcagattcttgcagcccttcaagaaagacttgatggtctggtagaaacaccaacaggatacattgaaagcctgcctagggtagttaaaagacgagtgaatgctctcaaaaacctgcaagttaaatgtgcacagatagaagccaaattctatgaggaagttcacgatcttgaaaggaagtatgctgttctctatcagcctctatttgataagcgatttgaaattattaatgcaatttatgaacctacggaagaagaatgtgaatggaaaccagatgaagaagatgagatttcggaggaattgaaagaaaaggccaagattgaagatgagaaaaaagatgaagaaaaagaagaccccaaaggaattcctgaattttggttaactgtttttaagaatgttgacttgctcagtgatatggttcaggaacacgatgaacctattctgaagcacttgaaagatattaaagtgaagttctcagatgctggccagcctatgagttttgtcttagaatttcactttgaacccaatgaatattttacaaatgaagtgctgacaaagacatacaggatgaggtcagaaccagatgattctgatcccttttcttttgatggaccagaaattatgggttgtacagggtgccagatagattggaaaaaaggaaagaatgtcactttgaaaactattaagaagaagcagaaacacaagggacgtgggacagttcgtactgtgactaaaacagtttccaatgactctttctttaacttttttgcccctcctgaagttcctgagagtggagatctggatgatgatgctgaagctatccttgctgcagacttcgaaattggtcactttttacgtgagcgtataatcccaagatcagtgttatattttactggagaagctattgaagatgatgatgatgattatgatgaagaaggtgaagaagcggatgaggaaggggaagaagaaggagatgaggaaaatgatccagactatgacccaaagaaggatcaaaacccagcagagtgcaagcagcagtgaagcaggatgtatgtggccttgaggataacctgcactgtaatagcctaaacacaactcttatttacttacagccttatgtttttgtattttcttggtagactaggtaatttttttttaaaggacaggaaactgatattttaaagaccaatttgttctacctagcattttaactagtttttctgccagctatgttgaatgcacaaattctgtcacgcatgttcattcattgctacataatttggttcttctggaatatttttatgtagctcttggagtacagctatgaaaattaacaactgttaaaggaaataccttttttttttttttgtaattttttccttgaagaaccaaagtattttttcagctggttgttgaatagggttaagtccgcttggattagctgtgcctttcattactttgttacagaaatgcagtgacttatactaagacaatttattgtttaaaaaaaaaattggcaagacaactatatggttaagaatttccagtatgaccacacccaataactgttattagagtgttaatggattattgtgttttaggtgacatagttaactgtaaagtaacctgactcagtatagttactggtaccacagtgaggtgaataaaacgggattttcagaagttagcctgaatttaactgtatttttaaatttaacctccattaactaagcatcttttctttgtggtagggtctaccttctgcttccctggaaaggatgaatttacatcatttgacaagcctattttcaagttatttgttgtttgtttgcttgtttttgtttttgcagctaaaataaaaatttcaaatacaattttagttcttacaagataatgtcttaattttgtaccaattcaggtagaagtagaggcctaccttgaattaagggttatactcagtttttaacacattgttgaagaaaaggtaccagctttggaacgagatgctatactaataagcaagtgtaaaaaaaaaaaaaaaagaggaagaaaatcttaagtgattgatgctgttttcttttaaaaaaaaaaaaaaaaattcattttctttgggttagagctagagagaaggccccaagcttctatggtttcttctaattcttattgcttaaagtatgagtatgtcacttacccgtgcttctgtttactgtgtaattaaaatgggtagtactgtttacctaactacctcatggatgtgttaaggcatattgagttaaatctcatataatgtttctcaatcttgttaaaagctcaaaattttgggcctatttgtaatgccagtgtgacactaagcattttgttcacaccacgctttgataactaaactggaaaacaaaggtgttaagtacctctgttctggatctgggcagtcagcactctttttagatctttgtgtggctcctatttttatagaagtggagggatgcactatttcacaaggtccaagatttgttttcagatatttttgatgactgtattgtaaatactacagggatagcactatagtattgtagtcatgagacttaaagtggaaataagactatttttgacaaaagatgccattaaatttcagactgtagagccacatttacaatacctcaggctaattactgttaattttggggttgaacttttttttgacagtgagggtggattattggattgtcattagaggaaggtctagatttcctgctcttaataaaattacattgaattgatttttagaggtaatgaaaacttcctttctgagaagttagtgttaaggtcttggaatgtgaacacattgtttgtagtgctatccattcctctcctgagattttaacttactactggaaatccttaaccaattataatagctttttttctttattttcaaaatgatttcctttgctttgattagacactatgtgctttttttttttaaccatagttcatcgaaatgcagctttttctgaacttcaaagatagaatcccatttttaatgaactgaagtagcaaaatcatctttttcattctttaggaaatagctattgccaaagtgaaggtgtagataatacctagtcttgttacataaaggggatgtggtttgcagaagaattttctttataaaattgaagttttaagggacgtcagtgtttatgccatttttccagttccaaaatgattccattccattctagaaatttgaagtatgtaacctgaaatccttaataaaatttggatttaattttataaaatgtactggtgatattttgggtgtttttttttaaatgaatgtatatactttttttttgaagagtggagagtagtgatgtctagagggagctattttgtgctgaggccactatgttctgtaaatatataattttaagagcaacctcacaatccctgctaagtggagtttattatttgaagactaaaatggaattccatagttcctgataggttatattctgggttattattctgagttatctacaaacatttttgagatttgtctttacactctgattgtagtttccagcagcccatgcacactgccaagtaagtctcattttttcctgttagaaatggtgaaatatcatataatcacttataaagaaaactgatatgaaaaaattttagagttgtttgctttatggtcactcaagtagggtaagtgttccacaaattccacaagttgatagtttaacatggatgtctgaaagccacatatataatttcttaggattcttaaattagtaaatctagcttactgaagcagtattagcatcactattttagattgcaaaaataccttaattgtgtggaactggcttgtagagtggtacttaagaaaaatgggattctacctctatttctgttttagcacacttaatcaggaaaggatatattaactttcataaaaatatttttgttgtgtgaataggttaatgatatggtaaggcccctaaaataactgaattaattgtttattgtaattgtaggccattcccattattaaaaataaagacaaaacttgaagtaactgaaaatcttatcgtgctatgtagaaatattgaactaatattcaaatatttgaatgctttggtttcagggattggtttaaaattggagtccttttttatgggttagtcttacaaaaatttaagcctttatatttttgactttaaatcaaaacaaatgttattttaaatgtacagaatagattggtagtgcagaagagtgtaagttcttcataggagctttagaaaagagaaatatgtgctaattcagtttttttttaatctgcactgtacatatatacttggtaattatgagcttgattttgtttttggaaatatgtgttcataatttaggtaatttgctacttaaagcactaagtctctgatacctgaaaagtacatgtaaatggtgatggtgaaataatactgcagttaacttaatagatgtatactggtgatttttgtatgctggattaaaactccagatattaaaatataacctggataaaaagccaagttcttggactgattgaggatcacttacatgactttacagaaatggaaacatccttgttggtatatgaaattattttactcaaggataagtattcataagaaattttgattgatgtatattttcaaaaatacagtatgctttgtatcttgtgtttcttccttttgacatcatattgtcaggttttccagtttacaaaaattaagttattcactaaaatcttagtacagacagtccctgacttataatggtttgacttaagacttcagctttatgagtttattggagtattaaacacatcttctacttatgatatttttgacttacagtgggcttattgaggcccgaccatgtcatcctcaagccaagagtctgaataaaagaagaaatggggtatttagaaataatagattactggcgggaaataagtcagtctggttgtttaattttcctatgggaaattgggcattttaagttttgtggatcctagaacaaactgagttttattattttgaaacccaggataaaatattacataaaagcattgctttttagtttcttacatgttttatccatttatttttatttttgagatagagtcttgctctgttgcccaggctggagtgcagtggcatgatctcggctcactacagctgtcatctcccgggttcaagcgattctcgtgcctcagcattccaagtagtcgggattacaggcgtgtgccactgagcccagctgatttttgtacttttagtagagatgggttttcaccatgttggccaggctggtctcgacctcctgacctccagtgatcctcccacctcagcctctcaaagtgctggcctctcaaaagtgctgggattacaagcatgagccaccacgcccagccagtttcttacatgttttaaacttaaagccaaaaagaaggaactaggaatgtgtgattaaacgtgagtgccagaagtcgacagatctcatatccagagttgaaggtcttattcataattttatcattcataatgtattaggcaattgcggctctggtaaatttcatgaggttgtaaaatagttgctaccagaaggctcaaaatttgtatgagcttttagctgagattttgagaatctgtaggaatttgtgaagtgagaggaagaacctctgaacggtgagcagttcaggtggaggaacaggaggaaatacaggcaaaggtcccagaacagaacaattgaggctacattcaaggaattgagatacctggaaatacaggtagaaatacaagtggccagtccatagaaagtttagctgtggaagtcctcttaatgggtttaaaacactggaaccacctgttacaagagtatttcaagtgaggatgaggatgaccattccatgtagaaatttttttttttttttttttttctgagacagggtcttacttcatttgcccaggttggagtgtactgctgcaatcagcctctcgagtagctggtatcacaggcacgtgccaccacgcccagctaatttttacatttgttgagaggtgtttcaccatgttggccaggctggtttcgaactcctggactcaggtaatccacccatcttggtctcccaaagtgctgggattacagacgttagccactgcacctggctgaaagataatttttaaaggaagacatgattgatagaccaagtcagccatttgaaggtcagaacatttgaggtaggtgggccccaggggccagtaaaggcttcagggtcatatatatgcaactgaaaaagtaagttaaatgacgtggcagcagcagtgaacaagacgctgttagctgttaagataatttacttagccaagaacaaaagctttatttaaaaaaattgctgaataaagttttatctgcagtgaatccccttagtcaaactccagattggtgttttggggtaacttatcaatattacagctttccttcaactctgaaaatagttgaaagaattccggtatattctttactctgatcaacatactttttggctcaaaaagttttctagtcttacaggcgttttctatttcagccctggaatgggccatttctccaaggattgctggcttcttagaatagggagtattacttagaaacttaagtccagttgctgaatatgctctttacagggtatttctagggcctttcaggtgaaagaaaatttgtacatgtatcataaaaactgaacgcacagtggatactttgaagttgaatcaaacaatgttatttttcctactgctactgccgtccgtatttgtaattattttcaaataagtggaatcagttgatccaactaggaaagtagatgaggttgctctataggaataagaatccatgaataaaaatggagatctaattttagactaaaacttttcagcccctaaacaaatgtctctgctaccaaattttaatggatatgtgtgagaatacaagtagtgtctttgggtagtgtctttaaacacaggctttagagtctgtctaccacctgttggttcagcatcagtcttttcatctgtattgcgaaagatcgtggtgaacattaataaggaaacaaaagtacttagagcctatgagcacttcctaaacataagaaaacctaaaatttgtgattgggattactttttaaattggttttagaactttatttctgaactagttggggttttcttggttcaaaggcaaaattcctcctaggtgtaagggatgcattactcagtgtacataagaacactgagactaagactggataataaaattaaacatatgcctcgttttgaagattttatgtgtaaaaaacaaaaaaaaaattgaccttaacctaaagtgagctaggtttgaaaatctcatctcattcctttcttgttttattttaatacatgtgttttcatatgctgtttactttctttggcctttggcagaacccagaaatgatctagggtaaaacgaaatgaggtatcgctatatatttggatttctcatgcttcagaatacccaaattgtcattattcaggttatcccttctatctcccaacatttacctggagccttgacactggtgtggatgtgacatgggtgtctgtcttgagatcagatgtgattttagacttggattaggccagtcaacaaagttttatttttattatctttgagatgattctcactatgttgcctggactagtgtctaactcctgggctcaagtggttgtctcacctcaacctcctgaggtgctatgcttacaagtgggagctgccgcacttaactatggatttcaaaactggaggctggaactgttgtctttgctattcatttggcttggtgagtggacttagccacttcacggcaacttggagatgaatagcccactgtatttaacctgcatttgcactatttcagctctgcttggctgccttttcttttacttctgccactgggcttttgtgcatgtgttttactagttcaacataggatctccttttcatcagtacctactctttggttctataaatctgaactggttttgaaccagttcaaaatactctagaaacacttgcttattaatgagtttcctaatttccagcactgtgcttggaacttggtaagtgtacagaaaagttttggatgtataggtcagttaggatttatctagacccattcaatgtaccaaccataatcctgtgtgggactgtgtagcaagtcgaatgattgattctcagtagttcagtctctaaggtcttttgtagttgtcatattcctgtagattgagaaaaccaatgaaacaaagctggattgtgtatacagttagctctttcataatgcaggggctaggggccccagcttccttcagtcaaatctatgtataagctgattcccccaaaacttgacagcctactgtggaaactttaccaataagtcatttaacacacactttgtatgttatgtgtattatatactgtaaaaagtaagctagagaaaatgttaagcaatcggaaatatattatggccaggtgtggtggctcatgcctgtaatcccaacactttgggaggctgaggcgggccagtgacttgaggttacaagttcgagaccagcctggctaatatggagaaaccctgcctctactaaaaatacaaaacttagctgtaggtggtagtggtgtgtgcctgtagtccaagctactcaggaggctgaggcacaagaattgattgaactctggaggtggaggttgcagtgagcccacaagaattgactgaactcgggaggtggaggttgcagtgagccgagatagtgccactgcactccaacctgagcaacagaatgaaactgtctgtgtgtgtgtgtgtgtgtatgtatatgtatgtgtatgtatatttactctcaggtggaactggattataacagtctcaatcctcactgccttcatgaatagctgaggaggaggggggtcttgctgtcacaggggtagtagagacagaagtaaacctgtaagtggaccctcttagttcaaatttgatattcaagagtcaacttagttgttttttaaagtcaagggaaggcatatcaatagttgcagttacctagtactgcataacaaaacaacctccaaaacttaatggcttaaaacaagcaaaatttttctgactgggcttagtttgttgcagtcgttttccaaaatgaccaaagacatcaaagcttaaattacatattgtatgcctgttcagggagaaaaacatatgcttttccccatcattttggaatcttttacttgaattatagctggacaattgatttccagctataattcaagctataacgtagtgaactccctcagacaaaaatgtcaagcttgattagtaaaggaacctcaagtggtatgtataaggtgacccttaagtacacgtgttttcaaaagttgggtataatgtaactagactgagaggtttcgagaaaaacttcattgctattccatgtatagttttaaactagtgggatttcagtttacagtattaatcagcaatttggggagaactaagtgttcgtttaacattaagataataaaaataatgccttaatcatacttgattgagaatattaattccctttttatgcataaggatggaagttaagtaactttaacaatgacacagttgagttgtgttggagccagcatttggatggccctacactttgcactgccttgtagatatttctgtcacacaactagtggttaaataagcatgttctttaggctagagctttcagagatgaaatattttagagaccagagttaatctagatttcattttaaacaatattcagataatctttcctttttctctcccctgccctgaagagtttgtatttattataatgttgtataacacagccccaatacaatgtggcttatataggtttttctcttaggcttagacagactctgggactgatatgggagcttcatggttctcaggcagactttcattctactttttgtctttggcaagttggtttattatcaagtggttgctggggctctatacatcatgtccaggttcaaggtacaggatgggctgaaggaggctaaaggctactggcatccaacctctcctgtaaaaagaagaacctatggtttatgctcacagtgctaaaagtaggatagtaaataaaatagagctgggtgtgaatgccaagggaggttaggatgacagccacattggccacatatgtcgaaataagttgatttagaaaaggattatttgatcaaggatatcctggaacataaagcaaataactacattttagaaataagtgaacagggctaagaaaagtaattttctttaaatacggcccaaaaggattaattatgattggagtcctgctttgcccaaggctttttatttcattttgcatgataacctttctcagaaccatgcatgcacaaattaggttgagacaatgacttaaaagtgtaaatgaaatctcattagaaacaaaaactttctggtttctgacatgtttaaggggtgctcattgttactcaacaatgatttacttaggtagttattgtgatgggggcggttctaatgggatttctttttctggtaggtttagtggcaacatacaagcttgccataaacatttcctgggttttatcttcttgtaaaagtgttattccacctttctgagtctggctaccccacagaattcttttatcccttttactcttagattaccttgtctgtaatgaaacttaccctctctgaagcctgagttgttcttctaaagtaacaccactaccaccttctttattctcatgtttttgggaggaattgtctacactcactgctatatgtcctctatcacctaagaaaggtatttgcccattactggatttttttttcttacagagatcaatagtgatcaaattgaacagcctatgtcctcaggctgtgtgttttgtggcaatggaaaaatgacagcaaaagagggaaatatccttggaatttagttccttaaatggaggtatttgcccaagtgactgtcagttacatatttgagttgcaaacaacgggttgcatttaccgggtttcagagtagaagcatacttaggaaaggtggtaggtgttcttgggctcttcagtggggacagaggattgcttccactcttagttactggggtatcttgtcaccccagagacccagagccagaatatcaacacttttgagtgattgcagttttgtgacaacataatactggttctctcagcctccttcattggattaccttcctctctgctccatttcatccagttccatattttcgtttgtcacttcaaagctaatattaccataacaagtttacaaataatcagacttcctggttacttgttaatactcaataagatagcctgcttgcccattttgaataatatcaatacatttccagacaaaacattagtcatttcccctcagtttaagtgctgtcaatcagctctccgttaggtacaatggcgaaaacactcatccaggatcttggatatttagtgaagtagacgtgaaaattggataactactcatcagagtttgaagtgattaggaaggaattaactcagccagaggaaatctgggatttgaatagggctttgaagaatgaaaggtttacagaggatttgggaaggtaaattggaggctgcgaggacaaggagatgtatgactggcactcgctcaaggttgagtggaacgagtcaaaataagtaggacccattctgtggagggcttgtcatgcaagggtaaggaattggaatgtatacaattggaggcgaatagaagttttctgtcatgttttaagagtaaaactgaaggccatgtgtatgagtatggatcaggtgattgggccacccaagaacttagatgagagaactgaattaggctgctggcagaacagaaaggacggagacagctgatggacggtgcttggatccacaattgtgtttgtactacagttaaaaaaaagcgctaagcactcattataaagcacttgctttaagctgttacacagattggtcactaggaggcatcagttcatcaactactaaggcgaaaaggaaggcagctctggacacccacctaagaagtctggatagttctgtgttaatacttaacgttttcaactcaaggacttttggaaactagaatctagaatatttcttctgaatagtacttcaaagatgaaataaggctaagaagtctaaactgcactctgtgagactatttgtttatttatttaattatttattttgagacagattctcgctctgttgcccaggctggagtgcagtggcgtgatcttggctcactgtaaccttcacctccctggctcaagcaattctcctgcctcagcctcccgagtagctgggattacaggcgctgtgggttttttttttttttgtatttttagtagagacggggtttcaccatgttggccagacttgtgtcgagctcctgacctcaggcaatccgcctgcctcagcctcccaaagtgttgggattacaggcgtgagccaccgcgcccagccttggttatcttttataccctgatgagggtaacgtgacatgttcataatttactgggctttaactttttcttgaaagatgtttgacctttggtctatccaaatctttaataatgatcattgtcatgagtttctactgtatattgcaaattggtttacagatcagaattttgtaatcattatgaattaaacacttaataactttcc

SEQ ID NO: 161429 - DNA, 2550 bp, Homo sapiens
  Payload ID: 11517
  Gene Symbol: NAP1L2
  Gene Name: nucleosome assembly protein 1-like 2
  Uniprot ID: Q9ULW6
  ENST ID: ENST00000373517
  CDS Start-End: 357-1739
tgatagctgcgtaatcatactgcggcaccgtttttttcttgcagcagtagctgcttgcggaggaggtctgcccactgcagctctctgcagtctccggctctctcctgcaggatcggtcaacgcagccgtcgccgccctctgcacccagcccaggtcgccactgcttcagtccggttctcaaagcctcagcaccatcttttatccccgagcagcctggatcgtcgttccctcagtccggacgccactgctaggtccgaccaccgccgcttctgatatttcggtgagtcttttcctgtggaggtttggtctcccgatctctgtggtagccaccttaggcgtgtacggtcctttgaaaaatggccgagtcagagaaccgcaaggagctgtcagaatccagtcaagaagaggctggtaatcagataatggtggaagggctcggggaacatctggagcgcggtgaagatgccgctgctgggcttggagacgatgggaagtgcggtgaagaagctgccgctgggcttggggaagaaggggaaaacggtgaagatactgctgctgggtccggggaagatgggaaaaaaggtggcgatactgatgaggactcagaggcagaccgtccaaaaggacttatcggttatgttttagatacagactttgttgaaagtctacctgtgaaagttaagtaccgtgtgttagcccttaaaaagcttcaaactagagcggccaatttagaatccaaattcctgagggaatttcatgacattgaaagaaagtttgctgaaatgtaccaacccttactggaaaaaagacgtcagatcatcaatgcaatctatgaacctacagaagaggaatgtgaatataaatcagactctgaggactgtgatgatgaggaaatgtgtcatgaagagatgtatggtaatgaggagggtatggtacatgaatatgtggatgaggacgatggttatgaggactattattatgattatgctgtggaagaggaggaggaggaggaggaggaggacgacattgaggctactggagaagagaataaagaagaggaggatcctaagggaattcctgatttttggctaactgttttaaaaaacgttgatacactcactcctttgattaagaaatatgatgagcctattctgaagctcctgacagatattaaagttaagctttcagatcctggcgagcccctcagtttcacactagaatttcacttcaaacccaatgaatatttcaaaaatgagttgttgacaaagacctatgtgctgaagtcaaagctagcatattatgatccccatccctataggggaactgcgattgagtattccacaggctgtgagatagattggaatgaaggaaagaatgtcactttgaaaaccatcaagaagaaacagaaacatcggatctggggaacaatccgaactgtaactgaagattttcccaaggattcatttttcaattttttctctcctcatggaatcacctcaaatggaagggatggaaatgatgattttttacttggtcacaatttacgtacttacataattccaagatcagtattatttttctcaggtgatgcactggaatctcagcaggagggggtagttagagaagttaatgatgcaatttatgacaaaattatttatgataattggatggctgcaattgaggaagttaaagcttgttgcaaaaaccttgaggcattagtagaagacattgatcgttagagcagagtatacatggccctgaaattaactgccctagatatagttactcaaggtataagaagccttgtgttctgtatttttcttgtagtgttagttaaaacatatgtttcaaaaatataagaaaagttcaaaaactaattaatttgaccttgagttttagtagtagaatgttttcaagaaatgtacactgtggtaaatgatttaaaacactagtatagtgttgtgtagcttaatccttctgaagtctttttgtcatgtagctattaatctgtggctatgaaatgatcagaaatgctaagtgagatcaatatttgtttggaaaaaaaatcttgggaaacaacccaagggttttcgctgttgttgtttttctttttctatttttgtttacttagtcctttagctagtggatttaattttgttgtgcctgcttcattttgcaataacaatgcagtagaatttaaaacttggatgcttaagaggcctgcatatagataagaatttcaggcaaaactacatttattgttaataacagcttgttcataggctcttgtattttatgtaactgtgataaataatgaaacttagttatattgaggttattgtttgtcggtgaagtgttagtcacagtattttcaaaagtttgcacatattgttctgtgtaattgtgtaagccataattacagtgtttaattctcttttcctattacatcattcattgaaagtgatcactttaccattttgaaaagatatttcgtgttctttcactgcaaaataaaaagaataaaaatttcagagtgtctcatgtttaaaa

SEQ ID NO: 161430 - DNA, 2639 bp, Homo sapiens
  Payload ID: 11518
  Gene Symbol: NAP1L3
  Gene Name: nucleosome assembly protein 1-like 3
  Uniprot ID: Q99457
  ENST ID: ENST00000373079
  CDS Start-End: 265-1785
attcggctgcggtacatctcggcactctagctgcagccgggagaggccttgccgccaccgctgtcgcccaagcctccactgccgctgccacctcagcgccggcctctgcatccccagctccagctccgctctgcgccgctgctgccatcgccgctgccacctccgcagcccgggcctccgccgccgccactcaagcatccgtgagtcattttctgcccatctctggtcgcgcggtctccctggtagagtttgtaggcttgcaagatggcagaagcagattttaaaatggtctcggaacctgtcgcccatggggttgccgaagaggagatggctagctcgactagtgattctggggaagaatctgacagcagtagctctagcagcagcactagtgacagcagcagcagcagcagcactagtggcagcagcagcggcagcggcagcagcagcagcagcagcggcagcactagcagccgcagccgcttgtatagaaagaagagggtacctgagccttccagaagggcgcggcgggccccgttgggaacaaatttcgtggataggctgcctcaggcagttagaaatcgtgtgcaagcgcttagaaacattcaagatgaatgtgacaaggtagataccctgttcttaaaagcaattcatgatcttgaaagaaaatatgctgaactcaacaagcctctgtatgataggcggtttcaaatcatcaatgcagaatacgagcctacagaagaagaatgtgaatggaattcagaggatgaggagttcagcagtgatgaggaggtgcaggataacacccctagtgaaatgcctcccttagagggtgaggaagaagaaaaccctaaagaaaacccagaggtgaaagctgaagagaaggaagttcctaaagaaattcctgaggtgaaggatgaagaaaaggaagttcctaaagaaattcctgaggtaaaggctgaagaaaaagcagattctaaagactgtatggaggcaacccctgaagtaaaagaagatcctaaagaagtcccccaggtaaaggcagatgataaagaacagcctaaagcaacagaggctaaggcaagggctgcagtaagagagactcataaaagagttcctgaggaaaggcttcaggacagtgtagatcttaaaagagctaggaagggaaagcctaaaagagaagaccctaaaggcattcctgactattggctgattgttttaaagaatgttgacaagctcgggcctatgattcagaagtatgatgagcccattctgaagttcttgtcggatgttagcctgaagttctcaaaacctggccagcctgtaagttacacctttgaatttcattttctacccaacccatacttcagaaatgaggtgctggtgaagacatatataataaaggcaaaaccagatcacaatgatcccttcttttcttggggatgggaaattgaagattgcaaaggctgcaagatagactggagaagaggaaaagatgttactgtgacaactacccagagtcgcacaactgctactggagaaattgaaatccagccaagagtggttcctaatgcatcattcttcaacttctttagtcctcctgagattcctatgattgggaagctggaaccacgagaagatgctatcctggatgaggactttgaaattgggcagattttacatgataatgtcatcctgaaatcaatctattactatactggagaagtcaatggtacctactatcaatttggcaaacattatggaaacaagaaatacagaaaataagtcaatctgaaagatttttcaagaatcttaaaatctcaagaagtgaagcagattcatacagccttgaaaaaagtaaaaccctgacctgtaacctgaacactattattccttatagtcaagtttttgtggtttcttggtagtctatattttaaaaatagtcctaaaaagtgtctaagtgccagtttattctatctaggctgttgtagtataatattcttcaaaatatgtaagctgttgtcaattatctaaagcatgttagtttggtgctacacagtgttgatttttgtgatgtcctttggtcatgtttctgttagactgtagctgtgaaactgtcagaattgttaactgaaacaaatatttgcttgaaaaaaaaagttcatgaagtaccaatgcaagtgttttatttttttcttttttccagcccataagactaagggtttaaatctgcttgcactagctgtgccttcattagtttgctatagaaatccagtacttatagtaaataaaacagtgtattttgaagtttgactgcttgaaaaagattagcatacatctaatgtgaaaagaccacatttgattcaactgagaccttgtgtatgtgacatatagtggcctataaatttaatcataatgatgttattgtttaccactgaggtgttaatataacatagtatttttgaaaaagtttcttcatcttatattgtgtaattgtaaactaaagataccgtgttttctttgtattgtgttctaccttccctttcactgaaaatgatcacttcatttgatactgtttttcatgttcttgtattgcaacctaaaataaataaatattaaagtgtgttatactataaaaa

SEQ ID NO: 161431 - DNA, 2555 bp, Homo sapiens
  Payload ID: 11518
  Gene Symbol: NAP1L3
  Gene Name: nucleosome assembly protein 1-like 3
  ENST ID: ENST00000475430
  CDS Start-End: 207-1706
attcggctgcggtacatctcggcactctagctgcagccgggagaggccttgccgccaccgctgtcgcccaagcctccactgccgctgccacctcagcgccggcctctgcatccccagctccagctccgctctgcgccgctgctgccatcgccgctgccacctccgcagcccgggcctccgccgccgccactcaagcagattttaaaatggtctcggaacctgtcgcccatggggttgccgaagaggagatggctagctcgactagtgattctggggaagaatctgacagcagtagctctagcagcagcactagtgacagcagcagcagcagcagcactagtggcagcagcagcggcagcggcagcagcagcagcagcagcggcagcactagcagccgcagccgcttgtatagaaagaagagggtacctgagccttccagaagggcgcggcgggccccgttgggaacaaatttcgtggataggctgcctcaggcagttagaaatcgtgtgcaagcgcttagaaacattcaagatgaatgtgacaaggtagataccctgttcttaaaagcaattcatgatcttgaaagaaaatatgctgaactcaacaagcctctgtatgataggcggtttcaaatcatcaatgcagaatacgagcctacagaagaagaatgtgaatggaattcagaggatgaggagttcagcagtgatgaggaggtgcaggataacacccctagtgaaatgcctcccttagagggtgaggaagaagaaaaccctaaagaaaacccagaggtgaaagctgaagagaaggaagttcctaaagaaattcctgaggtgaaggatgaagaaaaggaagttcctaaagaaattcctgaggtaaaggctgaagaaaaagcagattctaaagactgtatggaggcaacccctgaagtaaaagaagatcctaaagaagtcccccaggtaaaggcagatgataaagaacagcctaaagcaacagaggctaaggcaagggctgcagtaagagagactcataaaagagttcctgaggaaaggcttcaggacagtgtagatcttaaaagagctaggaagggaaagcctaaaagagaagaccctaaaggcattcctgactattggctgattgttttaaagaatgttgacaagctcgggcctatgattcagaagtatgatgagcccattctgaagttcttgtcggatgttagcctgaagttctcaaaacctggccagcctgtaagttacacctttgaatttcattttctacccaacccatacttcagaaatgaggtgctggtgaagacatatataataaaggcaaaaccagatcacaatgatcccttcttttcttggggatgggaaattgaagattgcaaaggctgcaagatagactggagaagaggaaaagatgttactgtgacaactacccagagtcgcacaactgctactggagaaattgaaatccagccaagagtggttcctaatgcatcattcttcaacttctttagtcctcctgagattcctatgattgggaagctggaaccacgagaagatgctatcctggatgaggactttgaaattgggcagattttacatgataatgtcatcctgaaatcaatctattactatactggagaagtcaatggtacctactatcaatttggcaaacattatggaaacaagaaatacagaaaataagtcaatctgaaagatttttcaagaatcttaaaatctcaagaagtgaagcagattcatacagccttgaaaaaagtaaaaccctgacctgtaacctgaacactattattccttatagtcaagtttttgtggtttcttggtagtctatattttaaaaatagtcctaaaaagtgtctaagtgccagtttattctatctaggctgttgtagtataatattcttcaaaatatgtaagctgttgtcaattatctaaagcatgttagtttggtgctacacagtgttgatttttgtgatgtcctttggtcatgtttctgttagactgtagctgtgaaactgtcagaattgttaactgaaacaaatatttgcttgaaaaaaaaagttcatgaagtaccaatgcaagtgttttatttttttcttttttccagcccataagactaagggtttaaatctgcttgcactagctgtgccttcattagtttgctatagaaatccagtacttatagtaaataaaacagtgtattttgaagtttgactgcttgaaaaagattagcatacatctaatgtgaaaagaccacatttgattcaactgagaccttgtgtatgtgacatatagtggcctataaatttaatcataatgatgttattgtttaccactgaggtgttaatataacatagtatttttgaaaaagtttcttcatcttatattgtgtaattgtaaactaaagataccgtgttttctttgtattgtgttctaccttccctttcactgaaaatgatcacttcatttgatactgtttttcatgttcttgtattgcaacctaaaataaataaatattaaagtgtgttatactat

SEQ ID NO: 161432 - DNA, 2511 bp, Homo sapiens
  Payload ID: 11519
  Gene Symbol: NAP1L4
  Gene Name: nucleosome assembly protein 1-like 4
  Uniprot ID: Q99733
  ENST ID: ENST00000380542
  CDS Start-End: 142-1269
cttgctcgcggagagaggagctaggagcctcggccaatgggagccggcgttgttggaggccacggcggcgcagccccaaagcgagcgaagctagggtcgccgccactgccgcaggaggcgtgaggggataaaaacattcagatggcagatcacagtttttcagatggggttccttcagattccgtggaagctgctaaaaatgcaagtaacacagaaaagctcacagatcaggtgatgcagaatcctcgagttctggcagctttacaggagcgacttgacaatgtccctcacaccccttccagctacatcgaaactttacctaaagcagtaaaaagaagaattaatgcattgaaacaacttcaggtgagatgtgctcacatagaagccaagttctatgaagaggtacatgacttggaaagaaagtatgcagcgctataccagcctctctttgacaagagaagagaatttatcaccggcgatgttgaaccaacagatgcggaatcggaatggcacagtgaaaatgaagaggaagagaaattggctggagacatgaaaagtaaagtagtcgtcacagaaaaagcagcggcaacggctgaagagccagatcccaaaggaattccagagttctggtttaccatcttcagaaatgtggacatgctgagtgaattagtccaggaatatgatgaaccaatcttgaaacacctgcaggatattaaagtgaaattttctgaccctggacagcctatgtcttttgtgttagagttccactttgaacccaacgactactttaccaactcagtcctgacaaaaacctacaagatgaaatcagaaccagataaggctgatcccttttcctttgaaggtcctgagattgtggactgtgacgggtgtactattgactggaagaaaggaaagaatgttactgtcaaaaccatcaagaaaaagcagaagcataagggtcgaggcactgttagaacaattacgaaacaagtacccaatgagtcctttttcaacttcttcaatccattgaaagcatccggggatggagaatcactggatgaagattctgaattcacattagcctctgattttgaaattggacactttttccgtgagcggatagtcccgcgggctgtgctgtacttcactggggaggccatagaagatgatgacaattttgaagaaggtgaagaaggagaagaggaggaattagaaggtgacgaggagggagaagacgaggatgatgcggaaattaaccccaaggtgtaatttttgtctgttaatcattcatacgtttctagaaggaacccagccagccggcggaatgcaagcagcagtaggaagcggaggcgggtgcctggcagaccggctgtcgggactccaggcctgtgggcggggcctcggtccttgccgcagcacaatcccgtggacagagcttactccatctaactcgttttcaagtgcatgattttcactttcacttttcctttttccttattattttgcttaacttgtacagtggcaactgaaatgcatttcagaaataggaggtttcgtccagcaccctctgcagccttggtgcctgtagctctggacttccctgggcctttccctgtgggagggccctgtagaccacatcagggtggggtgggggtcacttggcaaaaagggccgaggtctggtgatgtggttcccaggatctggaacctctcccacccctcctgcagttggactgaattcttccctttcatccgaagaaacccacttgctgtttccagccgctgaatctgctgagtgtgcagcctgcatcacctgctgtatgccgatcatctcagaaagggctgtgtagagtagggccctgttctccttaggatgttgcttcttgatttttttttttttttaggggtgggtcagggttgtgacacaccagcccaggtgagagctgctgcgggtcacctcatatttatttatcccttcttgcctgtgaggactgcggcttttcgctgtggctcgtccttaacgtttctgaaccaccttggtgccctgagcaggaagatgtgccacttcctagcaggcgcaaggcctgtgcggaagaaacgccgctccctgccaccagggctgaagatgcgagcccgtcctcatgacgcaggcgccaccctgctgccggagccgggcttcggcagtcttctccactgagggactgggctgggaagtcctgcgtttcagtggagcgtatgagcgtcaagtcctgctttctcagtagccccattgcggggccccaccattcatcctgtctgaaggtcctgggtttggtgtgaccgcttggcggctggtgggtggggttttcaagtgggtgacggcgctctccggcagccggggatggccgtgtccgcactgaccaggcctgtggagagtgctcggcctaaccttagaacacatttgtaactgaatacagtgttttcaatttgtacagaatagttagaatattctattaaagtggtgaaacattga

SEQ ID NO: 161433 - DNA, 594 bp, Homo sapiens
  Payload ID: 11519
  Gene Symbol: NAP1L4
  Gene Name: nucleosome assembly protein 1-like 4
  ENST ID: ENST00000399614
  CDS Start-End: 127-594
aaagcgagcgaagctagggtcgccgccactgccgcaggaggcgtgagtttttcagatggggttccttcagattccgtggaagctgctaaaaatgcaagtaacacagaaaagctcacagatcaggtgatgcagaatcctcgagttctggcagctttacaggagcgacttgacaatgtccctcacaccccttccagctacatcgaaactttacctaaagcagtaaaaagaagaattaatgcattgaaacaacttcaggtgagatgtgctcacatagaagccaagttctatgaagaggtacatgacttggaaagaaagtatgcagcgctataccagcctctctttgacaagagaagagaatttatcaccggcgatgttgaaccaacagatgcggaatcggaatggcacagtgaaaatgaagaggaagagaaattggctggagacatgaaaagtaaagtagtcgtcacagaaaaagcagcggcaacggctgaagagccagatcccaaaggaattccagagttctggtttaccatcttcagaaatgtggacatgctgagtgaattagtccaggaatatgatgaaccaatcttgaaacac

SEQ ID NO: 161434 - DNA, 888 bp, Homo sapiens
  Payload ID: 11519
  Gene Symbol: NAP1L4
  Gene Name: nucleosome assembly protein 1-like 4
  ENST ID: ENST00000448187
  CDS Start-End: 53-888
gctagggtcgccgccactgccgcaggaggcgtgaggggataaaaacattcagatggcagatcacagtttttcagatggggttccttcagattccgtggaagctgctaaaaatgcaagtaacacagaaaagctcacagatcaggtgatgcagaatcctcgagttctggcagctttacaggagcgacttgacaatgtccctcacaccccttccagctacatcgaaacgcatgaggatgttgtatttcttactcccttttttagtttacctaaagcagtaaaaagaagaattaatgcattgaaacaacttcaggtgagatgtgctcacatagaagccaagttctatgaagaggtacatgacttggaaagaaagtatgcagcgctataccagcctctctttgacaagagaagagaatttatcaccggcgatgttgaaccaacagatgcggaatcggaatggcacagtgaaaatgaagaggaagagaaattggctggagacatgaaaagtaaagtagtcgtcacagaaaaagcagcggcaacggctgaagagccagatcccaaaggaattccagagttctggtttaccatcttcagaaatgtggacatgctgagtgaattagtccaggaatatgatgaaccaatcttgaaacacctgcaggatattaaagtgaaattttctgaccctggacagcctatgtcttttgtgttagagttccactttgaacccaacgactactttaccaactcagtcctgacaaaaacctacaagatgaaatcagaaccagataaggctgatcccttttcctttgaaggtcctgagattgtggactgtgacgggtgtactattgactggaagaaaggaaagaatgttactgtcaaaaccatcaagaa

SEQ ID NO: 161435 - DNA, 860 bp, Homo sapiens
  Payload ID: 11519
  Gene Symbol: NAP1L4
  Gene Name: nucleosome assembly protein 1-like 4
  ENST ID: ENST00000430811
  CDS Start-End: 327-860
ggtcggggcaggcagcggcggccgcggcggggcctggggcttggggcctggagcccgggcctggggcgctggcgggaggcccctcccaactcccggcgcgcctcgcccggctgcccgcctcactgaaggtcaaggcgctttgttctgcgccgcgggcggcctcctgggcggcggccccttggaggaggcgaagacggcgagaggcggcggccgctcaaatctcccgctagcccagcccgccccgcgtgcgggggctgtggcggttacacggccgggcgcgccggagcgttcaggcttcccgtttttaaggggataaaaacattcagatggcagatcacagtttttcagatggggttccttcagattccgtggaagctgctaaaaatgcaagtaacacagaaaagctcacagatcaggtgatgcagaatcctcgagttctggcagctttacaggagcgacttgacaatgtccctcacaccccttccagctacatcgaaactttacctaaagcagtaaaaagaagaattaatgcattgaaacaacttcaggtgagatgtgctcacatagaagccaagttctatgaagaggtacatgacttggaaagaaagtatgcagcgctataccagcctctctttgacaagagaagagaatttatcaccggcgatgttgaaccaacagatgcggaatcggaatggcacagtgaaaatgaagaggaagagaaattggctggagacatgaaaagtaaagtagtcgtcacagaaaaagcagcggcaacggctgaagagccagatcccaaaggaattccagagttctggtttaccatcttcagaaatgtggacatgctgagtgaattagtccag

SEQ ID NO: 161436 - DNA, 352 bp, Homo sapiens
  Payload ID: 11519
  Gene Symbol: NAP1L4
  Gene Name: nucleosome assembly protein 1-like 4
  ENST ID: ENST00000455338
  CDS Start-End: 49-352
cctcagctgaatttttgtgggacctcctgaggggataaaaacattcagatggcagatcacagtttttcagatggggttccttcagattccgtggaagctgctaaaaatgcaagtaacacagaaaagctcacagatcaggtgatgcagaatcctcgagttctggcagctttacaggagcgacttgacaatgtccctcacaccccttccagctacatcgaaacgcatgaggatgttgtatttcttactcccttttttagtttacctaaagcagtaaaaagaagaattaatgcattgaaacaacttcaggtgagatgtgctcacatagaagccaagttctatgaagaggtacatg

SEQ ID NO: 161437 - DNA, 850 bp, Homo sapiens
  Payload ID: 11519
  Gene Symbol: NAP1L4
  Gene Name: nucleosome assembly protein 1-like 4
  ENST ID: ENST00000492685
  CDS Start-End: 1-615
gaaaaagcagcggcaacggctgaagagccagatcccaaaggaattccagagttctggtttaccatcttcagaaatgtggacatgctgagtgaattagtccaggaatatgatgaaccaatcttgaaacacctgcaggatattaaagtgaaattttctgaccctggacagcctatgtcttttgtgttagagttccactttgaacccaacgactactttaccaactcagtcctgacaaaaacctacaagatgaaatcagaaccagataaggctgatcccttttcctttgaaggtcctgagattgtggactgtgacgggtgtactattgactggaagaaaggaaagaatgttactgtcaaaaccatcaagaaaaagcagaagcataagggtcgaggcactgttagaacaattacgaaacaagtacccaatgagtcctttttcaacttcttcaatccattgaaagcatccggggatggagaatcactggatgaagattctgaattcacattagcctctgattttgaaattggacactttttccgtgagcggatagtcccgcgggctgtgctgtacttcactggggaggccatagaagatgatgacaatccagatatgtagtccaagctgctgtccttgttgtggggggaatacgcttgaagaggagaagtctgaggaacagagcaggaaaagcaggtgtctgtgaagcagtttcagagtttgaagaaggtgaagaaggagaagaggaggaattagaaggtgacgaggagggagaagacgaggatgatgcggaaattaaccccaagaaggaacccagccagccggcggaatgcaagcagcagtaggaagcggaggc

SEQ ID NO: 161438 - DNA, 535 bp, Homo sapiens
  Payload ID: 11519
  Gene Symbol: NAP1L4
  Gene Name: nucleosome assembly protein 1-like 4
  ENST ID: ENST00000526842
  CDS Start-End: 150-535
aggcgtgaggtgcggagacacgggtgctgggccggctggagtgcagtggcttgatcttggctcacggcaacctctgcctcctgtattcaagcgattctcctgcctcagcctcccgagtagctgggattacaggggataaaaacattcagatggcagatcacagtttttcagatggggttccttcagattccgtggaagctgctaaaaatgcaagtaacacagaaaagctcacagatcaggtgatgcagaatcctcgagttctggcagctttacaggagcgacttgacaatgtccctcacaccccttccagctacatcgaaactttacctaaagcagtaaaaagaagaattaatgcattgaaacaacttcaggtgagatgtgctcacatagaagccaagttctatgaagaggtacatgacttggaaagaaagtatgcagcgctataccagcctctctttgacaagagaagagaatttatcaccggcgatgttgaaccaacagatgcggaatcggaatggcacagtgaaaatgaaga

SEQ ID NO: 161439 - DNA, 625 bp, Homo sapiens
  Payload ID: 11519
  Gene Symbol: NAP1L4
  Gene Name: nucleosome assembly protein 1-like 4
  ENST ID: ENST00000530064
  CDS Start-End: 226-625
aaagtgttttaggcttccagagtagaaatctgatattacttcgtttgattcttcgaccactatggtgataggaagtagctgatctctgcaggaaactgctgttacctggcctcagctgaatttttgtgggacctcctgagagacgaggtttccccatgttgcccaggctggtctgaaactcctgagcttcaggtgatctgtgataggggggataaaaacattcagatggcagatcacagtttttcagatggggttccttcagattccgtggaagctgctaaaaatgcaagtaacacagaaaagctcacagatcaggtgatgcagaatcctcgagttctggcagctttacaggagcgacttgacaatgtccctcacaccccttccagctacatcgaaactttacctaaagcagtaaaaagaagaattaatgcattgaaacaacttcaggtgagatgtgctcacatagaagccaagttctatgaagaggtacatgacttggaaagaaagtatgcagcgctataccagcctctctttgacaagagaagagaatttatcaccggcgatgttgaaccaacagatgcggaatcggaatggcacagtgaaaatgaagaggaagagaaattgg

SEQ ID NO: 161440 - DNA, 544 bp, Homo sapiens
  Payload ID: 11519
  Gene Symbol: NAP1L4
  Gene Name: nucleosome assembly protein 1-like 4
  ENST ID: ENST00000534372
  CDS Start-End: 309-544
gtgaggtgcggagacacgggtgctgggccgggaaaagtgttttaggcttccagagtagaaatctgatattacttcgtttgattcttcgaccactatggtgataggaagtagctgatctctgcaggaaactgctgttacctggcctcagctgaatttttgtgggacctcctgagggcttggcaccgcagaagtctctgaagagacagtctgctgctgtttggagagacgaggtttccccatgttgcccaggctggtctgaaactcctgagcttcaggtgatctgtgataggggggataaaaacattcagatggcagatcacagtttttcagatggggttccttcagattccgtggaagctgctaaaaatgcaagtaacacagaaaagctcacagatcaggtgatgcagaatcctcgagttctggcagctttacaggagcgacttgacaatgtccctcacaccccttccagctacatcgaaactttacctaaagcagtaaaaagaagaattaatgcattgaaacaacttcaggtgagatgtgctca

SEQ ID NO: 161441 - DNA, 587 bp, Homo sapiens
  Payload ID: 11519
  Gene Symbol: NAP1L4
  Gene Name: nucleosome assembly protein 1-like 4
  ENST ID: ENST00000528968
  CDS Start-End: 167-587
gtgaggtgcggagacacgggtgctgggccggaagtagctgatctctgcaggaaactgctgttacctggcctcagctgaatttttgtgggacctcctgagggcttggcaccgcagaagtctctgaagagacagtctgctgctgtttggaggggataaaaacattcagatggcagatcacagtttttcagatggggttccttcagattccgtggaagctgctaaaaatgcaagtaacacagaaaagctcacagatcaggtgatgcagaatcctcgagttctggcagctttacaggagcgacttgacaatgtccctcacaccccttccagctacatcgaaactttacctaaagcagtaaaaagaagaattaatgcattgaaacaacttcaggtgagatgtgctcacatagaagccaagttctatgaagaggtacatgacttggaaagaaagtatgcagcgctataccagcctctctttgacaagagaagagaatttatcaccggcgatgttgaaccaacagatgcggaatcggaatggcacagtgaaaatgaagaggaagagaaattggctggagacatgaaaagtaaag

SEQ ID NO: 161442 - DNA, 555 bp, Homo sapiens
  Payload ID: 11519
  Gene Symbol: NAP1L4
  Gene Name: nucleosome assembly protein 1-like 4
  ENST ID: ENST00000529361
  CDS Start-End: 48-555
gtgaggtgcggagacacgggtgctgggccggggataaaaacattcagatggcagatcacagtttttcagatggggttccttcagattccgtggaagctgctaaaaatgcaagtaacacagaaaagctcacagatcaggtgatgcagaatcctcgagttctggcagctttacaggagcgacttgacaatgtccctcacaccccttccagctacatcgaaacgcatgaggatgttgtatttcttactcccttttttagtttacctaaagcagtaaaaagaagaattaatgcattgaaacaacttcaggtgagatgtgctcacatagaagccaagttctatgaagaggtacatgacttggaaagaaagtatgcagcgctataccagcctctctttgacaagagaagagaatttatcaccggcgatgttgaaccaacagatgcggaatcggaatggcacagtgaaaatgaagaggaagagaaattggctggagacatgaaaagtaaagtagtcgtcacagaaaaagcagcggcaacggctgaagagccagatcccaaag

SEQ ID NO: 161443 - DNA, 1941 bp, Homo sapiens
  Payload ID: 11519
  Gene Symbol: NAP1L4
  Gene Name: nucleosome assembly protein 1-like 4
  Uniprot ID: Q99733
  ENST ID: ENST00000526115
  CDS Start-End: 285-1445
cttgctcgcggagagaggagctaggagcctcggccaatgggagccggcgttgttggaggccacggcggcgcagccccaaagcgagcgaagctagggtcgccgccactgccgcaggaggcgtgagggaaaagtgttttaggcttccagagtagaaatctgatattacttcgtttgattcttcgaccactatggtgataggaagtagctgatctctgcaggaaactgctgttacctggcctcagctgaatttttgtgggacctcctgaggggataaaaacattcagatggcagatcacagtttttcagatggggttccttcagattccgtggaagctgctaaaaatgcaagtaacacagaaaagctcacagatcaggtgatgcagaatcctcgagttctggcagctttacaggagcgacttgacaatgtccctcacaccccttccagctacatcgaaactttacctaaagcagtaaaaagaagaattaatgcattgaaacaacttcaggtgagatgtgctcacatagaagccaagttctatgaagaggtacatgacttggaaagaaagtatgcagcgctataccagcctctctttgacaagagaagagaatttatcaccggcgatgttgaaccaacagatgcggaatcggaatggcacagtgaaaatgaagaggaagagaaattggctggagacatgaaaagtaaagtagtcgtcacagaaaaagcagcggcaacggctgaagagccagatcccaaaggaattccagagttctggtttaccatcttcagaaatgtggacatgctgagtgaattagtccaggaatatgatgaaccaatcttgaaacacctgcaggatattaaagtgaaattttctgaccctggacagcctatgtcttttgtgttagagttccactttgaacccaacgactactttaccaactcagtcctgacaaaaacctacaagatgaaatcagaaccagataaggctgatcccttttcctttgaaggtcctgagattgtggactgtgacgggtgtactattgactggaagaaaggaaagaatgttactgtcaaaaccatcaagaaaaagcagaagcataagggtcgaggcactgttagaacaattacgaaacaagtacccaatgagtcctttttcaacttcttcaatccattgaaagcatccggggatggagaatcactggatgaagattctgaattcacattagcctctgattttgaaattggacactttttccgtgagcggatagtcccgcgggctgtgctgtacttcactggggaggccatagaagatgatgacaattttgaagaaggtgaagaaggagaagaggaggaattagaaggtgacgaggagggagaagacgaggatgatgcggaaattaaccccaagaaggaacccagccagccggcggaatgcaagcagcagtaggaagcggaggcgggtgcctggcagaccggctgtcgggactccaggcctgtgggcggggcctcggtccttgccgcagcacaatcccgtggacagagcttactccatctaactcgttttcaagtgcatgattttcactttcacttttcctttttccttattattttgcttaacttgtacagtggcaactgaaatgcatttcagaaataggaggtttcgtccagcaccctctgcagccttggtgcctgtagctctggacttccctgggcctttccctgtgggagggccctgtagaccacatcagggtggggtgggggtcacttggcaaaaagggccgaggtctggtgatgtggttcccaggatctggaacctctcccacccctcctgcagttggactgaattcttccctttcatccgaagaaacccacttgctgtttccagccgctgaatctgctgagtgtgcagcctgcatcacctgctgtatgccgatcatctcaga

SEQ ID NO: 161444 - DNA, 526 bp, Homo sapiens
  Payload ID: 11519
  Gene Symbol: NAP1L4
  Gene Name: nucleosome assembly protein 1-like 4
  ENST ID: ENST00000532325
  CDS Start-End: 65-526
aaagcgagcgaagctagggtcgccgccactgccgcaggaggcgtgaggggataaaaacattcagatggcagatcacagtttttcagatggggttccttcagattccgtggaagctgctaaaaatgcaagtaacacagaaaagctcacagatcaggtgatgcagaatcctcgagttctggcagctttacaggagcgacttgacaatgtccctcacaccccttccagctacatcgaaactttacctaaagcagtaaaaagaagaattaatgcattgaaacaacttcaggatattaaagtgaaattttctgaccctggacagcctatgtcttttgtgttagagttccactttgaacccaacgactactttaccaactcagtcctgacaaaaacctacaagatgaaatcagaaccagataaggctgatcccttttcctttgaaggtcctgagattgtggactgtgacgggtgtactattgactggaagaaaggaaagaatgttactgtcaaaaccatcaagaaaaagcag

SEQ ID NO: 161445 - DNA, 572 bp, Homo sapiens
  Payload ID: 11519
  Gene Symbol: NAP1L4
  Gene Name: nucleosome assembly protein 1-like 4
  ENST ID: ENST00000531291
  CDS Start-End: 252-572
cgtgaggtgcggagacacgggtgctgggccggtttacggggtgaaaatagacttttaaaaattctcttaccttagaaatatacaaatatgtagattaggttgttggaccttaaaggaagtagctgatctctgcaggaaactgctgttacctggcctcagctgaatttttgtgggacctcctgagggcttggcaccgcagaagtctctgaagagacagtctgctgctgtttggaggggataaaaacattcagatggcagatcacagtttttcagatggggttccttcagattccgtggaagctgctaaaaatgcaagtaacacagaaaagctcacagatcaggtgatgcagaatcctcgagttctggcagctttacaggagcgacttgacaatgtccctcacaccccttccagctacatcgaaactttacctaaagcagtaaaaagaagaattaatgcattgaaacaacttcaggtgagatgtgctcacatagaagccaagttctatgaagaggtacatgacttggaaagaaagtatgcagcgctataccagcctctctttgacaagagaaga

SEQ ID NO: 161446 - DNA, 2479 bp, Homo sapiens
  Payload ID: 11519
  Gene Symbol: NAP1L4
  Gene Name: nucleosome assembly protein 1-like 4
  Uniprot ID: Q99733
  ENST ID: ENST00000616696
  CDS Start-End: 142-1302
cttgctcgcggagagaggagctaggagcctcggccaatgggagccggcgttgttggaggccacggcggcgcagccccaaagcgagcgaagctagggtcgccgccactgccgcaggaggcgtgaggggataaaaacattcagatggcagatcacagtttttcagatggggttccttcagattccgtggaagctgctaaaaatgcaagtaacacagaaaagctcacagatcaggtgatgcagaatcctcgagttctggcagctttacaggagcgacttgacaatgtccctcacaccccttccagctacatcgaaactttacctaaagcagtaaaaagaagaattaatgcattgaaacaacttcaggtgagatgtgctcacatagaagccaagttctatgaagaggtacatgacttggaaagaaagtatgcagcgctataccagcctctctttgacaagagaagagaatttatcaccggcgatgttgaaccaacagatgcggaatcggaatggcacagtgaaaatgaagaggaagagaaattggctggagacatgaaaagtaaagtagtcgtcacagaaaaagcagcggcaacggctgaagagccagatcccaaaggaattccagagttctggtttaccatcttcagaaatgtggacatgctgagtgaattagtccaggaatatgatgaaccaatcttgaaacacctgcaggatattaaagtgaaattttctgaccctggacagcctatgtcttttgtgttagagttccactttgaacccaacgactactttaccaactcagtcctgacaaaaacctacaagatgaaatcagaaccagataaggctgatcccttttcctttgaaggtcctgagattgtggactgtgacgggtgtactattgactggaagaaaggaaagaatgttactgtcaaaaccatcaagaaaaagcagaagcataagggtcgaggcactgttagaacaattacgaaacaagtacccaatgagtcctttttcaacttcttcaatccattgaaagcatccggggatggagaatcactggatgaagattctgaattcacattagcctctgattttgaaattggacactttttccgtgagcggatagtcccgcgggctgtgctgtacttcactggggaggccatagaagatgatgacaattttgaagaaggtgaagaaggagaagaggaggaattagaaggtgacgaggagggagaagacgaggatgatgcggaaattaaccccaagaaggaacccagccagccggcggaatgcaagcagcagtaggaagcggaggcgggtgcctggcagaccggctgtcgggactccaggcctgtgggcggggcctcggtccttgccgcagcacaatcccgtggacagagcttactccatctaactcgttttcaagtgcatgattttcactttcacttttcctttttccttattattttgcttaacttgtacagtggcaactgaaatgcatttcagaaataggaggtttcgtccagcaccctctgcagccttggtgcctgtagctctggacttccctgggcctttccctgtgggagggccctgtagaccacatcagggtggggtgggggtcacttggcaaaaagggccgaggtctggtgatgtggttcccaggatctggaacctctcccacccctcctgcagttggactgaattcttccctttcatccgaagaaacccacttgctgtttccagccgctgaatctgctgagtgtgcagcctgcatcacctgctgtatgccgatcatctcagaaagggctgtgtagagtagggccctgttctccttaggatgttgcttcttcatttttttttttttttaggggtgggtcagggttgtgacacaccagcccaggtgagagctgctgcgggtcacctcatatttatttatcccttcttgcctgtgaggactgcggcttttcgctgtggctcgtccttaacgtttctgaaccaccttggtgccctgagcaggaagatgtgccacttcctagcaggcgcaaggcctgtgcggaagaaacgccgctccctgccaccagggctgaagatgcgagcccgtcctcatgacgcaggcgccaccctgctgccggagccgggcttcggcagtcttctccactgagggactgggctgggaagtcctgcgtttcagtggagcgtatgagcgtcaagtcctgctttctcagtagccccattgcggggccccaccattcatcctgtctgaaggtcctgggtttggtgtgaccgcttggcggctggtgggtggggttttcaagtgggtgacggcgctctccggcagccggggatggccgtgtccgcactgaccaggcctgtggagagtgctcggcctaaccttagaacacatttgtaactgaatacagtgttttcaatttgtacagaatagttagaatattctattaaagtggtgaaacattgagtcagc

SEQ ID NO: 161447 - DNA, 2479 bp, Homo sapiens
  Payload ID: 11519
  Gene Symbol: NAP1L4
  Gene Name: nucleosome assembly protein 1-like 4
  Uniprot ID: Q99733
  ENST ID: ENST00000620138
  CDS Start-End: 142-1302
cttgctcgcggagagaggagctaggagcctcggccaatgggagccggcgttgttggaggccacggcggcgcagccccaaagcgagcgaagctagggtcgccgccactgccgcaggaggcgtgaggggataaaaacattcagatggcagatcacagtttttcagatggggttccttcagattccgtggaagctgctaaaaatgcaagtaacacagaaaagctcacagatcaggtgatgcagaatcctcgagttctggcagctttacaggagcgacttgacaatgtccctcacaccccttccagctacatcgaaactttacctaaagcagtaaaaagaagaattaatgcattgaaacaacttcaggtgagatgtgctcacatagaagccaagttctatgaagaggtacatgacttggaaagaaagtatgcagcgctataccagcctctctttgacaagagaagagaatttatcaccggcgatgttgaaccaacagatgcggaatcggaatggcacagtgaaaatgaagaggaagagaaattggctggagacatgaaaagtaaagtagtcgtcacagaaaaagcagcggcaacggctgaagagccagatcccaaaggaattccagagttctggtttaccatcttcagaaatgtggacatgctgagtgaattagtccaggaatatgatgaaccaatcttgaaacacctgcaggatattaaagtgaaattttctgaccctggacagcctatgtcttttgtgttagagttccactttgaacccaacgactactttaccaactcagtcctgacaaaaacctacaagatgaaatcagaaccagataaggctgatcccttttcctttgaaggtcctgagattgtggactgtgacgggtgtactattgactggaagaaaggaaagaatgttactgtcaaaaccatcaagaaaaagcagaagcataagggtcgaggcactgttagaacaattacgaaacaagtacccaatgagtcctttttcaacttcttcaatccattgaaagcatccggggatggagaatcactggatgaagattctgaattcacattagcctctgattttgaaattggacactttttccgtgagcggatagtcccgcgggctgtgctgtacttcactggggaggccatagaagatgatgacaattttgaagaaggtgaagaaggagaagaggaggaattagaaggtgacgaggagggagaagacgaggatgatgcggaaattaaccccaagaaggaacccagccagccggcggaatgcaagcagcagtaggaagcggaggcgggtgcctggcagaccggctgtcgggactccaggcctgtgggcggggcctcggtccttgccgcagcacaatcccgtggacagagcttactccatctaactcgttttcaagtgcatgattttcactttcacttttcctttttccttattattttgcttaacttgtacagtggcaactgaaatgcatttcagaaataggaggtttcgtccagcaccctctgcagccttggtgcctgtagctctggacttccctgggcctttccctgtgggagggccctgtagaccacatcagggtggggtgggggtcacttggcaaaaagggccgaggtctggtgatgtggttcccaggatctggaacctctcccacccctcctgcagttggactgaattcttccctttcatccgaagaaacccacttgctgtttccagccgctgaatctgctgagtgtgcagcctgcatcacctgctgtatgccgatcatctcagaaagggctgtgtagagtagggccctgttctccttaggatgttgcttcttgatttttttttttttttaggggtgggtcagggttgtgacacaccagcccaggtgagagctgctgcgggtcacctcatatttatttatcccttcttgcctgtgaggactgcggcttttcgctgtggctcgtccttaacgtttctgaaccaccttggtgccctgagcaggaagatgtgccacttcctagcaggcgcaaggcctgtgcggaagaaacgccgctccctgccaccagggctgaagatgcgagcccgtcctcatgacgcaggcgccaccctgctgccggagccgggcttcggcagtcttctccactgagggactgggctgggaagtcctgcgtttcagtggagcgtatgagcgtcaagtcctgctttctcagtagccccattgcggggccccaccattcatcctgtctgaaggtcctgggtttggtgtgaccgcttggcggctggtgggtggggttttcaagtgggtgacggcgctctccggcagccggggatggccgtgtccgcactgaccaggcctgtggagagtgctcggcctaaccttagaacacatttgtaactgaatacagtgttttcaatttgtacagaatagttagaatattctattaaagtggtgaaacattgagtcagc

SEQ ID NO: 161448 - DNA, 2515 bp, Homo sapiens
  Payload ID: 11519
  Gene Symbol: NAP1L4
  Gene Name: nucleosome assembly protein 1-like 4
  Uniprot ID: Q99733
  ENST ID: ENST00000619695
  CDS Start-End: 142-1269
cttgctcgcggagagaggagctaggagcctcggccaatgggagccggcgttgttggaggccacggcggcgcagccccaaagcgagcgaagctagggtcgccgccactgccgcaggaggcgtgaggggataaaaacattcagatggcagatcacagtttttcagatggggttccttcagattccgtggaagctgctaaaaatgcaagtaacacagaaaagctcacagatcaggtgatgcagaatcctcgagttctggcagctttacaggagcgacttgacaatgtccctcacaccccttccagctacatcgaaactttacctaaagcagtaaaaagaagaattaatgcattgaaacaacttcaggtgagatgtgctcacatagaagccaagttctatgaagaggtacatgacttggaaagaaagtatgcagcgctataccagcctctctttgacaagagaagagaatttatcaccggcgatgttgaaccaacagatgcggaatcggaatggcacagtgaaaatgaagaggaagagaaattggctggagacatgaaaagtaaagtagtcgtcacagaaaaagcagcggcaacggctgaagagccagatcccaaaggaattccagagttctggtttaccatcttcagaaatgtggacatgctgagtgaattagtccaggaatatgatgaaccaatcttgaaacacctgcaggatattaaagtgaaattttctgaccctggacagcctatgtcttttgtgttagagttccactttgaacccaacgactactttaccaactcagtcctgacaaaaacctacaagatgaaatcagaaccagataaggctgatcccttttcctttgaaggtcctgagattgtggactgtgacgggtgtactattgactggaagaaaggaaagaatgttactgtcaaaaccatcaagaaaaagcagaagcataagggtcgaggcactgttagaacaattacgaaacaagtacccaatgagtcctttttcaacttcttcaatccattgaaagcatccggggatggagaatcactggatgaagattctgaattcacattagcctctgattttgaaattggacactttttccgtgagcggatagtcccgcgggctgtgctgtacttcactggggaggccatagaagatgatgacaattttgaagaaggtgaagaaggagaagaggaggaattagaaggtgacgaggagggagaagacgaggatgatgcggaaattaaccccaaggtgtaatttttgtctgttaatcattcatacgtttctagaaggaacccagccagccggcggaatgcaagcagcagtaggaagcggaggcgggtgcctggcagaccggctgtcgggactccaggcctgtgggcggggcctcggtccttgccgcagcacaatcccgtggacagagcttactccatctaactcgttttcaagtgcatgattttcactttcacttttcctttttccttattattttgcttaacttgtacagtggcaactgaaatgcatttcagaaataggaggtttcgtccagcaccctctgcagccttggtgcctgtagctctggacttccctgggcctttccctgtgggagggccctgtagaccacatcagggtggggtgggggtcacttggcaaaaagggccgaggtctggtgatgtggttcccaggatctggaacctctcccacccctcctgcagttggactgaattcttccctttcatccgaagaaacccacttgctgtttccagccgctgaatctgctgagtgtgcagcctgcatcacctgctgtatgccgatcatctcagaaagggctgtgtagagtagggccctgttctccttaggatgttgcttcttcatttttttttttttttaggggtgggtcagggttgtgacacaccagcccaggtgagagctgctgcgggtcacctcatatttatttatcccttcttgcctgtgaggactgcggcttttcgctgtggctcgtccttaacgtttctgaaccaccttggtgccctgagcaggaagatgtgccacttcctagcaggcgcaaggcctgtgcggaagaaacgccgctccctgccaccagggctgaagatgcgagcccgtcctcatgacgcaggcgccaccctgctgccggagccgggcttcggcagtcttctccactgagggactgggctgggaagtcctgcgtttcagtggagcgtatgagcgtcaagtcctgctttctcagtagccccattgcggggccccaccattcatcctgtctgaaggtcctgggtttggtgtgaccgcttggcggctggtgggtggggttttcaagtgggtgacggcgctctccggcagccggggatggccgtgtccgcactgaccaggcctgtggagagtgctcggcctaaccttagaacacatttgtaactgaatacagtgttttcaatttgtacagaatagttagaatattctattaaagtggtgaaacattgagtca

SEQ ID NO: 161449 - DNA, 625 bp, Homo sapiens
  Payload ID: 11519
  Gene Symbol: NAP1L4
  Gene Name: nucleosome assembly protein 1-like 4
  ENST ID: ENST00000633351
  CDS Start-End: 226-625
aaagtgttttaggcttccagagtagaaatctgatattacttcgtttgattcttcgaccactatggtgataggaagtagctgatctctgcaggaaactgctgttacctgacctcagctgaatttttgtgggacctcctgagagacgaggtttccccatgttgcccaggctggtctgaaactcctgagcttcaggtgatctgtgataggggggataaaaacattcagatggcagatcacagtttttcagatggggttccttcagattccgtggaagctgctaaaaatgcaagtaacacagaaaagctcacagatcaggtgatgcagaatcctcgagttctggcagctttacaggagcgacttgacaatgtccctcacaccccttccagctacatcgaaactttacctaaagcagtaaaaagaagaattaatgcattgaaacaacttcaggtgagatgtgctcacatagaagccaagttctatgaagaggtacatgacttggaaagaaagtatgcagcgctataccagcctctctttgacaagagaagagaatttatcaccggcgatgttgaaccaacagatgcggaatcggaatggcacagtgaaaatgaagaggaagagaaattgg

SEQ ID NO: 161450 - DNA, 594 bp, Homo sapiens; identical to SEQ ID NO: 161433
  Payload ID: 11519
  Gene Symbol: NAP1L4
  Gene Name: nucleosome assembly protein 1-like 4
  ENST ID: ENST00000634217
  CDS Start-End: 127-594

SEQ ID NO: 161451 - DNA, 1941 bp, Homo sapiens
  Payload ID: 11519
  Gene Symbol: NAP1L4
  Gene Name: nucleosome assembly protein 1-like 4
  Uniprot ID: Q99733
  ENST ID: ENST00000632791
  CDS Start-End: 285-1445
cttgctcgcggagagaggagctaggagcctcggccaatgggagccggcgttgttggaggccacggcggcgcagccccaaagcgagcgaagctagggtcgccgccactgccgcaggaggcgtgagggaaaagtgttttaggcttccagagtagaaatctgatattacttcgtttgattcttcgaccactatggtgataggaagtagctgatctctgcaggaaactgctgttacctgacctcagctgaatttttgtgggacctcctgaggggataaaaacattcagatggcagatcacagtttttcagatggggttccttcagattccgtggaagctgctaaaaatgcaagtaacacagaaaagctcacagatcaggtgatgcagaatcctcgagttctggcagctttacaggagcgacttgacaatgtccctcacaccccttccagctacatcgaaactttacctaaagcagtaaaaagaagaattaatgcattgaaacaacttcaggtgagatgtgctcacatagaagccaagttctatgaagaggtacatgacttggaaagaaagtatgcagcgctataccagcctctctttgacaagagaagagaatttatcaccggcgatgttgaaccaacagatgcggaatcggaatggcacagtgaaaatgaagaggaagagaaattggctggagacatgaaaagtaaagtagtcgtcacagaaaaagcagcggcaacggctgaagagccagatcccaaaggaattccagagttctggtttaccatcttcagaaatgtggacatgctgagtgaattagtccaggaatatgatgaaccaatcttgaaacacctgcaggatattaaagtgaaattttctgaccctggacagcctatgtcttttgtgttagagttccactttgaacccaacgactactttaccaactcagtcctgacaaaaacctacaagatgaaatcagaaccagataaggctgatcccttttcctttgaaggtcctgagattgtggactgtgacgggtgtactattgactggaagaaaggaaagaatgttactgtcaaaaccatcaagaaaaagcagaagcataagggtcgaggcactgttagaacaattacgaaacaagtacccaatgagtcctttttcaacttcttcaatccattgaaagcatccggggatggagaatcactggatgaagattctgaattcacattagcctctgattttgaaattggacactttttccgtgagcggatagtcccgcgggctgtgctgtacttcactggggaggccatagaagatgatgacaattttgaagaaggtgaagaaggagaagaggaggaattagaaggtgacgaggagggagaagacgaggatgatgcggaaattaaccccaagaaggaacccagccagccggcggaatgcaagcagcagtaggaagcggaggcgggtgcctggcagaccggctgtcgggactccaggcctgtgggcggggcctcggtccttgccgcagcacaatcccgtggacagagcttactccatctaactcgttttcaagtgcatgattttcactttcacttttcctttttccttattattttgcttaacttgtacagtggcaactgaaatgcatttcagaaataggaggtttcgtccagcaccctctgcagccttggtgcctgtagctctggacttccctgggcctttccctgtgggagggccctgtagaccacatcagggtggggtgggggtcacttggcaaaaagggccgaggtctggtgatgtggttcccaggatctggaacctctcccacccctcctgcagttggactgaattcttccctttcatccgaagaaacccacttgctgtttccagccgctgaatctgctgagtgtgcagcctgcatcacctgctgtatgccgatcatctcaga

SEQ ID NO: 161452 - DNA, 850 bp, Homo sapiens; identical to SEQ ID NO: 161437
  Payload ID: 11519
  Gene Symbol: NAP1L4
  Gene Name: nucleosome assembly protein 1-like 4
  ENST ID: ENST00000634125
  CDS Start-End: 1-615

SEQ ID NO: 161453 - DNA, 535 bp, Homo sapiens; identical to SEQ ID NO: 161438
  Payload ID: 11519
  Gene Symbol: NAP1L4
  Gene Name: nucleosome assembly protein 1-like 4
  ENST ID: ENST00000632755
  CDS Start-End: 150-535

SEQ ID NO: 161454 - DNA, 555 bp, Homo sapiens; identical to SEQ ID NO: 161442
  Payload ID: 11519
  Gene Symbol: NAP1L4
  Gene Name: nucleosome assembly protein 1-like 4
  ENST ID: ENST00000632239
  CDS Start-End: 48-555

SEQ ID NO: 161455 - DNA, 860 bp, Homo sapiens
  Payload ID: 11519
  Gene Symbol: NAP1L4
  Gene Name: nucleosome assembly protein 1-like 4
  ENST ID: ENST00000631563
  CDS Start-End: 327-860
ggtcggggcaggcagcggcggccgcggcggggcctggggcttgggccctggagcccgggcctggggcgctggcgggaggcccctcccaactcccggcgcgcctcgcccggctgcccgcctcactgaaggtcaaggcgctttgttctgcgccgcgggcggcctcctgggcggcggccccttggaggaggcgaagacggcgagaggcggcggccgctcaaatctcccgctagcccagcccgccccgcgtgcgggggctgtggcggttacacggccgggcgcgccggagcgttcaggcttcccgtttttaaggggataaaaacattcagatggcagatcacagtttttcagatggggttccttcagattccgtggaagctgctaaaaatgcaagtaacacagaaaagctcacagatcaggtgatgcagaatcctcgagttctggcagctttacaggagcgacttgacaatgtccctcacaccccttccagctacatcgaaactttacctaaagcagtaaaaagaagaattaatgcattgaaacaacttcaggtgagatgtgctcacatagaagccaagttctatgaagaggtacatgacttggaaagaaagtatgcagcgctataccagcctctctttgacaagagaagagaatttatcaccggcgatgttgaaccaacagatgcggaatcggaatggcacagtgaaaatgaagaggaagagaaattggctggagacatgaaaagtaaagtagtcgtcacagaaaaagcagcggcaacggctgaagagccagatcccaaaggaattccagagttctggtttaccatcttcagaaatgtggacatgctgagtgaattagtccag

SEQ ID NO: 161456 - DNA, 888 bp, Homo sapiens; identical to SEQ ID NO: 161434
  Payload ID: 11519
  Gene Symbol: NAP1L4
  Gene Name: nucleosome assembly protein 1-like 4
  ENST ID: ENST00000632355
  CDS Start-End: 53-888

SEQ ID NO: 161457 - DNA, 352 bp, Homo sapiens; identical to SEQ ID NO: 161436
  Payload ID: 11519
  Gene Symbol: NAP1L4
  Gene Name: nucleosome assembly protein 1-like 4
  ENST ID: ENST00000631478
  CDS Start-End: 49-352

SEQ ID NO: 161458 - DNA, 572 bp, Homo sapiens
  Payload ID: 11519
  Gene Symbol: NAP1L4
  Gene Name: nucleosome assembly protein 1-like 4
  ENST ID: ENST00000633461
  CDS Start-End: 252-572
cgtgaggtgcggagacacgggtgctgggccggtttacggggtgaaaatagacttttaaaaattctcttaccttagaaatatacaaatatgtagattaggttgttggaccttaaaggaagtagctgatctctgcaggaaactgctgttacctgacctcagctgaatttttgtgggacctcctgagggcttggcaccgcagaagtctctgaagagacagtctgctgctgtttggaggggataaaaacattcagatggcagatcacagtttttcagatggggttccttcagattccgtggaagctgctaaaaatgcaagtaacacagaaaagctcacagatcaggtgatgcagaatcctcgagttctggcagctttacaggagcgacttgacaatgtccctcacaccccttccagctacatcgaaactttacctaaagcagtaaaaagaagaattaatgcattgaaacaacttcaggtgagatgtgctcacatagaagccaagttctatgaagaggtacatgacttggaaagaaagtatgcagcgctataccagcctctctttgacaagagaaga

SEQ ID NO: 161459 - DNA, 587 bp, Homo sapiens
  Payload ID: 11519
  Gene Symbol: NAP1L4
  Gene Name: nucleosome assembly protein 1-like 4
  ENST ID: ENST00000632038
  CDS Start-End: 167-587
gtgaggtgcggagacacgggtgctgggccggaagtagctgatctctgcaggaaactgctgttacctgacctcagctgaatttttgtgggacctcctgagggcttggcaccgcagaagtctctgaagagacagtctgctgctgtttggaggggataaaaacattcagatggcagatcacagtttttcagatggggttccttcagattccgtggaagctgctaaaaatgcaagtaacacagaaaagctcacagatcaggtgatgcagaatcctcgagttctggcagctttacaggagcgacttgacaatgtccctcacaccccttccagctacatcgaaactttacctaaagcagtaaaaagaagaattaatgcattgaaacaacttcaggtgagatgtgctcacatagaagccaagttctatgaagaggtacatgacttggaaagaaagtatgcagcgctataccagcctctctttgacaagagaagagaatttatcaccggcgatgttgaaccaacagatgcggaatcggaatggcacagtgaaaatgaagaggaagagaaattggctggagacatgaaaagtaaag

SEQ ID NO: 161460 - DNA, 544 bp, Homo sapiens
  Payload ID: 11519
  Gene Symbol: NAP1L4
  Gene Name: nucleosome assembly protein 1-like 4
  ENST ID: ENST00000631916
  CDS Start-End: 309-544
gtgaggtgcggagacacgggtgctgggccgggaaaagtgttttaggcttccagagtagaaatctgatattacttcgtttgattcttcgaccactatggtgataggaagtagctgatctctgcaggaaactgctgttacctgacctcagctgaatttttgtgggacctcctgagggcttggcaccgcagaagtctctgaagagacagtctgctgctgtttggagagacgaggtttccccatgttgcccaggctggtctgaaactcctgagcttcaggtgatctgtgataggggggataaaaacattcagatggcagatcacagtttttcagatggggttccttcagattccgtggaagctgctaaaaatgcaagtaacacagaaaagctcacagatcaggtgatgcagaatcctcgagttctggcagctttacaggagcgacttgacaatgtccctcacaccccttccagctacatcgaaactttacctaaagcagtaaaaagaagaattaatgcattgaaacaacttcaggtgagatgtgctca

SEQ ID NO: 161461 - DNA, 2321 bp, Homo sapiens
  Payload ID: 11520
  Gene Symbol: NAP1L5
  Gene Name: nucleosome assembly protein 1-like 5
  Uniprot ID: Q96NT1
  ENST ID: ENST00000323061
  CDS Start-End: 482-1030
tctaagaggtgatcaaacgccagctatggagagagatgcagaggaaagcgaagacatatgcactggcatttgtagaagggcctggatgggggtgaggagcacacggaaaatggtctgaggccatctatgcagttcctgaagaagcacctcgggcagctactgacactcccagcccagctctacaggggtgggtacatgggtgggctgggaacagggtgtctgtccaacaggcgggtgttgagggcccagaagatgtcagggtagcaacaggaggaatctggtgcagtatgagcacacggccgtcagctgatagtgggaagccagtcaagtgccgcgaaagcaggaggcggggccgcggccaacgtcattcccgcggccgcacgtcaccgccacttgccgcatccgcaagatctctctggaccagctcgggtgcagggcctctgcgggagccctcctagacctctgcggcttctcctctaacatggccgactcggaaaaccaggggcctgcggagcctagccaggcggcggcagcggcggaggcagcggcagaggaggtaatggcggaaggcggtgcgcagggtggagactgtgacagcgcggctggtgaccctgacagcgcggctggtcagatggctgaggagccccagacccctgcagagaatgccccaaagccgaaaaatgactttatcgagagcctgcctaattcggtgaaatgccgagtcctggccctcaaaaagctgcagaagcgatgcgataagatagaagccaaatttgataaggaatttcaggctctggaaaaaaagtataatgacatctataagcccctactcgccaagatccaagagctcaccggcgagatggaggggtgtgcatggaccttggagggggaggaggaggaggaagaggagtacgaggatgacgaggaggagggggaagacgaggaggaggaggaggctgcggcagaggctgccgcgggggccaaacatgacgatgcccacgccgagatgcctgatgacgccaagaagtaaggggggcagagatggatgaagagaaagcccacgaagaaaaaagcctggttttgtttttcccagaatatcgatggacttaaaaaggctcaggtttttgaccaaaatacaatgtgaatttattctgacattcctaaaatagattaaattaaagcaattagatcctggccagctcgattcaaatttgactttcattttgaacataataaatatatcaaaaggtgttaaagaaaactgaattaaacccaaaattatgttttcatggtctcttctctgaggattgaggtttacaaagggtgttagcagatgcgaagtaaagaacgtcactttgaaacccattcatcacacagcatacgctacacatggaacacccaagccatgactgaacacgttctcagtgcttaattcttaaatttctttactcatgacatttcgcagtgcagagaaggcagaacccaagaaaaacgtcatctttgagactttgcttttgtaacgcagacatcagctttacacttcacaggagattgatggcattgaggaagattgcaatggagatcatgacactactgttaataaggccaggaaaactgccatttcaagttctgaaaaatgttttgagtatttgaatttagagaaacaacatggttccaagaaggagggtgtaaaacctgtaaaatactgtcaacatatgtattcattagttacaatctcatgtttgtgttttcttagtactgtctatttacaaacacgtaaaaaataccccaaatatgtttaagtattaaatcactttacctagcgttttagaaatattaatttacttgaagagatgtagaatgtagcaaattatgtaaagcatgtgtatccagcgttatgtactttgcgccttgtgacgtctttctgtcatgtagcttttagggtgtagctgtgaaaatcatcagaactcttcactgaagctaatgtttggaaaaaatatatacttgaagaaccaatccaagtgtgtgcccctacccccagctcagaagtagaaagggtttaagtttgcttgtattagctgtgccttcattattttgctatgtaaatgtgacatattaattataaaatggtgcataatcaaattttactgcttgaggacagatgcatacagtaaggatttttaggaagaatatatttaatgtaaagactcttagcttctgtgtgggttttgaattatgtgtgagccagtgatctataaagaaacataagcttaaagttgtttatcactgtggtgttaataaaacagtattttcaaaaaata

SEQ ID NO: 161462 - DNA, 2044 bp, Homo sapiens
  Payload ID: 11521
  Gene Symbol: NAP1L6
  Gene Name: nucleosome assembly protein 1-like 6
  Uniprot ID: A6NFF2
  ENST ID: ENST00000373518
  CDS Start-End: 199-522
ctccttttgccatggcagctagtggggaaagccctttagcccgctactcttgccttccacggcttccgccaccccaggccagcttccacagcagctgtagctgcttcgttccgcctccgtcttagcacccccaggtgccggcggcccgggccaagccatcgcctacagttcggtgagtgtttccctgccaaaaagctaatgatggaagggctcggagaacacagcacagccggtgaaatgggcccattactcggcgctgtggcagccacagcctctccgcagtctttgatggagtactcctcagacgcagattttattgagagcctgcctctggtggttaagtaccgagtgtacactctcaaaaagcttcaggccaaatgtgccgtgctagaggccaagtacctgagggaatttcattctgtcgagaggaagtttgccaccatctatggacccttattggaaaagagacggcagatcaccaatgcactgtatgagcccacgaaagaggagtgtgagaggtgaagtccaaggttgaggactatgagtataatgaggtggccggtgattctaatgctcagatgtatggtgcagaggagaatccggagtatgaggacttggtggaggatcgtgaggaggatttcgaggatgtcggggaggtgtttggggagtatgaaggaatcgagggacataatgtggacggagaaaaagataatcctacagggatccccgatttctggctcacggctttatagaatgcccaggaggttgccccgctgattaagaaatatgacgaggccaggcgcagtggctcacgcctgtaatcccagcactttgggaggccgaggcaggtggatcacaagttcaggaaatcgagaccatcctggctaacacagtgaaaccccgtctctactaaaaatacaaaaaaaaaaaaaaaaaaaattagccgggggtggtggcacacacctatagtcccagctgcccaggaggctgaggcaggagaatcgcttgaacccaagaggcagaggttgcagtgaactgagatcgcaccactgcactccagcctgggcgacagagcgatattccgaaaaaacgaaacaacaacaacaaaaatatgacgagcccattctgaagctcttgcaagacgtgaaagtcaagttttcaaaatcaaactagccactcacttttacgctggaatttcactctgaacccaacgactacttcacaaatgaggtgctgaccgaaagaaacatacatcctcaagtctaagctcgattagtctgacccccaccccttcaggggatctgcggtagagcgttgctttggcagcatgatagaatggaagaagggaaagaacgtcactgtgcaaacggtcctgaagagagacacagtttttgggggctgatgtgtaccgccactcaggaatttccccaagagtcccttcttcaatgctctccagtggggcctagatgctaatgaggatgaggaagacttcttcatcgctcacaccttgcacacttttgtcatcccaagagctgtgttacactttacaggagaagcccttgaggcagagcaagatacgatgatcagggaatgtaataatccggtttatgacagaatgactcaggagaattgggtgactgcagtttatggtgctaaaggccaaaaccgaaactcccaggcagaagtcaatgattgttgaagcagaatggttggagtatgtgggcctccaggttaacaactggcttttacaataaccaaaacttaatcattcgttacttacagtcttaacgtgtctcttcttggtagtctcagtttaaaattatgtccaaatatatttaacaatgcatttcatctagcactccagtggtgtaaactttgtcaacaattttattaggcagtgaattctcaacgtatgtgaagaccttactattgtgaatccatggcttttgtcaggttgctactagtctgcatctatggaaaattaccagaacttgtaactaagatctatgtttgggtttgtaaaataaagtgagatagcatcctt

SEQ ID NO: 161463 - DNA, 1228 bp, Homo sapiens
  Payload ID: 11522
  Gene Symbol: NUBP1
  Gene Name: nucleotide binding protein 1
  Uniprot ID: P53384
  ENST ID: ENST00000283027
  CDS Start-End: 20-982
aggcggcaaaggcgacggaatggaggaggtgcctcacgactgtccaggggccgacagcgcccaggcgggcagaggggcttcatgtcagggatgccccaaccagcggctgtgcgcttctggagcgggggccactccggacacggctatagaggaaatcaaagagaaaatgaagactgtaaaacacaaaatcttggtattgtctgggaaaggcggtgttgggaaaagcacattcagcgcccaccttgcccatggcctagcagaggatgaaaacacacagattgctcttctagacatcgatatatgtgggccatcgattcccaagataatgggattggaaggagagcaggttcaccagagtggctcaggctggtctccagtgtacgtggaagacaacctgggggtgatgtcagtgggcttcctgctcagcagtcctgatgatgctgttatctggaggggacccaagaaaaacggcatgatcaagcagttcctccgagatgtggactggggagaggtcgactacctcattgtggacaccccacctgggacgtcggatgaacacctctcggtcgtccggtacctggccacagcacacatcgatggagcagtgatcatcaccactccccaggaggtgtcactccaggatgtccggaaagaaatcaacttctgccgcaaggtgaagctgcccatcatcggggtggtggagaacatgagtggcttcatctgtcctaagtgcaagaaagaatctcagatattccctcccacaaccgggggcgcggagctcatgtgccaggacttggaggtccctctcctcggcagagtgcccctggatccgctcataggtaagaattgtgacaaaggccagtcttttttcattgacgccccagattccccagccacgttagcctacagaagtataattcagagaatccaagagttttgtaatctccatcagtcaaaagaagagaacctcatcagttcctgaaacgagagaatgttcaggaccaagcagttaccgagcgaggcactcactgggcagcacatccagccagacccgaccagctccgggatggggtgggtcacagcaaaaggaccagatgctggtgtggtccgaagccactttctcagagacactttaatcattgagtatttgtacacttttctttagaacatatataaagggcattctctacaaatgtgccgttttaagaataaaaccccctcaaatctc

SEQ ID NO: 161464 - DNA, 1185 bp, Homo sapiens
  Payload ID: 11522
  Gene Symbol: NUBP1
  Gene Name: nucleotide binding protein 1
  Uniprot ID: P53384
  ENST ID: ENST00000433392
  CDS Start-End: 10-939
ggcgacggaatggaggaggtgcctcacgactgtccaggggccgacagcgcccaggcgggcagaggggcttcatgtcagggatgccccaaccagcggctgtgcgcttctggagcgggggccactccggacacggctatagaggaaatcaaagagaaaatgaagactgtaaaacacaaaatcttggtattgtctgggaaaggcggtgttgggaaaagcacattcagcgcccaccttgcccatggcctagcagaggatgaaaacacacagattgctcttctagacatcgatatatgtgggccatcgattcccaagataatgggattggaaggagagcagtacgtggaagacaacctgggggtgatgtcagtgggcttcctgctcagcagtcctgatgatgctgttatctggaggggacccaagaaaaacggcatgatcaagcagttcctccgagatgtggactggggagaggtcgactacctcattgtggacaccccacctgggacgtcggatgaacacctctcggtcgtccggtacctggccacagcacacatcgatggagcagtgatcatcaccactccccaggaggtgtcactccaggatgtccggaaagaaatcaacttctgccgcaaggtgaagctgcccatcatcggggtggtggagaacatgagtggcttcatctgtcctaagtgcaagaaagaatctcagatattccctcccacaaccgggggcgcggagctcatgtgccaggacttggaggtccctctcctcggcagagtgcccctggatccgctcataggtaagaattgtgacaaaggccagtcttttttcattgacgccccagattccccagccacgttagcctacagaagtataattcagagaatccaagagttttgtaatctccatcagtcaaaagaagagaacctcatcagttcctgaaacgagagaatgttcaggaccaagcagttaccgagcgaggcactcactgggcagcacatccagccagacccgaccagctccgggatggggtgggtcacagcaaaaggaccagatgctggtgtggtccgaagccactttctcagagacactttaatcattgagtatttgtacacttttctttagaacatatataaagggcattctctacaaatgtgccgttttaagaataaaaccccctcaaatctc

SEQ ID NO: 161465 - DNA, 674 bp, Homo sapiens
  Payload ID: 11522
  Gene Symbol: NUBP1
  Gene Name: nucleotide binding protein 1
  ENST ID: ENST00000571175
  CDS Start-End: 1-428
gcatgatcaagcagttcctccgagatgtggactggggagaggtcgactacctcattgtggacaccccacctgggacgtcggatgaacacctctcggtcgtccggtacctggccacagcacacatcgatggagcagtgatcatcaccactccccaggaggtgtcactccaggatgtccggaaagaaatcaacttctgccgcaaggtgaagctgcccatcatcggggtggtggagaacatgagtggcttcatctgtcctaagtgcaagaaagaatctcagatattccctcccacaaccgggggcgcggagctcatgtgccaggacttggaggtccctctcctcggcagagtgcccctggatccgctcataggaatccaagagttttgtaatctccatcagtcaaaagaagagaacctcatcagttcctgaaacgagagaatgttcaggaccaagcagttaccgagcgaggcactcactgggcagcacatccagccagacccgaccagctccgggatggggtgggtcacagcaaaaggaccagatgctggtgtggtccgaagccactttctcagagacactttaatcattgagtatttgtacacttttctttagaacatatataaagggcattctctacaaatgtgccgttttaagaataaaaccccctcaaatctc

SEQ ID NO: 161466 - DNA, 517 bp, Homo sapiens
  Payload ID: 11522
  Gene Symbol: NUBP1
  Gene Name: nucleotide binding protein 1
  ENST ID: ENST00000574691
  CDS Start-End: 1-191
tcatcaccactccccaggaggtgtcactccaggatgtccggaaagaaatcaacttctgccgcaaggtgaagctgcccatcatcggggtggtggagaacatgagtggcttcatctgtcctaagtgcaaggtaagaattgtgacaaaggccagtcttttttcattgacgccccagattccccagccacgttagcctacagaagtataattcagagaatccaagagttttgtaatctccatcagtcaaaagaagagaacctcatcagttcctgaaacgagagaatgttcaggaccaagcagttaccgagcgaggcactcactgggcagcacatccagccagacccgaccagctccgggatggggtgggtcacagcaaaaggaccagatgctggtgtggtccgaagccactttctcagagacactttaatcattgagtatttgtacacttttctttagaacatatataaagggcattctctacaaatgtgccgttttaagaataaaaccccctcaaatctc

SEQ ID NO: 161467 - DNA, 582 bp, Homo sapiens
  Payload ID: 11522
  Gene Symbol: NUBP1
  Gene Name: nucleotide binding protein 1
  ENST ID: ENST00000574334
  CDS Start-End: 79-582
gagaatcagattgtgcccacaaggcggaaatgtacgacagcgggttccggtgaccacgaaggcggcaaaggcgacggaatggaggaggtgcctcacgactgtccaggggccgacagcgcccaggcgggcagaggggcttcatgtcagggatgccccaaccagcggctgtgcgcttctggagcgggggccactccggacacggctatagaggaaatcaaagagaaaatgaagactgtaaaacacaaaatcttggtattgtctgggaaaggcggtgttgggaaaagcacattcagcgcccaccttgcccatggcctagcagaggatgaaaacacacaggttcaccagagtggctcaggctggtctccagtgtacgtggaagacaacctgggggtgatgtcagtgggcttcctgctcagcagtcctgatgatgctgttatctggaggggacccaagaaaaacggcatgatcaagcagttcctccgagatgtggactggggagaggtcgactacctcattgtggacaccccacctgggacgtcggatgaacacctctcggtcgtccggtacctggccacagcacac

SEQ ID NO: 161468 - DNA, 1413 bp, Homo sapiens
  Payload ID: 11523
  Gene Symbol: NUBP2
  Gene Name: nucleotide binding protein 2
  Uniprot ID: Q9Y5Y2
  ENST ID: ENST00000262302
  CDS Start-End: 121-936
aagaagagccacgggcgggcacgcactgcccattggttggaaggcccttcgctctagctgggaggctgacggcccgcgggcgtaagcggactgcagccgcgagctcctggaggcggcgggatggaggcggcggccgagcctggaaacctggccggcgtcaggcacatcatcctggtcctctcaggaaaggggggcgttgggaaaagcaccatctccacggagctggccctggcactgcgccatgcaggcaagaaggtgggaatcctggatgtggacctgtgtggccccagtatcccccgcatgctcggggcgcagggcagggctgtgcaccagtgcgaccgcggctgggcacccgtcttcctggaccgggagcagagcatctcgctcatgtctgtgggcttcctgctggagaagccggacgaggccgtggtgtggagaggccccaagaaaaacgcgctgataaagcagtttgtgtccgacgtggcctggggggagctggactacctggtggtggacacgcccccggggacctccgatgagcacatggccaccatagaagccctgcgtccctaccagcccctgggggccctcgtggtcaccacgccccaggcggtgtccgtgggggacgtgaggcgcgagctgaccttctgtaggaagacgggcttgcgggtgatgggaatcgtggagaatatgagcggcttcacctgcccacactgcacggagtgcaccagcgtcttctccaggggcggcggagaggagctggcccagctcgccggggtgcccttcttaggctccgtgcccctggaccctgcgctcatgaggaccctggaggagggccacgacttcatccaggagttccctgggagccccgccttcgctgcactcacctccatagcccagaagattctggacgcgacgcccgcgtgcctcccctgactaaggccaccttgcagccgctttccagggccaccaagggctctgctccagcctctcagagaaacagaggcctgggctcggttcccgggccctgcaggggcaggcccaggcagcgtcagccggagagcttctccccgaccagcccagccccaggatgtgtcgcaccagcagctctgcctggttggcctgcagtgccgtggtctgcgtgctctgcagctgtgagacgggggcggcctgggctctcttcccatccatgttgcctacctgtgcccctggcagccgcgtgtccacacagttagcggagcgcgggacttctgcagtcctcaggtgaccccgggcctccagcaccctgggtcgctgtcatctgtgtttagctcggggagtgccccctaagggggcgaactgacctcaggcatgttttgtaactgtagaggcgcctgccattaaacgtgtccgctgctgtggcgacagatctga

SEQ ID NO: 161469 - DNA, 470 bp, Homo sapiens
  Payload ID: 11523
  Gene Symbol: NUBP2
  Gene Name: nucleotide binding protein 2
  ENST ID: ENST00000563136
  CDS Start-End: 54-470
gacggcccgcgggcgtaagcggactgcagccgcgagctcctggaggcggcgggatggaggcggcggccgagcctggaaacctggccggcgtcaggcacatcatcctggtcctctcaggaaaggggggcgttgggaaaagcaccatctccacggagctggccctggcactgcgccatgcaggcaagaaggctgtgccgctccttgcaggtgggaatcctggatgtggacctgtgtggccccagtatcccccgcatgctcggggcgcagggcagggctgtgcaccagtgcgaccgcggctgggcacccgtcttcctggaccgggagcagagcatctcgctcatgtctgtgggcttcctgctggagaagccggacgaggccgtggtgtggagaggccccaagaaaaacgcgctgataaagcagtttgtgtccgacgtggcctggggggagctggactacctggtggtggacac

SEQ ID NO: 161470 - DNA, 815 bp, Homo sapiens
  Payload ID: 11523
  Gene Symbol: NUBP2
  Gene Name: nucleotide binding protein 2
  ENST ID: ENST00000565134
  CDS Start-End: 15-770
ctggaggcggcgggatggaggcggcggccgagcctggaaacctggccggcgtcaggcacatcatcctggtcctctcaggaaaggggggcgttgggaaaagcaccatctccacggagctggccctggcactgcgccatgcaggcaagaaggtgggaatcctggatgtggacctgtgtggccccagtatcccccgcatgctcggggcgcagggcagggctgtgcaccagtgcgaccgcggctgggcacccgtcttcctggaccgggagcagagcatctcgctcatgtctgtgggcttcctgctggagaagccggacgaggccgtggtgtggagaggccccaagaaaaacgcgctgataaagcagtttgtgtccgacgtggcctggggggagctggactacctggtggtggacacgcccccggggacctccgatgagcacatggccaccatagaagccctgcgtccctaccagcccctgggggccctcgtggtcaccacgccccaggcggtgtccgtgggggacgtgaggcgcgagctgaccttctgtaggaagacgggcttgcgggtgatgggaatcgtggagaatatgagcggcttcacctgcccacactgcacggtgagtcccgggggttgcagagggggcgaggcagcacctggccggtgggggctttgggcagtgctgggctcaccaccgtctcctaggagtgcaccagcgtcttctccaggggcggcggagaggagctggcccagctcgccggggtgcccttcttaggctccgtgcccctggaccctgcgctcatgaggaccctggaggagg

SEQ ID NO: 161471 - DNA, 839 bp, Homo sapiens
  Payload ID: 11523
  Gene Symbol: NUBP2
  Gene Name: nucleotide binding protein 2
  ENST ID: ENST00000568287
  CDS Start-End: 27-839
agccgcgagctcctggaggcggcgggatggaggcggcggccggagtgtggggctggggctgccttttccgcgtcccctggaggagacctcaggcagcctctgtaggtctgaggacccgcctgcatgccaggttctccgggaggctttggacttgggagcctttgaacgtgcccttgagaggcggatcagaagggggcaggttttacgcatcatgtgttgagcccctcacatgcaccctccaaggacctgtcggggatggagcagcttgctggagacaaggggcatggcctcagcggtggcgccgggagcctggaaacctggccggcgtcaggcacatcatcctggtcctctcaggaaaggggggcgttgggaaaagcaccatctccacggagctggccctggcactgcgccatgcaggcaagaaggtgggaatcctggatgtggacctgtgtggccccagtatcccccgcatgctcggggcgcagggcagggctgtgcaccagtgcgaccgcggctgggcacccgtcttcctggaccgggagcagagcatctcgctcatgtctgtgggcttcctgctggagaagccggacgaggccgtggtgtggagaggccccaagaaaaacgcgctgataaagcagtttgtgtccgacgtggcctggggggagctggactacctggtggtggacacgcccccggggacctccgatgagcacatggccaccatagaagccctgcgtccctaccagcccctgggggccctcgtggtcaccacgccccaggcggtgtccgtgggggacgtgaggcgcgagctgaccttctgtaggaagacgggcttgcgg

SEQ ID NO: 161472 - DNA, 903 bp, Homo sapiens
  Payload ID: 11523
  Gene Symbol: NUBP2
  Gene Name: nucleotide binding protein 2
  ENST ID: ENST00000564227
  CDS Start-End: 1-175
ggaggcggcggccggtgagtggcgggccagggtgcggagccgctccagggcctcgcttggggccccgccgcgtcccttcccggggcggcctcgctgcgtcgcgcgcctccggtgcgaccatcaccggccggcgtggctgggccgggccagaggccgcggcgcgggcattttctaaacagggtcgtttcccgcgtgctcctgcttcgatgtggaagctccgtgatctcggagggcctgagtcgtggagttgggggagcttttaaagttaactttgttgagcaccgcgttgtaggcgggcgcggtggcgcctgtgggccccgctatcctggaggtcgcggttgcaactgcaccgcagcccgggcaagagcgagaccctgtctctaaataaatcacacgcgcgcagtcatgaaagtaagacggacgccagaatctcacatgcttttaagttctttgtggaagtggcgctctcagtgttcagaaaagtagcctggaaacctggccggcgtcaggcacatcatcctggtcctctcaggaaaggggggcgttgggaaaagcaccatctccacggagctggccctggcactgcgccatgcaggcaagaaggtgggaatcctggatgtggacctgtgtggccccagtatcccccgcatgctcggggcgcagggcagggctgtgcaccagtgcgaccgcggctgggcacccgtcttcctggaccgggagcagagcatctcgctcatgtctgtgggcttcctgctggagaagccggacgaggccgtggtgtggagaggccccaagaaaaacgcgctgataaagcagtttgtgtccgacgtggcctggggggagctggactacctggtggtggacacgcccccggggacctccgatgagcacatggccaccata

SEQ ID NO: 161473 - DNA, 1049 bp, Homo sapiens
  Payload ID: 11523
  Gene Symbol: NUBP2
  Gene Name: nucleotide binding protein 2
  ENST ID: ENST00000565987
  CDS Start-End: 402-1037
actgcagccgcgagctcctggaggcggcgggatggaggcggcggccgtagagacggggtttcaccgtgttagccaggatggtctcgatctcctgacctcgtgatccgcccgtctcagcctcccaaagtgctgggattacaggcgtgagccacggcgcctggcccagtgctggagtcttattccagaggagaagcctggaaaagcctgtccttattatcaggacggatttactacaaaagcctggaaacctggccggcgtcaggcacatcatcctggtcctctcaggaaaggggggcgttgggaaaagcaccatctccacggagctggccctggcactgcgccatgcaggcaagaaggtgggaatcctggatgtggacctgtgtggccccagtatcccccgcatgctcggggcgcagggcagggctgtgcaccagtgcgaccgcggctgggcacccgtcttcctggaccgggagcagagcatctcgctcatgtctgtgggcttcctgctggagaagccggacgaggccgtggtgtggagaggccccaagaaaaacgcgctgataaagcagtttgtgtccgacgtggcctggggggagctggactacctggtggtggacacgcccccggggacctccgatgagcacatggccaccatagaagccctgcgtccctaccagcccctgggggccctcgtggtcaccacgccccaggcggtgtccgtgggggacgtgaggcgcgagctgaccttctgtaggaagacgggcttgcgggtgatgggaatcgtggagaatatgagcggcttcacctgcccacactgcacggagtgcaccagcgtcttctccaggggcggcggagaggagctggcccagctcgccggggtgcccttcttaggctccgtgcccctggaccctgcgctcatgaggaccctggaggagggccacgacttcatccaggagttccctgggagccccgccttcgctgcactcacctccatagcccagaagattctggacgcgacgcccgcgtgcctcccctgactaaggccacct

SEQ ID NO: 161474 - DNA, 811 bp, Homo sapiens
  Payload ID: 11523
  Gene Symbol: NUBP2
  Gene Name: nucleotide binding protein 2
  ENST ID: ENST00000562263
  CDS Start-End: 379-811
ccggctaattttttgtatttttagtagagacggggtttcaccgtgttagccaggatggtctcgatctcctgacctcgtgatccgcccgtctcagcctcccaaagtgctgggattacaggcgtgagccacggcgcctggcccagtgctggagtcttattccagaggagaagcctggaaaagcctgtccttattatcaggacggatttactacaaaagcctggaaacctggccggcgtcaggcacatcatcctggtcctctcaggaaaggggggcgttgggaaaagcaccatctccacggagctggccctggcactgcgccatgcaggcaagaaggtgggaatcctggatgtggacctgtgtggccccagtatcccccgcatgctcggggcgcagggcagggctgtgcaccagtgcgaccgcggctgggcacccgtcttcctggaccgggagcagagcatctcgctcatgtctgtgggcttcctgctggagaagccggacgaggccgtggtgtggagaggccccaagaaaaacgcgctgataaagcagtttgtgtccgacgtggcctggggggagctggactacctggtggtggacacgcccccggggacctccgatgagcacatggccaccatagaagccctgcgtccctaccagcccctgggggccctcgtggtcaccacgccccaggcggtgtccgtgggggacgtgaggcgcgagctgaccttctgtaggaagacgggcttgcgggtgatgggaatcgtggagaatatgagcggcttcacctgcccacactgcacggagtgcaccagcg

SEQ ID NO: 161475 - DNA, 582 bp, Homo sapiens
  Payload ID: 11523
  Gene Symbol: NUBP2
  Gene Name: nucleotide binding protein 2
  ENST ID: ENST00000569898
  CDS Start-End: 23-163
gcgagctcctggaggcggcgggatggaggcggcggccgagcctggaaacctggccggcgtcaggcacatcatcctggtcctctcaggaaaggggggcgttgggaaaagcaccatctccacggagctggccctggcactgcgccatgcaggcaagaagcgctgataaagcagtttgtgtccgacgtggcctggggggagctggactacctggtggtggacacgcccccggggacctccgatgagcacatggccaccatagaagccctgcgtccctaccagcccctgggggccctcgtggtcaccacgccccaggcggtgtccgtgggggacgtgaggcgcgagctgaccttctgtaggaagacgggcttgcgggtgatgggaatcgtggagaatatgagcggcttcacctgcccacactgcacggggcggcggagaggagctggcccagctcgccggggtgcccttcttaggctccgtgcccctggaccctgcgctcatgaggaccctggaggagggccacgacttcatccaggagttccctgggagccccgccttcgctgcactcacctccatagcccagaa

SEQ ID NO: 161476 - DNA, 1173 bp, Homo sapiens
  Payload ID: 11523
  Gene Symbol: NUBP2
  Gene Name: nucleotide binding protein 2
  ENST ID: ENST00000568834
  CDS Start-End: 90-230
attggttggaaggcccttcgctctagctgggaggctgacggcccgcgggcgtaagcggactgcagccgcgagctcctggaggcggcgggatggaggcggcggccgagcctggaaacctggccggcgtcaggcacatcatcctggtcctctcaggaaaggggggcgttgggaaaagcaccatctccacggagctggccctggcactgcgccatgcaggcaagaagcgctgataaagcagtttgtgtccgacgtggcctggggggagctggactacctggtggtggacacgcccccggggacctccgatgagcacatggccaccatagaagccctgcgtccctaccagcccctgggggccctcgtggtcaccacgccccaggcggtgtccgtgggggacgtgaggcgcgagctgaccttctgtaggaagacgggcttgcgggtgatgggaatcgtggagaatatgagcggcttcacctgcccacactgcacggagtgcaccagcgtcttctccaggggcggcggagaggagctggcccagctcgccggggtgcccttcttaggctccgtgcccctggaccctgcgctcatgaggaccctggaggagggccacgacttcatccaggagttccctgggagccccgccttcgctgcactcacctccatagcccagaagattctggacgcgacgcccgcgtgcctcccctgactaaggccaccttgcagccgctttccagggccaccaagggctctgctccagcctctcagagaaacagaggcctgggctcggttcccgggccctgcaggggcaggcccaggcagcgtcagccggagagcttctccccgaccagcccagccccaggatgtgtcgcaccagcagctctgcctggttggcctgcagtgccgtggtctgcgtgctctgcagctgtgagacgggggcggcctgggctctcttcccatccatgttgcctacctgtgcccctggcagccgcgtgtccacacagttagcggagcgcgggacttctgcagtcctcaggtgaccccgggcctccagcaccctgggtcgctgtcatctgtgtttagctcggggagtgccccctaagggggcgaactgacctcaggcatgttttgtaactgtagaggcgcctgccattaaacgtgtccgctgctgtggcg

SEQ ID NO: 161477 - DNA, 913 bp, Homo sapiens
  Payload ID: 11523
  Gene Symbol: NUBP2
  Gene Name: nucleotide binding protein 2
  ENST ID: ENST00000568706
  CDS Start-End: 266-658
tccagaggagaagcctggaaaagcctgtccttattatcaggacggatttactacaaaagcctggaaacctggccggcgtcaggcacatcatcctggtcctctcaggaaaggggggcgttgggaaaagcaccatctccacggagctggccctggcactgcgccatgcaggcaagaagcgctgataaagcagtttgtgtccgacgtggcctggggggagctggactacctggtggtggacacgcccccggggacctccgatgagcacatggccaccatagaagccctgcgtccctaccagcccctgggggccctcgtggtcaccacgccccaggcggtgtccgtgggggacgtgaggcgcgagctgaccttctgtaggaagacgggcttgcgggtgatgggaatcgtggagaatatgagcggcttcacctgcccacactgcacggagtgcaccagcgtcttctccaggggcggcggagaggagctggcccagctcgccggggtgcccttcttaggctccgtgcccctggaccctgcgctcatgaggaccctggaggagggccacgacttcatccaggagttccctgggagccccgccttcgctgcactcacctccatagcccagaagattctggacgcgacgcccgcgtgcctcccctgactaaggccaccttgcagccgctttccagggccaccaagggctctgctccagcctctcagagaaacagaggcctgggctcggttcccgggccctgcaggggcaggcccaggcagcgtcagccggagagcttctccccgaccagcccagccccaggatgtgtcgcaccagcagctctgcctggttggcctgcagtgccgtggtctgcgtgctctgcagctgtgagacgggggcggcctgggctctcttcccatccat

SEQ ID NO: 161478 - DNA, 3049 bp, Homo sapiens
  Payload ID: 11524
  Gene Symbol: NUBPL
  Gene Name: nucleotide binding protein-like
  Uniprot ID: Q8TB37
  ENST ID: ENST00000281081
  CDS Start-End: 46-1005
acccgcgacagtttcccagcagggctcacagcagcgttccgcgtcatggggatttggcagcgtctgctgctttttggtggggtgtcgctccgggctggtggcggggccactgccccgcttgggggaagccgagcgatggtttgtgggcgccagttgtctggcgccgggagtgagaccctaaaacaaagaagaacacaaatcatgtcccgaggacttccaaagcagaaaccgatagaaggtgttaaacaagttatagttgtggcttctggaaagggtggagtcggaaaatctactacagcagtgaatcttgcacttgcactagcagcgaacgattcgtccaaggccattggtttgctagatgtggatgtgtatggaccttcagttccaaagatgatgaatctgaaaggaaatccggaattatcacagagcaacctaatgaggcctctcttgaattatggtattgcttgtatgtctatgggctttctggttgaagaaagtgaaccagtagtttggagaggccttatggtaatgtcggccattgagaaattgttgaggcaggtagattggggtcaactggactacttagttgtagacatgccaccaggaactggagatgtgcagttatcagtctcacagaatattcctataacaggtgctgtgattgtctccacgccccaggacatcgcattgatggatgcacacaagggtgctgagatgtttcgcagagtccacgtgcccgtccttggccttgtccaaaacatgagtgttttccagtgtccaaaatgtaaacacaaaactcatatttttggtgctgatggtgcaaggaaactagcacagacccttggtcttgaagttctaggagacattcccttacaccttaatataagggaagcttcagatacaggccagccaattgtgttttcacagcctgaaagtgatgaggccaaagcttacttgaggattgctgtggaagtggtaagaagattgccatcaccttcagaatgattccccaagtgtcctggaaatttgcctggtactgacattaagaggacctttggaaatcagcaatgtggtgatggaacctacagaaataatagaaatcataactgttttatttctaaggaaagaatgtcttcatatttgacttgctaagctaaggttcacaaaactttgatgtatcaatgttaactgctatatttaggaattttttgaaagctggtgtgtaccacctgcaaagaactgcattttattttattgaattacccctttagaaatcacgagtttatgatgttacaagtccattttgggagagaactgtacactttttgcaggaccacagaattagtaatttaaatgatatactaaatttgtgtatgggcataagtattacgccttcccaccaggcaatttggactgtctttgaatcctgtctttggtactgtcttggacatgttcttaatatgaacctctgcttcttcatctggatcacactataccccagacttaatgaatttcagtctccaggagtggagcctgaacatatgtatttttagtaagaccatgatgatgttgatgatgattctggtaatcatggcagtaagaataatagctaacatttaacaagttaattataattgttcttccatttgtgtgagtgggtactattatctccattttacagataagtaatttgagatataatttgaaggcactcaaccttgagtgtcttgctgagggttactgtatctagcaggtgatggagcttggatttgaacttgagtaattcgatattagattcatctttttgtacaccaatgtgcttttgttaattaaaaaaagtcggtggtggctaggcgtggtggctcacgcctgtaatcccagcactttgggaggttgaggtgggtggatcatgaggtcaggagttcaagaccagcctgaccaacatggtgaaaccccgtctctactaaaaatacaaaaattagctgggtgtggtggcatatgcctgtaatcccagctactcgggaggctgaggcaggagaatcatttcaacccgggaggctgaggttgcagtgagtggagattgtaccactgcactccagcctggtcaatggagtgcgactccatctcaaaaaaaaaaaaaaaaaaaaaaaaagtcgggggagatgcaatatttagcatttcctcaaactttttttggccatgaaatccaccacccccctcctttttcagagcatttcatgaagttcacatttcaaataatacattttgaaaaacatttatcttgtctaattgaagctcaaagagatagagtcaatgacttttcaaagtcaggtagcagatagttttaaagctgcaagtactgataagtgtgagccattagttaattcgcatttataaagaagtggtctgtcacttttggcaaatgtcttgacatctgttgctctacagttgtcaactagaaaattaggcatagagtttcacattattataagcatgttttcacacaaaaacatgtacattgatgtttattgcaattttatgtgtaataaccaaaaacaacccagattttcttcattgggtaaatgattaaacaaaccatagtacattcataccgtgagtgctactcagcaataaaaaagaacaaactatgggtacaggcagcaacttataattccagagaattatgctgaatgaaaaaggccaatttaaaaaggttttgtaccaaaagattccatttatataacgttcttgaagtgacataattatagaaatggagaacagattagtggtggctgtgttaaggagggggtgaggatgggagagaattgggcgtggctgtgagaaacatgagggatccttgtgatgatggaaatgttctatatcacagctatcgatgtcagtatcccagttgtgatattgtgctatagttttgcaagatgttaccactgggggaaattgggtgaagggcacatggaatctctgtattatttcaactgcatgtaaatctacaattatctcaaaataaaaataaaagttaaaaaaacacaaa

SEQ ID NO: 161479 - DNA, 560 bp, Homo sapiens
  Payload ID: 11524
  Gene Symbol: NUBPL
  Gene Name: nucleotide binding protein-like
  ENST ID: ENST00000550005
  CDS Start-End: 398-560
agaaatgcagaagcagatggtactgctgaaccaaatgtgtgaaaggctagtaactcatagatgcatataatttttagagttggaagagaccaaggagttaaattcatctaactcccattctataagtatttcagatgactgcagttgtgtcctcatcatcaatctctaaatgaagttacttgaagcaattcttgaaaccataataataatgtctccagaattggtggattcttggtctcactgacttcaagaatgaagccacggaccctcgcgaaggactttggacaacaatttctttgactgaaactggggtcagagttgcagactccctggaacatgaaaagtcaataatctagttcccaaaaggcagacaagaaactattcccaagatgaacaaatgatgagaatagaggtaaaggtgaaaatgatgttgtctggcgccgggagtgagaccctaaaacaaagaagaacacaaatcatgtcccgaggacttccaaagcagaaaccgatagaaggtgttaaacaagttatagttgtggcttctggaaagggtggagtcg

SEQ ID NO: 161480 - DNA, 567 bp, Homo sapiens
  Payload ID: 11524
  Gene Symbol: NUBPL
  Gene Name: nucleotide binding protein-like
  ENST ID: ENST00000551314
  CDS Start-End: 168-567
ttcttgccaaagactcgcctcagttcctgagacccccagtgtgctggacgtgcctacttttcaggcaggcccaggctgaggcgtggcgggacttgaaacacagttagaacgtagatgtgttgtctggcgccgggagtgagaccctaaaacaaagaagaacacaaatcatgtcccgaggacttccaaagcagaaaccgatagaaggtgttaaacaagttatagttgtggcttctggaaagggtggagtcggaaaatctactacagcagtgaatcttgcacttgcactagcagcgaacgattcgtccaaggccattggtttgctagatgtggatgtgtatggaccttcagttccaaagatgatgaatctgaaaggaaatccggaattatcacagagcaacctaatgaggcctctcttgaattatggtattgcttgtatgtctatgggctttctggttgaagaaagtgaaccagtagtttggagaggccttatggtaatgtcggccattgagaaattgttgaggcaggtagattggggtcaactggactacttagttgtagacatgccac

SEQ ID NO: 161481 - DNA, 541 bp, Homo sapiens
  Payload ID: 11524
  Gene Symbol: NUBPL
  Gene Name: nucleotide binding protein-like
  ENST ID: ENST00000552489
  CDS Start-End: 1-312
atggggatttggcagcgtctgctgctttttggtggggtgtcgctccgggctggtggcggggccactgccccgcttgggggaagccgagcgatggtttgtgggcgccagttgtctggcgccgggagtgagaccctaaaacaaagaagaacacaaatcatgtcccgaggacttccaaagcagaaaccgatagaaggtgttaaacaagttatagttgtggcttctggaaagggtggagtcggaaaatctactacagcagtagagacggggtttcaccgtgttaaccaggatggtctccatctcctgatctcgtgatccgcccgcctagccctcccaaagtgctgggattacagtgaatcttgcacttgcactagcagcgaacgattcgtccaaggccattggtttgctagatgtggatgtgtatggaccttcagttccaaagatgatgaatctgaaaggaaatccggaattatcacagagcaacctaatgaggcctctcttgaattatggtattgcttgtatgtctatgggctttctggttgaa

SEQ ID NO: 161482 - DNA, 557 bp, Homo sapiens
  Payload ID: 11524
  Gene Symbol: NUBPL
  Gene Name: nucleotide binding protein-like
  ENST ID: ENST00000550649
  CDS Start-End: 56-557
actccgcgccacccgcgacagtttcccagcagggctcacagcagcgttccgcgtcatggggatttggcagcgtctgctgctttttggtggggtgtcgctccgggctggtggcggggccactgccccgcttgggggaagccgagcgatggtttgtgggcgccagttgtctggcgccgggagtgagaccctaaaacaaagaagaacacaaatcatgtcccgaggacttccaaagcagaaaccgatagaaggtgttaaacaagttatagttgtggcttctggaaagggtggagtcggaaaatctactacagcagtgaatcttgcacttgcactagcagcgaacgattcggtccttggccttgtccaaaacatgagtgttttccagtgtccaaaatgtaaacacaaaactcatatttttggtgctgatggtgcaaggaaactagcacagacccttggtcttgaagttctaggagacattcccttacaccttaatataagggaagcttcagatacaggccagccaattgtgttttcacagcctgaaagtgatgaggccaaag

SEQ ID NO: 161483 - DNA, 556 bp, Homo sapiens
  Payload ID: 11524
  Gene Symbol: NUBPL
  Gene Name: nucleotide binding protein-like
  ENST ID: ENST00000549838
  CDS Start-End: 1-393
gtgtcgctccgggctggtggcggggccactgccccgcttgggggaagccgagcgatggtttgtgggcgccagttgtctggcgccgggagtgagaccctaaaacaaagaagaacacaaatcatgtcccgaggacttccaaagcagaaaccgatagaaggtgttaaacaagttatagttgtggcttctggaaagggtggagtcggaaaatctactacagcagtgaatcttgcacttgcactagcagcgaacgattcgtccaaggccattggtttgctagatgtggatgtgtatggaccttcagttccaaagatgatgaatctgaaaggaaatccggaattatcacagagtatatctcagagatgttgcaggtcttgttccagaccaccacaataaagcaagtgtctcaataaagcaacctaatgaggcctctcttgaattatggtattgcttgtatgtctatgggctttctggttgaagaaagtgaaccagtagtttggagaggccttatggtaatgtcggccattgagaaattgttgaggcaggtagattggggtca

SEQ ID NO: 161484 - DNA, 2001 bp, Homo sapiens
  Payload ID: 11524
  Gene Symbol: NUBPL
  Gene Name: nucleotide binding protein-like
  Uniprot ID: Q8TB37
  ENST ID: ENST00000547839
  CDS Start-End: 43-564
cgcgacagtttcccagcagggctcacagcagcgttccgcgtcatggggatttggcagcgtctgctgctttttggtggggtgtcgctccgggctggtggcggggccactgccccgcttgggggaagccgagcgatggtttgtgggcgccagttgtctggcgccgggagtgagaccctaaaacaaagaagaacacaaatcatgtcccgaggacttccaaagcagaaaccgatagaaggtgttaaacaagttatagttgtggcttctggaaagggtggagtcggaaaatctactacagcagtgaatcttgcacttgcactagcagcgaacgattcgtccaaggccattggtttgctagatgtggatgtgtatggaccttcagttccaaagatgatgaatctgaaaggaaatccggaattatcacagagcaacctaatgaggcctctcttgaattatggtattgcttgtatgtctatgggctttctggttgaagaaagtgaaccagtagtttggagaggccttatggtaatgtcggccattgagaaattgttgaggcaggtgctgtgattgtctccacgccccaggacatcgcattgatggatgcacacaagggtgctgagatgtttcgcagagtccacgtgcccgtccttggccttgtccaaaacatgagtgttttccagtgtccaaaatgtaaacacaaaactcatatttttggtgctgatggtgcaaggaaactagcacagacccttggtcttgaagttctaggagacattcccttacaccttaatataagggaagcttcagatacaggccagccaattgtgttttcacagcctgaaagtgatgaggccaaagcttacttgaggattgctgtggaagtggtaagaagattgccatcaccttcagaatgattccccaagtgtcctggaaatttgcctggtactgacattaagaggacctttggaaatcagcaatgtggtgatggaacctacagaaataatagaaatcataactgttttatttctaaggaaagaatgtcttcatatttgacttgctaagctaaggttcacaaaactttgatgtatcaatgttaactgctatatttaggaattttttgaaagctggtgtgtaccacctgcaaagaactgcattttattttattgaattacccctttagaaatcacgagtttatgatgttacaagtccattttgggagagaactgtacactttttgcaggaccacagaattagtaatttaaatgatatactaaatttgtgtatgggcataagtattacgccttcccaccaggcaatttggactgtctttgaatcctgtctttggtactgtcttggacatgttcttaatatgaacctctgcttcttcatctggatcacactataccccagacttaatgaatttcagtctccaggagtggagcctgaacatatgtatttttagtaagaccatgatgatgttgatgatgattctggtaatcatggcagtaagaataatagctaacatttaacaagttaattataattgttcttccatttgtgtgagtgggtactattatctccattttacagataagtaatttgagatataatttgaaggcactcaaccttgagtgtcttgctgagggttactgtatctagcaggtgatggagcttggatttgaacttgagtaattcgatattagattcatctttttgtacaccaatgtgcttttgttaattaaaaaaagtcggtggtggctaggcgtggtggctcacgcctgtaatcccagcactttgggaggttgaggtgggtggatcatgaggtcaggagttcaagaccagcctgaccaacatggtgaaaccccgtctctactaaaaatacaaaaattagctgggtgtggtggcatatgcctgtaatcccagctactcgggaggctgaggcaggagaatcatttcaacccgggaggctgaggttgcagtgagtggagattgtaccactgcactcca

SEQ ID NO: 161485 - DNA, 4499 bp, Homo sapiens
  Payload ID: 11525
  Gene Symbol: NOD1
  Gene Name: nucleotide-binding oligomerization domain containing 1
  Uniprot ID: Q9Y239
  ENST ID: ENST00000222823
  CDS Start-End: 527-3388
cccgttccgggcccgcgaggcagccgccccggtcctgcccctccctcgcgctactgcgggagcagcgtcctcccgggccacggcgcttcccggccccggcgtccccggaccatggcgctctccgggctcttctctagctctcagcggctgcgaagtctgtaaacctggtggccaagtgattgtaagtcaggagactttccttcggtttctgcctttgatggcaagaggtggagattgtggcggcgattacagaaaacatctgggaagacaagttgctgtttttatgggaatcgcaggcttggaagagacagaagcaattccagaaataaattggaaattgaagatttaaacaatgttgttttaaaatattctaacttcaaagaatgatgccagaaacttaaaaaggggctgcgcagagtagcaggggccctggagggcgcggcctgaatcctgattgcccttctgctgagaggacacacgcagctgaagatgaatttgggaaaagtagccgcttgctactttaactatggaagagcagggccacagtgagatggaaataatcccatcagagtctcacccccacattcaattactgaaaagcaatcgggaacttctggtcactcacatccgcaatactcagtgtctggtggacaacttgctgaagaatgactacttctcggccgaagatgcggagattgtgtgtgcctgccccacccagcctgacaaggtccgcaaaattctggacctggtacagagcaagggcgaggaggtgtccgagttcttcctctacttgctccagcaactcgcagatgcctacgtggacctcaggccttggctgctggagatcggcttctccccttccctgctcactcagagcaaagtcgtggtcaacactgacccagtgagcaggtatacccagcagctgcgacaccatctgggccgtgactccaagttcgtgctgtgctatgcccagaaggaggagctgctgctggaggagatctacatggacaccatcatggagctggttggcttcagcaatgagagcctgggcagcctgaacagcctggcctgcctcctggaccacaccaccggcatcctcaatgagcagggtgagaccatcttcatcctgggtgatgctggggtgggcaagtccatgctgctacagcggctgcagagcctctgggccacgggccggctagacgcaggggtcaaattcttcttccactttcgctgccgcatgttcagctgcttcaaggaaagtgacaggctgtgtctgcaggacctgctcttcaagcactactgctacccagagcgggaccccgaggaggtgtttgccttcctgctgcgcttcccccacgtggccctcttcaccttcgatggcctggacgagctgcactcggacttggacctgagccgcgtgcctgacagctcctgcccctgggagcctgcccaccccctggtcttgctggccaacctgctcagtgggaagctgctcaagggggctagcaagctgctcacagcccgcacaggcatcgaggtcccgcgccagttcctgcggaagaaggtgcttctccggggcttctcccccagccacctgcgcgcctatgccaggaggatgttccccgagcgggccctgcaggaccgcctgctgagccagctggaggccaaccccaacctctgcagcctgtgctctgtgcccctcttctgctggatcatcttccggtgcttccagcacttccgtgctgcctttgaaggctcaccacagctgcccgactgcacgatgaccctgacagatgtcttcctcctggtcactgaggtccatctgaacaggatgcagcccagcagcctggtgcagcggaacacacgcagcccagtggagaccctccacgccggccgggacactctgtgctcgctggggcaggtggcccaccggggcatggagaagagcctctttgtcttcacccaggaggaggtgcaggcctccgggctgcaggagagagacatgcagctgggcttcctgcgggctttgccggagctgggccccgggggtgaccagcagtcctatgagtttttccacctcaccctccaggccttctttacagccttcttcctcgtgctggacgacagggtgggcactcaggagctgctcaggttcttccaggagtggatgccccctgcgggggcagcgaccacgtcctgctatcctcccttcctcccgttccagtgcctgcagggcagtggtccggcgcgggaagacctcttcaagaacaaggatcacttccagttcaccaacctcttcctgtgcgggctgttgtccaaagccaaacagaaactcctgcggcatctggtgcccgcggcagccctgaggagaaagcgcaaggccctgtgggcacacctgttttccagcctgcggggctacctgaagagcctgccccgcgttcaggtcgaaagcttcaaccaggtgcaggccatgcccacgttcatctggatgctgcgctgcatctacgagacacagagccagaaggtggggcagctggcggccaggggcatctgcgccaactacctcaagctgacctactgcaacgcctgctcggccgactgcagcgccctctccttcgtcctgcatcacttccccaagcggctggccctagacctagacaacaacaatctcaacgactacggcgtgcgggagctgcagccctgcttcagccgcctcactgttctcagactcagcgtaaaccagatcactgacggtggggtaaaggtgctaagcgaagagctgaccaaatacaaaattgtgacctatttgggtttatacaacaaccagatcaccgatgtcggagccaggtacgtcaccaaaatcctggatgaatgcaaaggcctcacgcatcttaaactgggaaaaaacaaaataacaagtgaaggagggaagtatctcgccctggctgtgaagaacagcaaatcaatctctgaggttgggatgtggggcaatcaagttggggatgaaggagcaaaagccttcgcagaggctctgcggaaccaccccagcttgaccaccctgagtcttgcgtccaacggcatctccacagaaggaggaaagagccttgcgagggccctgcagcagaacacgtctctagaaatactgtggctgacccaaaatgaactcaacgatgaagtggcagagagtttggcagaaatgttgaaagtcaaccagacgttaaagcatttatggcttatccagaatcagatcacagctaaggggactgcccagctggcagatgcgttacagagcaacactggcataacagagatttgcctaaatggaaacctgataaaaccagaggaggccaaagtctatgaagatgagaagcggattatctgtttctgagaggatgctttcctgttcatggggtttttgccctggagcctcagcagcaaatgccactctgggcagtcttttgtgtcagtgtcttaaaggggcctgcgcaggcgggactatcaggagtccactgcctccatgatgcaagccagcttcctgtgcagaaggtctggtcggcaaactccctaagtacccgctacaattctgcagaaaaagaatgtgtcttgcgagctgttgtagttacagtaaatacactgtgaagagactttattgcctattataattatttttatctgaagctagaggaataaagctgtgagcaaacagaggaggccagcctcacctcattccaacacctgccatagggaccaacgggagcgagttggtcaccgctcttttcattgaagagttgaggatgtggcacaaagttggtgccaagcttcttgaataaaacgtgtttgatggattagtattatacctgaaatattttcttccttctcagcactttcccatgtattgatactggtcccacttcacagctggagacaccggagtatgtgcagtgtgggatttgactcctccaaggttttgtggaaagttaatgtcaaggaaaggatgcaccacgggcttttaattttaatcctggagtctcactgtctgctggcaaagatagagaatgccctcagctcttagctggtctaagaatgacgatgccttcaaaatgctgcttccactcagggcttctcctctgctaggctaccctcctctagaaggctgagtaccatgggctacagtgtctggccttgggaagaagtgattctgtccctccaaagaaatagggcatggcttgcccctgtggccctggcatccaaatggctgcttttgtctcccttacctcgtgaagaggggaagtctcttcctgcctcccaagcagctgaagggtgactaaacgggcgccaagactcaggggatcggctgggaactgggccagcagagcatgttggacaccccccaccatggtgggcttgtggtggctgctccatgagggtgggggtgatactactagatcacttgtcctcttgccagctcatttgttaataaaatactgaaaacactctta

SEQ ID NO: 161486 - DNA, 757 bp, Homo sapiens
  Payload ID: 11525
  Gene Symbol: NOD1
  Gene Name: nucleotide-binding oligomerization domain containing 1
  ENST ID: ENST00000419799
  CDS Start-End: 579-757
ccctccctcgcgctactgcgggagcagcgtcctcccgggccacggcgcttcccggccccggcgtccccggaccatggcgctctccgggctcttctctagctctcagcggctgcgaagtctgtaaacctggtggccaacatctcagttataagaaatgcacatctccgctcaaggtcccctgggacagtgcaaggaaagaaagaagcctgcggtgaaagtgacactgagtgattgtaagtcaggagactttccttcggtttctgcctttgatggcaagaggtggagattgtggcggcgattacagaaaacatctgggaagacaagttgctgtttttatgggaatcgcaggcttggaagagacagaagcaattccagaaataaattggaaattgaagatttaaacaatgttgttttaaaatattctaacttcaaagaatgatgccagaaacttaaaaaggggctgcgcagagtagcaggggccctggagggcgcggcctgaatcctgattgcccttctgctgagaggacacacgcagctgaagatgaatttgggaaaagtagccgcttgctactttaactatggaagagcagggccacagtgagatggaaataatcccatcagagtctcacccccacattcaattactgaaaagcaatcgggaacttctggtcactcacatccgcaatactcagtgtctggtggacaacttgctgaagaatgactacttctcggccgaagatgcggagattgtgtgtgc

SEQ ID NO: 161487 - DNA, 794 bp, Homo sapiens
  Payload ID: 11525
  Gene Symbol: NOD1
  Gene Name: nucleotide-binding oligomerization domain containing 1
  ENST ID: ENST00000411552
  CDS Start-End: 616-794
actgcgggagcagcgtcctcccgggccacggcgcttcccggccccggcgtccccggaccatggcgctctccgggctcttctctagctctcagcggctgcgaagtctgtaaacctggtggccaaggacagtcagttgcatgtcacacaaggggcctcctttgatttatccaaaaggtctgacctggtttctggaaaaactctttagcgcatcaaatactcgttgagggcaagtgttgtttctaaacttgactcttgtggtgagaggtgattgtaagtcaggagactttccttcggtttctgcctttgatggcaagaggtggagattgtggcggcgattacagaaaacatctgggaagacaagttgctgtttttatgggaatcgcaggcttggaagagacagaagcaattccagaaataaattggaaattgaagatttaaacaatgttgttttaaaatattctaacttcaaagaatgatgccagaaacttaaaaaggggctgcgcagagtagcaggggccctggagggcgcggcctgaatcctgattgcccttctgctgagaggacacacgcagctgaagatgaatttgggaaaagtagccgcttgctactttaactatggaagagcagggccacagtgagatggaaataatcccatcagagtctcacccccacattcaattactgaaaagcaatcgggaacttctggtcactcacatccgcaatactcagtgtctggtggacaacttgctgaagaatgactacttctcggccgaagatgcggagattgtgtgtgc

SEQ ID NO: 161488 - DNA, 637 bp, Homo sapiens
  Payload ID: 11525
  Gene Symbol: NOD1
  Gene Name: nucleotide-binding oligomerization domain containing 1
  ENST ID: ENST00000413433
  CDS Start-End: 459-637
cggctgcgaagtctgtaaacctggtggccaaaagccaagtcatccagaagccagcttctgcagctccaaagagggccttagcagttacaaagaaacacaagataacggtgattgtaagtcaggagactttccttcggtttctgcctttgatggcaagaggtggagattgtggcggcgattacagaaaacatctgggaagacaagttgctgtttttatgggaatcgcaggcttggaagagacagaagcaattccagaaataaattggaaattgaagatttaaacaatgttgttttaaaatattctaacttcaaagaatgatgccagaaacttaaaaaggggctgcgcagagtagcaggggccctggagggcgcggcctgaatcctgattgcccttctgctgagaggacacacgcagctgaagatgaatttgggaaaagtagccgcttgctactttaactatggaagagcagggccacagtgagatggaaataatcccatcagagtctcacccccacattcaattactgaaaagcaatcgggaacttctggtcactcacatccgcaatactcagtgtctggtggacaacttgctgaagaatgactacttctcggccgaagatgcggagattgtgtgtgc

SEQ ID NO: 161489 - DNA, 578 bp, Homo sapiens
  Payload ID: 11525
  Gene Symbol: NOD1
  Gene Name: nucleotide-binding oligomerization domain containing 1
  ENST ID: ENST00000419601
  CDS Start-End: 442-578
agttcccgttccgggcccgcgaggcagccgccccggtcctgcccctccctcgcgctactgcgggagcagcgtcctcccgggccacggcgcttcccggccccggcgtccccggaccatggcgctctccgggctcttctctagctctcagcggctgcgaagtctgtaaacctggtggccaagtgattgtaagtcaggagactttccttcggtttctgcctttgatggcaagaggtggagattgtggcggcgattacagaaaacatctgggaagacaagttgctgtttttatgggaatcgcaggcttggaagagacagaagcagggctgcgcagagtagcaggggccctggagggcgcggcctgaatcctgattgcccttctgctgagaggacacacgcagctgaagatgaatttgggaaaagtagccgcttgctactttaactatggaagagcagggccacagtgagatggaaataatcccatcagagtctcacccccacattcaattactgaaaagcaatcgggaacttctggtcactcacatccgcaatactcagtgtctggtggacaacttgctgaa

SEQ ID NO: 161490 - DNA, 4610 bp, Homo sapiens
  Payload ID: 11525
  Gene Symbol: NOD1
  Gene Name: nucleotide-binding oligomerization domain containing 1
  ENST ID: ENST00000434755
  CDS Start-End: 485-2824
ccctcgcgctactgcgggagcagcgtcctcccgggccacggcgcttcccggccccggcgtccccggaccatggcgctctccgggctcttctctagctctcagcggctgcgaagtctgtaaacctggtggccaagtgattgtaagtcaggagactttccttcggtttctgcctttgatggcaagaggtggagattgtggcggcgattacagaaaacatctgggaagacaagttgctgtttttatgggaatcgcaggcttggaagagacagaagcaattccagaaataaattggaaattgaagatttaaacaatgttgttttaaaatattctaacttcaaagaatgatgccagaaacttaaaaaggggctgcgcagagtagcaggggccctggagggcgcggcctgaatcctgattgcccttctgctgagaggacacacgcagctgaagatgaatttgggaaaagtagccgcttgctactttaactatggaagagcagggccacagtgagatggaaataatcccatcagagtctcacccccacattcaattactgaaaagcaatcgggaacttctggtcactcacatccgcaatactcagtgtctggtggacaacttgctgaagaatgactacttctcggccgaagatgcggagattgtgtgtgcctgccccacccagcctgacaaggtccgcaaaattctggacctggtacagagcaagggcgaggaggtgtccgagttcttcctctacttgctccagcaactcgcagatgcctacgtggacctcaggccttggctgctggagatcggcttctccccttccctgctcactcagagcaaagtcgtggtcaacactgacccagtgagcaggtatacccagcagctgcgacaccatctgggccgtgactccaagttcgtgctgtgctatgcccagaaggaggagctgctgctggaggagatctacatggacaccatcatggagctggttggcttcagcaatgagagcctgggcagcctgaacagcctggcctgcctcctggaccacaccaccggcatcctcaatgagcagggtgagaccatcttcatcctgggtgatgctggggtgggcaagtccatgctgctacagcggctgcagagcctctgggccacgggccggctagacgcaggggtcaaattcttcttccactttcgctgccgcatgttcagctgcttcaaggaaagtgacaggctgtgtctgcaggacctgctcttcaagcactactgctacccagagcgggaccccgaggaggtgtttgccttcctgctgcgcttcccccacgtggccctcttcaccttcgatggcctggacgagctgcactcggacttggacctgagccgcgtgcctgacagctcctgcccctgggagcctgcccaccccctggtcttgctggccaacctgctcagtgggaagctgctcaagggggctagcaagctgctcacagcccgcacaggcatcgaggtcccgcgccagttcctgcggaagaaggtgcttctccggggcttctcccccagccacctgcgcgcctatgccaggaggatgttccccgagcgggccctgcaggaccgcctgctgagccagctggaggccaaccccaacctctgcagcctgtgctctgtgcccctcttctgctggatcatcttccggtgcttccagcacttccgtgctgcctttgaaggctcaccacagctgcccgactgcacgatgaccctgacagatgtcttcctcctggtcactgaggtccatctgaacaggatgcagcccagcagcctggtgcagcggaacacacgcagcccagtggagaccctccacgccggccgggacactctgtgctcgctggggcaggtggcccaccggggcatggagaagagcctctttgtcttcacccaggaggaggtgcaggcctccgggctgcaggagagagacatgcagctgggcttcctgcgggctttgccggagctgggccccgggggtgaccagcagtcctatgagtttttccacctcaccctccaggccttctttacagccttcttcctcgtgctggacgacagggtgggcactcaggagctgctcaggttcttccaggagtggatgccccctgcgggggcagcgaccacgtcctgctatcctcccttcctcccgttccagtgcctgcagggcagtggtccggcgcgggaagacctcttcaagaacaaggatcacttccagttcaccaacctcttcctgtgcgggctgttgtccaaagccaaacagaaactcctgcggcatctggtgcccgcggcagccctgaggagaaagcgcaaggccctgtgggcacacctgttttccagcctgcggggctacctgaagagcctgccccgcgttcaggtcgaaagcttcaaccaggtgcaggccatgcccacgttcatctggatgctgcgctgcatctacgagacacagagccagaaggtggggcagctggcggccaggggcatctgcgccaactacctcaagctgacctactgcaacgcctgctcggccgactgcagcgccctctccttcgtcctgcatcacttccccaagcggctggccctagacctagacaacaacaatctcaacgactacggcgtgcgggagctgcagccctgcttcagccgcctcactgttctcagactcagcgtaaaccagatcactgacggtggggtaaaggtgctaagcgaagagctgaccaaatacaaaattgtgacctatttgggactttggaaatcagtagacaccatatgcttcaaaaaacaggggctattaaaatgacatcaggagccagaaagtctcatggctgtgctttctcttgaagtttatacaacaaccagatcaccgatgtcggagccagactgggaaaaaacaaaataacaagtgaaggagggaagtatctcgccctggctgtgaagaacagcaaatcaatctctgaggttgggatgtggggcaatcaagttggggatgaaggagcaaaagccttcgcagaggctctgcggaaccaccccagcttgaccaccctgagtcttgcgtccaacggcatctccacagaaggaggaaagagccttgcgagggccctgcagcagaacacgtctctagaaatactgtggctgacccaaaatgaactcaacgatgaagtggcagagagtttggcagaaatgttgaaagtcaaccagacgttaaagcatttatggcttatccagaatcagatcacagctaaggggactgcccagctggcagatgcgttacagagcaacactggcataacagagatttgaacttgtttggaacttgtcataaaatcgatcagtttggtgaattgcaaccaacaatatttaaaaagaaaacagaacagaacaaaatatcaggatgcaatgtgcatgcctaaatggaaacctgataaaaccagaggaggccaaagtctatgaagatgagaagcggattatctgtttctgagaggatgctttcctgttcatggggtttttgccctggagcctcagcagcaaatgccactctgggcagtcttttgtgtcagtgtcttaaaggggcctgcgcaggcgggactatcaggagtccactgcctccatgatgcaagccagcttcctgtgcagaaggtctggtcggcaaactccctaagtacccgctacaattctgcagaaaaagaatgtgtcttgcgagctgttgtagttacagtaaatacactgtgaagagactttattgcctattataattatttttatctgaagctagaggaataaagctgtgagcaaacagaggaggccagcctcacctcattccaacacctgccatagggaccaacgggagcgagttggtcaccgctcttttcattgaagagttgaggatgtggcacaaagttggtgccaagcttcttgaataaaacgtgtttgatggattagtattatacctgaaatattttcttccttctcagcactttcccatgtattgatactggtcccacttcacagctggagacaccggagtatgtgcagtgtgggatttgactcctccaaggttttgtggaaagttaatgtcaaggaaaggatgcaccacgggcttttaattttaatcctggagtctcactgtctgctggcaaagatagagaatgccctcagctcttagctggtctaagaatgacgatgccttcaaaatgctgcttccactcagggcttctcctctgctaggctaccctcctctagaaggctgagtaccatgggctacagtgtctggccttgggaagaagtgattctgtccctccaaagaaatagggcatggcttgcccctgtggccctggcatccaaatggctgcttttgtctcccttacctcgtgaagaggggaagtctcttcctgcctcccaagcagctgaagggtgactaaacgggcgccaagactcaggggatcggctgggaactgggccagcagagcatgttggacaccccccaccatggtgggcttgtggtggctgctccatgagggtgggggtgatactactagatcacttgtcctcttgccagctcatttgttaataaaatactgaaaacactc

SEQ ID NO: 161491 - DNA, 4486 bp, Homo sapiens
  Payload ID: 11526
  Gene Symbol: NOD2
  Gene Name: nucleotide-binding oligomerization domain containing 2
  Uniprot ID: Q9HC29
  ENST ID: ENST00000300589
  CDS Start-End: 106-3228
gtagacagatccaggctcaccagtcctgtgccactgggcttttggcgttctgcacaaggcctacccgcagatgccatgcctgctcccccagcctaatgggctttgatgggggaagagggtggttcagcctctcacgatgaggaggaaagagcaagtgtcctcctcggacattctccgggttgtgaaatgtgctcgcaggaggcttttcaggcacagaggagccagctggtcgagctgctggtctcagggtccctggaaggcttcgagagtgtcctggactggctgctgtcctgggaggtcctctcctgggaggactacgagggcttccacctcctgggccagcctctctcccacttggccaggcgccttctggacaccgtctggaataagggtacttgggcctgtcagaagctcatcgcggctgcccaagaagcccaggccgacagccagtcccccaagctgcatggctgctgggacccccactcgctccacccagcccgagacctgcagagtcaccggccagccattgtcaggaggctccacagccatgtggagaacatgctggacctggcatgggagcggggtttcgtcagccagtatgaatgtgatgaaatcaggttgccgatcttcacaccgtcccagagggcaagaaggctgcttgatcttgccacggtgaaagcgaatggattggctgccttccttctacaacatgttcaggaattaccagtcccattggccctgcctttggaagctgccacatgcaagaagtatatggccaagctgaggaccacggtgtctgctcagtctcgcttcctcagtacctatgatggagcagagacgctctgcctggaggacatatacacagagaatgtcctggaggtctgggcagatgtgggcatggctggacccccgcagaagagcccagccaccctgggcctggaggagctcttcagcacccctggccacctcaatgacgatgcggacactgtgctggtggtgggtgaggcgggcagtggcaagagcacgctcctgcagcggctgcacttgctgtgggctgcagggcaagacttccaggaatttctctttgtcttcccattcagctgccggcagctgcagtgcatggccaaaccactctctgtgcggactctactctttgagcactgctgttggcctgatgttggtcaagaagacatcttccagttactccttgaccaccctgaccgtgtcctgttaacctttgatggctttgacgagttcaagttcaggttcacggatcgtgaacgccactgctccccgaccgaccccacctctgtccagaccctgctcttcaaccttctgcagggcaacctgctgaagaatgcccgcaaggtggtgaccagccgtccggccgctgtgtcggcgttcctcaggaagtacatccgcaccgagttcaacctcaagggcttctctgaacagggcatcgagctgtacctgaggaagcgccatcatgagcccggggtggcggaccgcctcatccgcctgctccaagagacctcagccctgcacggtttgtgccacctgcctgtcttctcatggatggtgtccaaatgccaccaggaactgttgctgcaggagggggggtccccaaagaccactacagatatgtacctgctgattctgcagcattttctgctgcatgccacccccccagactcagcttcccaaggtctgggacccagtcttcttcggggccgcctccccaccctcctgcacctgggcagactggctctgtggggcctgggcatgtgctgctacgtgttctcagcccagcagctccaggcagcacaggtcagccctgatgacatttctcttggcttcctggtgcgtgccaaaggtgtcgtgccagggagtacggcgcccctggaattccttcacatcactttccagtgcttctttgccgcgttctacctggcactcagtgctgatgtgccaccagctttgctcagacacctcttcaattgtggcaggccaggcaactcaccaatggccaggctcctgcccacgatgtgcatccaggcctcggagggaaaggacagcagcgtggcagctttgctgcagaaggccgagccgcacaaccttcagatcacagcagccttcctggcagggctgttgtcccgggagcactggggcctgctggctgagtgccagacatctgagaaggccctgctccggcgccaggcctgtgcccgctggtgtctggcccgcagcctccgcaagcacttccactccatcccgccagctgcaccgggtgaggccaagagcgtgcatgccatgcccgggttcatctggctcatccggagcctgtacgagatgcaggaggagcggctggctcggaaggctgcacgtggcctgaatgttgggcacctcaagttgacattttgcagtgtgggccccactgagtgtgctgccctggcctttgtgctgcagcacctccggcggcccgtggccctgcagctggactacaactctgtgggtgacattggcgtggagcagctgctgccttgccttggtgtctgcaaggctctgtatttgcgcgataacaatatctcagaccgaggcatctgcaagctcattgaatgtgctcttcactgcgagcaattgcagaagttagctctattcaacaacaaattgactgacggctgtgcacactccatggctaagctccttgcatgcaggcagaacttcttggcattgaggctggggaataactacatcactgccgcgggagcccaagtgctggccgaggggctccgaggcaacacctccttgcagttcctgggattctggggcaacagagtgggtgacgagggggcccaggccctggctgaagccttgggtgatcaccagagcttgaggtggctcagcctggtggggaacaacattggcagtgtgggtgcccaagccttggcactgatgctggcaaagaacgtcatgctagaagaactctgcctggaggagaaccatctccaggatgaaggtgtatgttctctcgcagaaggactgaagaaaaattcaagtttgaaaatcctgaagttgtccaataactgcatcacctacctaggggcagaagccctcctgcaggcccttgaaaggaatgacaccatcctggaagtctggctccgagggaacactttctctctagaggaggttgacaagctcggctgcagggacaccagactcttgctttgaagtctccgggaggatgttcgtctcagtttgtttgtgagcaggctgtgagtttgggccccagaggctgggtgacatgtgttggcagcctcttcaaaatgagccctgtcctgcctaaggctgaacttgttttctgggaacaccataggtcacctttattctggcagaggagggagcatcagtgccctccaggatagacttttcccaagcctacttttgccattgacttcttcccaagattcaatcccaggatgtacaaggacagcccctcctccatagtatgggactggcctctgctgatcctcccaggcttccgtgtgggtcagtggggcccatggatgtgcttgttaactgagtgccttttggtggagaggcccggcctctcacaaaagaccccttaccactgctctgatgaagaggagtacacagaacacataattcaggaagcagctttccccatgtctcgactcatccatccaggccattccccgtctctggttcctcccctcctcctggactcctgcacacgctccttcctctgaggctgaaattcagaatattagtgacctcagctttgatatttcacttacagcacccccaaccctggcacccagggtgggaagggctacaccttagcctgccctcctttccggtgtttaagacatttttggaaggggacacgtgacagccgtttgttccccaagacattctaggtttgcaagaaaaatatgaccacactccagctgggatcacatgtggacttttatttccagtgaaatcagttactcttcagttaagcctttggaaacagctcgactttaaaaagctccaaatgcagctttaaaaaattaatctgggccagaatttcaaacggcctcactaggcttctggttgatgcctgtgaactgaactctgacaacagacttctgaaatagacccacaagaggcagttccatttcatttgtgccagaatgctttaggatgtacagttatggattgaaagtttacaggaaaaaaaattaggccgttccttcaaagcaaatgtcttcctggattattcaaaatgatgtatgttgaagcctttgtaaattgtcagatgctgtgcaaatgttattattttaaacattatgatgtgtgaaaactggttaatatttataggtcactttgttttactgtcttaagtttatactcttatagacaacatggccgtgaactttatgctgtaaataatcagaggggaataaactgttgagtcaaaaca

SEQ ID NO: 161492 - DNA, 624 bp, Homo sapiens
  Payload ID: 11526
  Gene Symbol: NOD2
  Gene Name: nucleotide-binding oligomerization domain containing 2
  ENST ID: ENST00000531674
  CDS Start-End: 187-624
ggagtgggccttggagtcggcgcgcaggcggctcgcgcaaggaagtgatcctttctctacatgggcctcaccttggggaggacaatggtgtctttgaagttgtagtaactgaagtagagatcaaaaggcaatgcagatagactgacagatttcgcctgaagaggggaagcccgaccaggttgtgaaatgtgctcgcaggaggcttttcaggcacagaggagccagctggtcgagctgctggtctcagggtccctggaaggcttcgagagtgtcctggactggctgctgtcctgggaggtcctctcctgggaggactacgagggcttccacctcctgggccagcctctctcccacttggccaggcgccttctggacaccgtctggaataagggtacttgggcctgtcagaagctcatcgcggctgcccaagaagcccaggccgacagccagtcccccaagctgcatggctgctgggacccccactcgctccacccagcccgagacctgcagagtcaccggccagccattgtcaggaggctccacagccatgtggagaacatgctggacctggcatgggagcggggtttcgtcagccagtatgaatgtgatgaaatcaggttgccg

SEQ ID NO: 161493 - DNA, 1707 bp, Homo sapiens
  Payload ID: 11526
  Gene Symbol: NOD2
  Gene Name: nucleotide-binding oligomerization domain containing 2
  ENST ID: ENST00000527070
  CDS Start-End: 105-212
tagacagatccaggctcaccagtcctgtgccactgggcttttggcgttctgcacaaggcctacccgcagatgccatgcctgctcccccagcctaatgggctttgatgggggaagagggtggttcagcctctcacgatgaggaggaaagagcaagtgtcctcctcggacattctccgggtaagaggagcaggcattgtcccgtcccagcttgatcctcagccttctttcatccttggccgcgacatgctcccaggcctggggtcagatggggagtgctgactctgtttctgggctgttttctggggagaatgggtcggcgggtttttttccccaggacctgggcagggtcaatggtgggggccgctgtcgcatccttggctggtgtttccacagctgagaaccactccagggccaagcccagagcttattctacccttttttgtcctctcttcccctgtcctcggccaccccaccctcttggctcctctgcttagatgtgggcacaaggaggagaactccttggcctgagagaactaccttagatcctggcttccagtggcctctgcaggggggtacaccctctctcccaagcagccagacacacaagtaacctcattgcctcagtttccccatctgaccagcacagggccccctgtgccccagcagcgttctgagagattggagctttctccttttgcttaccttggctaccgtatgaggacggatacagagtgttccccccacccccagcccaggggatatttgattcatgaacattccctcagtgtctttgtgggggacaatgctgtgccaggctcagggatgccaggacgagtaagacccaggctcccacgtggcccaggcagggagagagacacataaacaaccatcaggaaagaggttgtgaaatgtgctcgcaggaggcttttcaggcacagaggagccagctggtcgagctgctggtctcagggtccctggaaggcttcgagagtgtcctggactggctgctgtcctgggaggtcctctcctgggaggactacgagggcttccacctcctgggccagcctctctcccacttggccaggcgccttctggacaccgtctggaataagggtacttgggcctgtcagaagctcatcgcggctgcccaagaagcccaggccgacagccagtcccccaagctgcatggctgctgggacccccactcgctccacccagcccgagacctgcagagtcaccggccagccattgtcaggaggctccacagccatgtggagaacatgctggacctggcatgggagcggggtttcgtcagccagtatgaatgtgatgaaatcaggttgccgatcttcacaccgtcccagagggcaagaaggctgcttgatcttgccacggtgaaagcgaatggattggctgccttccttctacaacatgttcaggaattaccagtcccattggccctgcctttggaagctgccacatgcaagaagtatatggccaagctgaggaccacggtgtctgctcagtctcgcttcctcagtacctatgatggagcagagacgctctgcctggaggacatatacacagagaatgtcctggaggtctgggcagatgtgggcatggctggacccccgcagaagagcccagccaccctgggcctggaggagctcttcagcacccctggccacctcaatgacgatgcggaca

SEQ ID NO: 161494 - DNA, 506 bp, Homo sapiens
  Payload ID: 11526
  Gene Symbol: NOD2
  Gene Name: nucleotide-binding oligomerization domain containing 2
  ENST ID: ENST00000534057
  CDS Start-End: 1-506
cctgaatgttgggcacctcaagttgacattttgcagtgtgggccccactgagtgtgctgccctggcctttgtgctgcagcacctccggcggcccgtggccctgcagctggactacaactctgtgggtgacattggcgtggagcagctgctgccttgccttggtgtctgcaaggctctgtatttgcgcgataacaatatctcagaccgaggcatctgcaagctcattgaatgtgctcttcactgcgagcaattgcagaagttagcgctggggaataactacatcactgccgcgggagcccaagtgctggccgaggggctccgaggcaacacctccttgcagttcctgggattctggggcaacagagtgggtgacgagggggcccaggccctggctgaagccttgggtgatcaccagagcttgaggtggctcagcctggtggggaacaacattggcagtgtgggtgcccaagccttggcactgatgctggcaaagaacgtcatgctag

SEQ ID NO: 161495 - DNA, 450 bp, Homo sapiens
  Payload ID: 11526
  Gene Symbol: NOD2
  Gene Name: nucleotide-binding oligomerization domain containing 2
  ENST ID: ENST00000529633
  CDS Start-End: 1-181
cctgaatgttgggcacctcaagttgacattttgcagtgtgggccccactgagtgtgctgccctggcctttgtgctgcagcacctccggcggcccgtggccctgcagctggactacaactctgtgggtgacattggcgtggagcagctgctgccttgccttggtgtctgcaaggctctgtagtgagtgttactgggcattgctgttcaggctggggaataactacatcactgccgcgggagcccaagtgctggccgaggggctccgaggcaacacctccttgcagttcctgggattctggggcaacagagtgggtgacgagggggcccaggccctggctgaagccttgggtgatcaccagagcttgaggtggctcagcctggtggggaacaacattggcagtgtgggtgcccaagccttggcactgatgctggcaaagaacgtcatgctag

SEQ ID NO: 161496 - DNA, 602 bp, Homo sapiens
  Payload ID: 11526
  Gene Symbol: NOD2
  Gene Name: nucleotide-binding oligomerization domain containing 2
  ENST ID: ENST00000534067
  CDS Start-End: 1-181
cctgaatgttgggcacctcaagttgacattttgcagtgtgggccccactgagtgtgctgccctggcctttgtgctgcagcacctccggcggcccgtggccctgcagctggactacaactctgtgggtgacattggcgtggagcagctgctgccttgccttggtgtctgcaaggctctgtagtgagtgttactgggcattgctgttcaggtatgggggagcaccatcaaggctaagtgtgggagcaccgagctgggctctagaagtctgggcccagcttcgcctctgccaccctgctttgcaacactgcccagatcccttcccttctgggccttaatttcaatatgtgatgatgacagccacactttattgactggcctatgtgctgggtctggtgctatgctttccggaatgacctcatctaatctctacaaccaccctggcggattctggggcaacagagtgggtgacgagggggcccaggccctggctgaagccttgggtgatcaccagagcttgaggtggctcagcctggtggggaacaacattggcagtgtgggtgcccaagccttggcactgatgctggcaaagaacgtcatgctag

SEQ ID NO: 161497 - DNA, 338 bp, Homo sapiens
  Payload ID: 11526
  Gene Symbol: NOD2
  Gene Name: nucleotide-binding oligomerization domain containing 2
  ENST ID: ENST00000527052
  CDS Start-End: 1-181
cctgaatgttgggcacctcaagttgacattttgcagtgtgggccccactgagtgtgctgccctggcctttgtgctgcagcacctccggcggcccgtggccctgcagctggactacaactctgtgggtgacattggcgtggagcagctgctgccttgccttggtgtctgcaaggctctgtaattctggggcaacagagtgggtgacgagggggcccaggccctggctgaagccttgggtgatcaccagagcttgaggtggctcagcctggtggggaacaacattggcagtgtgggtgcccaagccttggcactgatgctggcaaagaacgtcatgctag

SEQ ID NO: 161498 - DNA, 366 bp, Homo sapiens
  Payload ID: 11526
  Gene Symbol: NOD2
  Gene Name: nucleotide-binding oligomerization domain containing 2
  ENST ID: ENST00000524712
  CDS Start-End: 1-181
cctgaatgttgggcacctcaagttgacattttgcagtgtgggccccactgagtgtgctgccctggcctttgtgctgcagcacctccggcggcccgtggccctgcagctggactacaactctgtgggtgacattggcgtggagcagctgctgccttgccttggtgtctgcaaggctctgtagtgagtgttactgggcattgctgttcagattctggggcaacagagtgggtgacgagggggcccaggccctggctgaagccttgggtgatcaccagagcttgaggtggctcagcctggtggggaacaacattggcagtgtgggtgcccaagccttggcactgatgctggcaaagaacgtcatgctag

SEQ ID NO: 161499 - DNA, 4445 bp, Homo sapiens
  Payload ID: 11527
  Gene Symbol: NACC1
  Gene Name: nucleus accumbens associated 1, BEN and BTB (POZ) domain containing
  Uniprot ID: Q96RE7
  ENST ID: ENST00000292431
  CDS Start-End: 127-1710
aggccgcggaggcggaggccgaggccccggcgcagcggggcgcgccccgggcccaggcccggccccagccgccgctgcggagcccgccgggaccccccggagcgcggccacggcgcagccgctgccatggcccagacactgcagatggagatcccgaacttcggcaacagcatcctggagtgcctcaatgaacagcggctgcagggcctgtactgtgacgtgtcagtggtggtcaagggccatgccttcaaggcccaccgggccgtgcttgctgccagcagctcctacttccgggacctgttcaacaacagccgcagcgccgtggtggagctgccggcggctgtgcagccccagtctttccagcagatcctcagcttctgctacacgggccggctgagcatgaacgtgggcgaccagttcctgctcatgtacacggctggcttcctgcagatccaggagatcatggagaagggcaccgagttcttcctcaaggtgagctccccgagctgcgactcccagggcctgcatgcggaggaggccccatcgtcggagccccagagccccgtggcgcagacatcgggctggccagcctgtagcaccccgctgcccctcgtgtcgcgggtgaagacggagcagcaggagtcggactccgtgcagtgcatgcccgtggccaagcggctgtgggacagtggccagaaggaggctgggggcggcggcaatggcagccgcaagatggccaagttctccacgccggacctggctgccaaccggcctcaccagcccccgccaccccaacaggctccggtggtggcagcagcccagcccgccgtggctgcgggagcagggcagccagccggtggggtggcagcagcagggggtgtggtgagtgggcccagcacgtcggagcggaccagcccaggcacctcaagcgcctacaccagcgacagccctggctcctaccacaatgaggaggacgaggaggaggatggtggcgaggagggcatggatgagcagtaccggcagatctgcaacatgtacaccatgtacagcatgatgaacgtcggccagacagccgagaaggtggaggccctcccggagcaggtagcccccgagtcccgaaatcgcatccgggttcggcaagacctggcgtctctcccggctgaacttatcaaccagattgggaaccgctgccaccccaagctctacgacgagggcgacccctctgagaagctggagctggtgacaggcaccaacgtgtacatcacaagggcgcagctgatgaactgccacgtcagcgcaggcacgcggcacaaggtcctactgcggcggctcctggcctccttctttgaccggaacacgctggccaacagctgcggcaccggcatccgctcttctaccaacgatccccgtcggaagcccctggacagccgcgtgctccacgctgtcaagtactactgccagaacttcgcccccaacttcaaggagagcgagatgaatgccatcgcggccgacatgtgcaccaacgcccgccgcgtcgtgcgcaagagctggatgcccaaggtcaaggtgctcaaggctgaggatgacgcctacaccaccttcatcagtgaaacgggcaagatcgagccggacatgatgggtgtggagcatggcttcgagaccgccagccacgagggcgaggcgggtccctcggctgaagccctgcagtaacccgcccagcctcccgcggggccacacacttcccctcccaacacacacacacacctgccatcttggtcatgagctactgtctgtccctccccaggacccgcggtgggtgctgcatgttcccggccctctgcccctcctgtcctaccccctttccccaccgagagctgggccgggagaggaccgcagggcaggtggcgtgaggtccgtgttgccttctttaacacacactcgtgcagtgggggagttctggctccccaacctaacccctagccgtcatctccacactcaccaggcccaccaggggagggggctggcctgggggtcttgggaaggcccctccccaggccctaggccacctcgcggaagccttcagcctccgcccctcactgcagccccttgggacttgaggggggccccaggggttctcaggacccctcccaccacctcccagtgcttccacgtctccaaaagcgccttcctgtcaccctcgtctatccctgcgcctgggggctggggtaggcgaggccgtggggactacccattttatagctggggaaacaggctccgagaaattgcacaaccgacctcaggtggccggcagtggcgtgcctggtgccctttctcctcttccgcctctgttgctccctttggtcctctggggcctcagagaggcaggtcctaaaggagggggggtctcctgggggcagaccgagggtctcggaggatagaatgagaggtttccagggctggcagagtgtgtgcgtgtgtgtgtgcagaagttttgctttcaaacaaatgaagatacaagaggcagtaggacctgggttggaacccaggggagcagactggggggctgttgcccctccctccatctccccacacccaccccaccccacagcagggctcctggcccccacccccctgtacataatttttaaaacctttttttagcgaatgaaatattgaagtataagattccttttatttttcaaaccaatggggctgtgtctattgtccccctcggtccccaggggtggggggccttggaaggcagggcggtgttggggggctggggggcaggctgaatgtgtgtgtgtgggtgtgtatgtgtggagtgtgtgtgtgtgtttccatggtaggactccagtcccagctgctgcctaggctcctgtgggtcctgtgggtccccctcccctgttcaccttccccaacagggctatagtttaagggtgtcccaggccttggctggttggctgggcccagctcctgggggctgggcagggcagggcagggccgggtccacttccattgttagcagttgtttgcagaattttctcttttaccattcctctctttttgttctcgcccagagtgggtggttttttgttgttgttttagattttcatgtgaaggcagttttttttcttttttaactccccatccccctatgcagggtgtcatttcaccatccacatccacatccttgtttgtgtttctggccctcgtcctccctgcctctcatctgcctccccaacccccacctacccactgctcccaggggtctctccaggggcagggggattttaggagatggggtgggggccagcccctactggacccttgtaatctgatttggagaccatccccccgatgggaccagcagccccgccggcccactgggggtccctcttaacatctgcttgttgcgggggtcagtcatgagtgccagggtctggctggggtcttggcactgtcttcctggccggggcctgaaaccttagcccccagccggcctgagtgggggatattgacacccccagctaaagcacaagcaccttagtcacccctcctctccccccgcctcctggcctgccaccccaccccagcgtttaccccaaagcacaatgccctggtcacttggcaagcggctgggcctgacggaggccgaggggcagaccggggctccagccagacccctgaaaggaaggtgctcccccacttccaggccttagttggggtgggggggccagctcctgggcctggggtcttctcacccccacccccttgtcctgggtaggcccctgcctgcccctctctgccttttcctcgggtgtccctcctcgagcccctgtggcattggcttgggtggcagagcccacttgtttcagggaccccaggaggtgccccctggctcccaggactgtgtgtgggtccggggggtgggggggtggggagaagggtcgggcagggggtgcaggggaggaaactcctcaccaggagagccaaagacagggttgtgccttaccccaggagccacccctgtaccccccttgccctgccattcaccctccacccctacccctgggcggcctgctgctttttccttctcttcctcccctgccctgagctgcatggttcccccaccctgggcagccaggaaggaatctgaatggagaatcaccaaccaccagagaaaaaagactgtggggccctcccctgccaactccccttccctggccgcccactcaacccacacctctttcacgcaggacaggctgcccaccctgtccacgtgaagtgccaacgccctccccaccctgggccgagcccccacccctccctgggcccccaagtgagattgcacatttaactactgtaaggagaggagcggcgttggcaaatgtgaaccatgagaatatcagtgatactgatgagaataaactaaacgcctttgt

SEQ ID NO: 161500 - DNA, 615 bp, Homo sapiens
  Payload ID: 11527
  Gene Symbol: NACC1
  Gene Name: nucleus accumbens associated 1, BEN and BTB (POZ) domain containing
  ENST ID: ENST00000585663
  CDS Start-End: 1-285
gtgtacatcacaagggcgcagctgatgaactgccacaacttcgcccccaacttcaaggagagcgagatgaatgccatcgcggccgacatgtgcaccaacgcccgccgcgtcgtgcgcaagagctggatgcccaaggtcaaggtgctcaaggctgaggatgacgcctacaccaccttcatcagtgaaacgggcaagatcgagccggacatgatgggtgtggagcatggcttcgagaccgccagccacgagggcgaggcgggtccctcggctgaagccctgcagtaacccgcccagcctcccgcggggccacacacttcccctcccaacacacacacacacctgccatcttggtcatgagctactgtctgtccctccccaggacccgcggtgggtgctgcatgttcccggccctctgcccctcctgtcctaccccctttccccaccgagagctgggccgggagaggaccgcagggcaggtggcgtgaggtccgtgttgccttctttaacacacactcgtgcagtgggggagttctggctccccaacctaacccctagccgtcatctccacactcaccaggcccaccaggggagggggctggcctgggggtcttggga

SEQ ID NO: 161501 - DNA, 534 bp, Homo sapiens
  Payload ID: 11527
  Gene Symbol: NACC1
  Gene Name: nucleus accumbens associated 1, BEN and BTB (POZ) domain containing
  ENST ID: ENST00000586171
  CDS Start-End: 38-534
cccaggggcatagagaggagacggagccgccgctgccatggcccagacactgcagatggagatcccgaacttcggcaacagcatcctggagtgcctcaatgaacagcggctgcagggcctgtactgtgacgtgtcagtggtggtcaagggccatgccttcaaggcccaccgggccgtgcttgctgccagcagctcctacttccgggacctgttcaacaacagccgcagcgccgtggtggagctgccggcggctgtgcagccccagtctttccagcagatcctcagcttctgctacacgggccggctgagcatgaacgtgggcgaccagttcctgctcatgtacacggctggcttcctgcagatccaggagatcatggagaagggcaccgagttcttcctcaaggtgagctccccgagctgcgactcccagggcctgcatgcggaggaggccccatcgtcggagccccagagccccgtggcgcagacatcgggctggccagcctgtagcaccccgctgcccctcgtgtcgcgggt

SEQ ID NO: 161502 - DNA, 4217 bp, Homo sapiens
  Payload ID: 11528
  Gene Symbol: NUDCD1
  Gene Name: NudC domain containing 1
  Uniprot ID: Q96RS6
  ENST ID: ENST00000239690
  CDS Start-End: 376-2127
cggacttagaccctcagtagctcgggcacctaagcacacagaaagctagaacacgcatttccggggcggggtctcgccaccctgcctataatgtgagaatttaaccagcgcgggccgcctcctggttgctagggcctctgggtaacagagttcagaccttgccgtcgcgcgcgcgttaagtaccaggagaactacatagcccagcatgcaacagtctcaactttttcacggacactacatttcccagaaggcagttcgcaccgcagtgttttctgggatgggaaccacgccgcttcccagtctctgtgcgaggcgtgaagcgcggacctttcaacaagggctttattaattctcacgctgcggccctggaaagcgatggaggtggcggctaattgctccctacgggtgaagagacctctgttggatccccgcttcgagggttacaagctctctcttgagccgctgccttgttaccagctggagcttgacgcagctgtggcagaggtaaaacttcgagatgatcaatatacactggaacacatgcatgcttttggaatgtataattacctgcactgtgattcatggtatcaagacagtgtctactatattgatacccttggaagaattatgaatttaacagtaatgctggacactgccttaggaaaaccacgagaggtgtttcgacttcctacagatttgacagcatgtgacaaccgtctttgtgcatctatccatttctcatcttctacctgggttaccttgtcagatggaactggaagattgtatgtcattggaacaggtgaacgtggaaatagcgcttctgaaaaatgggagattatgtttaatgaagaacttggggatccttttattataattcacagtatctcactgctaaatgctgaagaacattctatagctaccctacttcttcgaatagagaaagaggaattggatatgaaaggaagtggtttctatgtttctctggagtgggtcactatcagtaagaaaaatcaagataataaaaaatatgaaattattaagcgtgatattctccgtggaaagtcagtgccacattatgctgctattgagcctgatggaaatggtctaatgattgtatcctacaagtctttaacatttgttcaggctggtcaagatcttgaagaaaatatggatgaagacatatcagagaaaatcaaagaacctctgtattactggcaacagactgaagatgatttgacagtaaccatacggcttccagaagacagtactaaggaggacattcaaatacagtttttgcctgatcacatcaacattgtactgaaggatcaccagtttttagaaggaaaactctattcatctattgatcatgaaagcagtacatggataattaaagagagtaatagcttggagatttccttgattaagaagaatgaaggactgacctggccagagctagtaattggagataaacaaggggaacttataagagattcagcccagtgtgctgcaatagctgaacgtttgatgcatttgacctctgaagaactgaatccaaatccagataaagaaaaaccaccttgcaatgctcaagagttagaagaatgtgatattttctttgaagagagctccagtttatgcagatttgatggcaatacattaaaaactactcatgtggtgaatcttggaagcaaccagtaccttttctctgtcatagtggatcctaaagaaatgccctgcttctgtttgcgccatgatgttgatgccctactctggcaaccacactccagcaaacaagatgatatgtgggagcacatcgcaactttcaatgctttaggctatgtccaagcatcaaagagagacaaaaaattttttgcctgtgctccaaattactcgtatgcagccctttgtgagtgccttcgtcgagtattcatctatcgtcagcctgctcccatgtccactgtactttacaacagaaaggaaggcaggcaagtaggacaggttgctaagcagcaagtagcaagcctagaaaccaatgatcctattttaggatttcaggcaacaaatgagagattatttgttcttactaccaaaaacctctttttaataaaagtaaatacagagaattaattattctaacatattggcctctttgtactggaaaagtattcagtggtacctggaggtctggacagttatactgtaacctcttaagttttaatgtgctaaatatatcttgtatgattttttattttttaataacattggaaatatattcaagagattatgattctgtaaagctgtggaatgaagctgcagatttagagaacattggcttctgaaaaaaaaaaagagtgaagatagtactagcaagtatacttattttttaaaacaggctagaatctcatgttttatatgaaagatgtacaattcagtgtttaaaaataaaaatatttattgtgtactctgttcgttgattagttgctacaggctgtacctataagatgtacaggataatagttaaatgttgagtattgtacatatgtatttaagtggattgaataactgagtctacatggaggaggaaatgctagagaacagcaggtctaatattttttaagtttactgagagacctttattattattttcaaattaagtatagctttatgtaacttttagccagttgctctgccacagacatagacaaagagagataagatttcacattatccatcactgcataacaaaccacaccaaaactcagtggtttaaaacaaggacttttattatttttcacgattcagtgagttggctgtctctgctgtacagggcctctcagcctccagtagactagacgaatcttctttccatagtagagaaaacatcttaagagagcaagctccaatatgcaagagcttatcgatcctgtacatctatcatatttactaatgttccattggacaaagcaaatcacatggccaagtctagagtcagaatgaggggactacacaagctgacagcggatggtatgactcattgggggccattgatggaacaatcttaccacacaaggacaaattataatttatccttgtggctctctttatttttctaacaacttcaacaaaataatcctgtttatatgttatagtttcttgccacaaattttgttttttcaaacttacctttccaggtttgttttagtatgtatgtacctggaaatttttattactttttataccatttcaagatatgtatcttatataaacctcaagttggattttatattttaataaggaagttaagaccttcatttaagaggcagaagattaagataagaaatataagatagaaaagctttgttcctaacatatcttttgcctgtctgggcaagtatttgactcaactaaattttaatgaacgaatgaatgacagagaggaggaaaaaagatgaggattgcatacatgttctaaaccctttgtcagattgcagtttcctagagagtattgaggtgctaggtagaaagttaggaaaggtcctgaggactggtattgacaattggagtcctaatagtactctattcgtattaggaaagagagactagataccaaacatcacgagatcatagagatggaaaactgtatagtaaccaaaaaccaaaacagtgatatttccagaactttttagtattgttgtaaaacttcatgaaacaaaagaccatttaaatagtgaattattaaaaatctttatgatgggaaagtagatctaaattttctctaaaattttccccaaagataatatcctcttagggaacataagaaaaatgtataataaaaatgtggtgcttaattaaccatgactatgtatatattgccaattttagtaatcaatattctttgtgcatgtgatttttttgcatgattaatgttgaattgaaagctctcaggataattaatcctaaatattgtcgcatgttgacctacgttaaaagatgaataggtctagagccgtgatttcaagctattttcctgaaatgcttcagggattccataaacatttaaacaatgttctaaggtacatatacttagaacattgagatatatactacaagtgctaagaatatagtaccttgtatttttgttgatttttatcatgttttaaataggaatttataaaatatttatgatagtaataaagtagtattttatgtgttttgca

SEQ ID NO: 161503 - DNA, 2098 bp, Homo sapiens
  Payload ID: 11528
  Gene Symbol: NUDCD1
  Gene Name: NudC domain containing 1
  Uniprot ID: Q96RS6
  ENST ID: ENST00000427660
  CDS Start-End: 100-1764
agtacttcatagactttatcatacttcgtagcatccagtatgttttctttgctaagattattgattttgtattgaagggtcccatgtccatcgttttcaatgctttatctccagggttggagcatgcctgctgtggcagaggtaaaacttcgagatgatcaatatacactggaacacatgcatgcttttggaatgtataattacctgcactgtgattcatggtatcaagacagtgtctactatattgatacccttggaagaattatgaatttaacagtaatgctggacactgccttaggaaaaccacgagaggtgtttcgacttcctacagatttgacagcatgtgacaaccgtctttgtgcatctatccatttctcatcttctacctgggttaccttgtcagatggaactggaagattgtatgtcattggaacaggtgaacgtggaaatagcgcttctgaaaaatgggagattatgtttaatgaagaacttggggatccttttattataattcacagtatctcactgctaaatgctgaagaacattctatagctaccctacttcttcgaatagagaaagaggaattggatatgaaaggaagtggtttctatgtttctctggagtgggtcactatcagtaagaaaaatcaagataataaaaaatatgaaattattaagcgtgatattctccgtggaaagtcagtgccacattatgctgctattgagcctgatggaaatggtctaatgattgtatcctacaagtctttaacatttgttcaggctggtcaagatcttgaagaaaatatggatgaagacatatcagagaaaatcaaagaacctctgtattactggcaacagactgaagatgatttgacagtaaccatacggcttccagaagacagtactaaggaggacattcaaatacagtttttgcctgatcacatcaacattgtactgaaggatcaccagtttttagaaggaaaactctattcatctattgatcatgaaagcagtacatggataattaaagagagtaatagcttggagatttccttgattaagaagaatgaaggactgacctggccagagctagtaattggagataaacaaggggaacttataagagattcagcccagtgtgctgcaatagctgaacgtttgatgcatttgacctctgaagaactgaatccaaatccagataaagaaaaaccaccttgcaatgctcaagagttagaagaatgtgatattttctttgaagagagctccagtttatgcagatttgatggcaatacattaaaaactactcatgtggtgaatcttggaagcaaccagtaccttttctctgtcatagtggatcctaaagaaatgccctgcttctgtttgcgccatgatgttgatgccctactctggcaaccacactccagcaaacaagatgatatgtgggagcacatcgcaactttcaatgctttaggctatgtccaagcatcaaagagagacaaaaaattttttgcctgtgctccaaattactcgtatgcagccctttgtgagtgccttcgtcgagtattcatctatcgtcagcctgctcccatgtccactgtactttacaacagaaaggaaggcaggcaagtaggacaggttgctaagcagcaagtagcaagcctagaaaccaatgatcctattttaggatttcaggcaacaaatgagagattatttgttcttactaccaaaaacctctttttaataaaagtaaatacagagaattaattattctaacatattggcctctttgtactggaaaagtattcagtggtacctggaggtctggacagttatactgtaacctcttaagttttaatgtgctaaatatatcttgtatgattttttattttttaataacattggaaatatattcaagagattatgattctgtaaagctgtggaatgaagctgcagatttagagaacattggcttctgaaaaaaaaaaagagtgaagatagtactagcaagtatacttattttttaaaacaggctagaatctcatgttttatatgaaagatgtacaattcagtgtttaaaaataaaaatatttattgtgta

SEQ ID NO: 161504 - DNA, 2286 bp, Homo sapiens
  Payload ID: 11528
  Gene Symbol: NUDCD1
  Gene Name: NudC domain containing 1
  ENST ID: ENST00000519607
  CDS Start-End: 109-435
gttttctgggatgggaaccacgccgcttcccagtctctgtgcgaggcgtgaagcgcggacctttcaacaagggctttattaattctcacgctgcggccctggaaagcgatggaggtggcggctaattgctccctacgggtgaagagacctctgttggatccccgcttcgagggttacaagctctctcttgagccgctgccttgttaccagctggagcttgacgcagctgtggcagaggtaaaacttcgagatgatcaatatacactggaacacatgcatgcttttggaatgtataattacctgcactgtgattcatggtatcaagacagtgtctactatattgatacccttggaagaattatgaatttaacagtaatgctgatactcaagtatcttaatcattctattggatattgtacccatttatctgattgataattagacttctagcaacctccgtcatgtataaccaggacactgccttaggaaaaccacgagaggtgtttcgacttcctacagatttgacagcatgtgacaaccgtctttgtgcatctatccatttctcatcttctacctgggttaccttgtcagatggaactggaagattgtatgtcattggaacaggtgaacgtggaaatagcgcttctgaaaaatgggagattatgtttaatgaagaacttggggatccttttattataattcacagtatctcactgctaaatgctgaagaacattctatagctaccctacttcttcgaatagagaaagaggaattggatatgaaaggaagtggtttctatgtttctctggagtgggtcactatcagtaagaaaaatcaagataataaaaaatatgaaattattaagcgtgatattctccgtggaaagtcagtgccacattatgctgctattgagcctgatggaaatggtctaatgattgtatcctacaagtctttaacatttgttcaggctggtcaagatcttgaagaaaatatggatgaagacatatcagagaaaatcaaagaacctctgtattactggcaacagactgaagatgatttgacagtaaccatacggcttccagaagacagtactaaggaggacattcaaatacagtttttgcctgatcacatcaacattgtactgaaggatcaccagtttttagaaggaaaactctattcatctattgatcatgaaagcagtacatggataattaaagagagtaatagcttggagatttccttgattaagaagaatgaaggactgacctggccagagctagtaattggagataaacaaggggaacttataagagattcagcccagtgtgctgcaatagctgaacgtttgatgcatttgacctctgaagaactgaatccaaatccagataaagaaaaaccaccttgcaatgctcaagagttagaagaatgtgatattttctttgaagagagctccagtttatgcagatttgatggcaatacattaaaaactactcatgtggtgaatcttggaagcaaccagtaccttttctctgtcatagtggatcctaaagaaatgccctgcttctgtttgcgccatgatgttgatgccctactctggcaaccacactccagcaaacaagatgatatgtgggagcacatcgcaactttcaatgctttaggctatgtccaagcatcaaagagagacaaaaaattttttgcctgtgctccaaattactcgtatgcagccctttgtgagtgccttcgtcgagtattcatctatcgtcagcctgctcccatgtccactgtactttacaacagaaaggaaggcaggcaagtaggacaggttgctaagcagcaagtagcaagcctagaaaccaatgatcctattttaggatttcaggcaacaaatgagagattatttgttcttactaccaaaaacctctttttaataaaagtaaatacagagaattaattattctaacatattggcctctttgtactggaaaagtattcagtggtacctggaggtctggacagttatactgtaacctcttaagttttaatgtgctaaatatatcttgtatgattttttattttttaataacattggaaatatattcaagagattatgattctgtaaagctgtggaatgaagctgcagatttagagaacattggcttctgaaaaaaaaaaagagtgaagatagtactagcaagtatacttattttttaaaacaggctagaatctcatgttttatatgaaagatgtacaattcagtgtttaaaaataaaaatatttattgtgta

SEQ ID NO: 161505 - DNA, 1172 bp, Homo sapiens
  Payload ID: 11528
  Gene Symbol: NUDCD1
  Gene Name: NudC domain containing 1
  ENST ID: ENST00000521439
  CDS Start-End: 58-297
ttttctttgctaagattattgattttgtattgaagggtcccatgtccatcgttttcaatgctttatctccagggttggagcatgcctgctgtggcagaggtaaaacttcgagatgatcaatatacactggaacacatgcatgcttttggaatgtataattacctgcactgtgattcatggtatcaagacagtgtctactatattgatacccttggaagaattatgaatttaacagtaatgctgatactcaagtatcttaatcattctattggatattgtacccatttatctgattgataattagacttctagcaacctccgtcatgtataaccaggacactgccttaggaaaaccacgagaggtgtttcgacttcctacagatttgacagcatgtgacaaccgtctttgtgcatctatccatttctcatcttctacctgggttaccttgtcagatggaactggaagattgtatgtcattggaacaggtgaacgtggaaatagcgcttctgaaaaatgggagattatgtttaatgaagaacttggggatccttttattataattcacagtatctcactgctaaatgctgaagaacattctatagctaccctacttcttcgaatagagaaagaggaattggatatgaaaggaagtggtttctatgtttctctggagtgggtcactatcagtaagaaaaatcaagataataaaaaatatgaaattattaagcgtgatattctccgtggaaagtcagtgccacattatgctgctattgagcctgatggaaatggtctaatgattgtatcctacaagtctttaacatttgttcaggctggtcaagatcttgaagaaaatatggatgaagacatatcagagaaaatcaaagaacctctgtattactggcaacagactgaagatgatttgacagtaaccatacggcttccagaagacagtactaaggaggacattcaaatacagtttttgcctgatcacatcaacattgtactgaaggatcaccagtttttagaaggaaaactctattcatctattgatcatgaaagcagtacatggataattaaagagagtaatagcttggagatttccttgattaagaagaatgaaggactgacctggccagagctagtaattggagataaacaaggggaacttata

SEQ ID NO: 161506 - DNA, 8005 bp, Homo sapiens
  Payload ID: 11529
  Gene Symbol: NUDCD2
  Gene Name: NudC domain containing 2
  Uniprot ID: Q8WVJ2
  ENST ID: ENST00000302764
  CDS Start-End: 91-564
agcggagaggccgaggcgtagcctaagcgtgggattccgcgcgtgcgctcggctccgcctggtgcggccgcggccgggagggactggattatgtcggccccgtttgaggagcggagtggggtggtaccgtgcgggaccccgtggggccagtggtaccagaccttggaggaggtgttcattgaagttcaggtgccgccaggcacgcgcgcccaggatatccagtgcggcctccagagccggcatgtggcgctgtcggtgggcggccgcgagatcctcaagggcaaactctttgattctacaatagctgatgagggaacatggactttggaggacagaaaaatggttcgtattgttcttacaaagacaaagagagatgcagcaaattgttggacttctctactagaatctgaatatgcagcggatccttgggtgcaagaccaaatgcagagaaagcttacattagagagattccaaaaagaaaatcctggttttgacttcagtggagcagaaatctcaggaaactacactaaaggtggaccagatttctcaaaccttgagaaataactgctttttttcctgcattctgtggatcctagcagatattgccaacttaatcagataaacagattatgtaatggaagaaaaatgcggatgcctacagttaacagattgcaaaatgtatcttaaaatggttctaaaaattgcattcaaacataatttacataggaaatgtactgtgggaactattctatggatatatggtaaagttgttttggacttgtttttgctcagcatgaagttttatatgctgcattttactaattccatatttaaccatatttttaatacaaaagaacattagagtatagatcatgtgaaatgaagggtgcctttggggaaaattaactttttcttttgataagtatgatattcaataaaattttctaaataggaattgtgtacccctttgtctaagtataacaattcacacaaaattatagtgctgaaaacaattttaataaaggaaaaagtccataaatgtattttaagtaaattaagagttaatgtaaatttcttaattagaatattattacttgagggattactttatgtcaagaagtttaaaaatagttaaaaccctaacaatagaagtggattaacacaaaagagaagtgtgatcatggtaattaggtgagtcctttgtggcagaaagcaaagtaaggtcactaattgtatatcagtggcatcattttgattgtaagtgatttaggcatataggtaggaattgtctatagacattttattcaatatcctatttatgtcctttttattttttgccctttttaactcttgaaaaaattttaaatctcatgcatagaaaagttacagataatttttttctttctgaaccatttgtgatttagttgaagacatgattcctcattactgattactatctgcttcaaattatcttacatgactacaatgcaaccattagaatcaggaaatttacgttgacacattactaccctctaatcctcagatcttcacttcattcacattgaactgattgtcccaataatgtccatatagcaagaggatccagtcagaatcatgcctttcatttagatgtcagctgtctttagtttacttcattctggaacaaattctcatttgtttccttttacaacttagtacttttgacaattatgggctagttttgtagaacaccccttattttgagttctgtctgatacttcatgattagattgaggttattcatctttggcaggaatgtgatagaagtgcatcctgtcattgtttaataatttcagtttgtctcatttctgatggtgtttcttagatgactgattaaggtagtgtctgccagacttctccactgtagttatttttataattatttcttgagaagatagttgcaaaatactaccttgtttctgatcagactttaaatttatcgtatctctataaactcattattttctattttattcagcaggttaaaaaacctattatcattacattggtgctcaaaattattgtacatttggctggtagaagtccattctgggtggcctctgtgtccttctgacacattcccatcattattcaatgaatttgttactctctggcataagatataccaggcttctcatgctgtcctcgacctaacccaagaatcagccatttttccgtagagcctgggttctctttagtgagtaatatttaaaagccaagatctgtgctagtgtgcaattgccgttggtgtgtatatataatgcatgtctttacatctatatttctgcatctatgtatattgaaaaccatgaattcacatataaattctgatcccatgggcttcattttcattttttccttctccacatttataaccgttttcagtaccagtgagaaacctgattcctatttgattatttgtggggttttttttttttaaggtggagtttcactcttgttgcccagactggagtgcagtcgcgcgatctcggcttactgcaacctccgcctcctgggttcaagcgattctcctgcctcagcctcccaagtagctgggattacaggcatgcgctgccacacctggctaatttttaatttttggtagagacggggtttctccatgttggtcaggctggtctcgaactccggacatcaggtgatccgcccgcctgggcctcccaaattgctgggattacaggtgtgagccactgcgcctggcctgattctctattgtaggtcatctccccacatgaatgtcttcctcaccctgcttaggcttcgcatcctatgctgagcaggaatgtcctcctcatcctgcctggaccctaatacctcactccaggccatggcagtccattcaccctgtgattcctatcttgctcattttaggaatgaattgtcgggggaagaggctatttttcttttaattttattctctttgacatttaacaaaattttttgagtaaagtaaaattaacttttttggtgtatggtttggtgaattttaagtatagatatgtgtaaacacctccacagtcagagtattgaagagttcaatcaccgtaaaaactctcgtgctctctttgtactctacacaccctactcccagcccctaaaccttggaaaccactgatctaatccccatctccatatttttgtcttcaagcatgttataaatgggatcatatataattaagaaaaacgctttattgtaacaacatacatttcacccatttaaggtgtgtaattcagtagcttttagtatatacacagataaatgcaaccattccaataatcaattttagaatgttttcatcacctcagatagaaaccttgtatagtttagcttttatccttctcctgtcatcccccgccatccatactacctcttttcatctcatagatttccttattctggacatttcatgtacatggaatcataatacgtggtctttggttactggcttccttcactttacatgtcttaagaggttcatctatattcgagcatgtatcagcacattcattagtatgtctgaaaatacttcattgtatggctgtagcactttgtttatacatttgtaagttggacattttgggtatttccaccctttggctgtcctgactaaagctgctataaacgtgtacaagtctttatgtgcatatgtgttttcatttcttacctaggagtagaatttttaggttatatgataactatgttaatcatttgaggagctgtcattgtttcccaaagcagctacatctttttactttcccaccagcagtgtatgcaggttccattttctctgcatccttgccaatacttgtttacctgacattttgattttagtcactctagtggatatgaaatgggatctctatctagttttggtttgctattctctgatactatgttgagcattctttcttgtgcttattggctatttgtgtatcttccttaaagcagtgtttattcaaattatttacccatttttttagttgtcttattgggtagtaagagtctttatatattctgggtacaagtctcttaccaggtatatgatttgtaatttctcctattctctctttactttgttgatagtgtcttttgaagcacagacttaattttgatgaagtcttatccatcatgccattggtggatcatgtttttggtgtcatgtctaggaaccttaaccccaggtcatgaggaatttttcttttttctttttttgactcacattctcactctgtcacccaggctggggtgcagtggcacaatctccactcactgcaacctctgcctgctgggttcaagtgattcttgtgcttcagtctcccaagtagctgggactacaggtgtgcaccaccactcccagcccattttttttttattttttatttttagtagagttgggatttcaccatataggctaggctggtcttgaactgacctcaacggatctgcccgcctcagcctctgaagtgctgggattacaggcatgagccaccgtgcccggcctatggatttttttcttctaaaaattttataaatttagttctacatttagatccgtgatccattttaggttaatttttgtataagctgtgaaatttaggtaggtttatttttttgcatatggatgttcagttgttttaaaatcgtctgttgaaaaactctccattccccattgagttgtcttttcacctttgtcagaaatcaattgctatttatgtgagtctggttttggactttattccatcgatctatgtgtttatcctttcataaataccagattgccttgattatcacagctttatagtaagtcttaaaactgggcagcatgattccttcaaaatttttttgaaatctttttcaaaattgttttggctaatttagtttctttgccttccatatgaattttagaattagctactctgtatctacaaaaaatcctactggggttttgaatgcaattttgtgtcttccaatccatgaacatgaggtatctatttaggacctctttcatttcagttatcagcattttatgtcatttttcagcatatattccacagtgttcattttggaggaactattgttaagttgtattatttttgaaacatgggtttccaattgcacatcgctagtatgtacaaatgtgtttgatttttgtttgttgaccttgtatcctgtgaccttgctaaacttcattagttttgggagttattttgttgttaactcattaagttttctacataaactacgaatagaaacagttttattttattctttttagtctatgatttttcttgcctgattttgttgttaactcattaagttttctacataaactacgaataggaacagttttattttattctttttagtctatgatttttcttgcctgattgcagtggccagaacaataacatggagaaagtggccatctcagtcttgttctggatcttaggattttgaaagcattgtttttgaccattatgtatgcaagctgtaggcttttcttaaattccctttgtcatgttgagcaagttcccatctattaatttgttgttagcagagtttcatgagtggatgctgaattttctatgctctttctgtatcagtttggtcattctttttgtttagactgttaaaatcatggattttactgattccagaattttgaaacagcttatatttcctcccaaccccaaacttggtcatggtacattattcagcttatgtatctagatttttattttttgaggatttttatgtctgtgttcattttggatattgtgcaattgtttttgtttgttttttccttgtgttatctttatcttggtatggtatcatgttaattctggtcttgtaaaatgaattgcaaagtgattattctttctggaagagatttgtagaatttgttatatctttaaatgttttatgaatttgctagtaaggttttaaacaatggttcaatttttaaaaatagagaatttattgaggtttatttaagtttgggtactgtatgcctttcaaggaattggttcatctaatcctatgtgcatagagttgttcatggtattttctttgtgtcgttctaatgaggatctatactgttatcttttctttgattcctaagattggaatcaaagattggaattccttctctttttttgtcaattttgccagaggtttatcaattttactgctcttttcaaaaattagttttttgattgttttctattaatttgtttacaattgcatttattttctgcctcttttttttttttcttctttctgcttgctttaggtttagtttgggcttcttttttttgtagacaggtctcacttcatcacccagactggagtagtgttatgatcatagctcactgcagcctcaaactcgtggggtcatgatcctcctacctcagccttctgagtggctgggactatagtggtgtgccaccacacccagttagattttcctactttcttaaagtgggagcttagagtgttaatttgagaactttttcttgtttagtaaaaagcagtcgattgttataaattgcagcaccagcatggctgcattccaagcacggtgatattttcatttattttaaaatattttttaagacttccctgtagtatcatgagttatttagaaatgtgttgtttaatttccaagtgtttggagattttcttgctgttactgatttctagattatggtcaaaaaacatattttatatgatttcatctcttttaaatttgttaaggtttaagacccatgatgtggtttatcttggtgagtgttccatgtgtacttgaaaagaatgcttattctgctgttttaggtagaagggttttatgtcaattaaatctagctggttattagtattattccattttcctacatctttgctaattttctattaattctatggactactgagagaggaatgtttaagtttccaactgtaaatgaagatttgtccagtcctccttttaatgctaccactttttgcttcatgtttttttttttttttttgagtcttaccctgtcactcaggctggagcatagcaactctgtcatgcttcactgcagcctcaaactcctgggctcagacagtcttcccacctcaggctcctcagtacctaggactacagatgtatatcactatgcctagctaatttttgattttttgtagagatagggtctccctatgttgagtaggctggtcttgaactcttggcctcaagcaatcctcccaccttggcttcccaaagcattggaattacaggaatgaatgagtctctgtacctggtctcttcatgtatttttaagatctgataataagtgcttacacttttagcactgtcttggtgaattttatcattatataatgtccctaattatccttggcaattttggttgttcctaactctactttgatgaatataaaaatggctttttaatttattttttgagacaagagcctcactctgttgcccaggttggagagcagtggtgtgatcttgtctcactgcctcacaggttcaagcaattctcctgcctcagtctctggagtaactggtactacaggcatgcgccaccacacccagctgatttttgtatttttagtagagatggggtttcaccatgttggccatgctggtctcgaactcctggcctcaagtgatccgtccaccttggcctcccaaagtgctgggattacaggtgtgagccactgcgctcggccttaaaaattggcttatcttttaattcatcttgactcatgtttactgttttttggtttctgaaaaatagatttaataaataataacattttatcaaagttattagtatagagaaataaattgagtgttgttattattctatgatcatgatgacagcacagaagttaatgtggccagcatatagttttgattaaaaattatacaagcaa

SEQ ID NO: 161507 - DNA, 448 bp, Homo sapiens
  Payload ID: 11529
  Gene Symbol: NUDCD2
  Gene Name: NudC domain containing 2
  ENST ID: ENST00000517501
  CDS Start-End: 6-404
ggattatgtcggccccgtttgaggagcggagtggggtggtaccgtgcgggaccccgtggggccagtggtaccagaccttggaggaggtgttcattgaagttcaggtgccgccaggcacgcgcgcccaggatatccagtgcggcctccagagccggcatgtggcgctgtcggtgggcggccgcgagatcctcaagggcaaactctttgattctacaatagctgatgagggaacatggactttggaatctgaatatgcagcggatccttgggtgcaagaccaaatgcagagaaagcttacattagagagattccaaaaagaaaatcctggttttgacttcagtggagcagaaatctcaggaaactacactaaaggtggaccagatttctcaaaccttgagaaataactgctttttttcctgcattctgtggatcctagcagatattgcca

SEQ ID NO: 161508 - DNA, 8256 bp, Homo sapiens
  Payload ID: 11530
  Gene Symbol: NUDCD3
  Gene Name: NudC domain containing 3
  Uniprot ID: Q8IVD9
  ENST ID: ENST00000355451
  CDS Start-End: 281-1366
gccctcgcagcgcagcagaagccacgggcttccttccgcgtaggaacctccttgctgcccttgtcgggctcttttgtctaagaccacctcaaggcaaagcccgtggggcagctgggtctggggaaaacagcccggggccgcgggggccgaacgagcacggaccggaagttccgcagccgcgccgtccggcggagccgttggctgcggacgccggaagtggccagtcggcaggtctgaggcggcgctgtgtgtgtgaagcgtacctagggcgggaggcgacatggagacaggggcggccgagctgtatgaccaggcccttttgggcatcctgcagcacgtgggcaacgtccaggatttcctgcgcgttctctttggcttcctctaccgcaagacagacttctatcgcttgctgcgccacccatcggaccgcatgggcttcccgcccggggccgcgcaggccttggtgctgcaggtattcaaaacctttgaccacatggcccgtcaggatgatgagaagagaaggcaggaacttgaagagaaaatcagaagaaaggaagaggaagaggccaagactgtgtcagctgctgcagctgagaaggagccagtcccagttccagtccaggaaatagagattgactccaccacagaattggatgggcatcaggaagtagagaaagtgcagcctccaggccctgtgaaggaaatggcccatggttcacaggaggcagaagctccaggagcagttgctggtgctgctgaagtccctagggaaccaccaattcttcccaggattcaggagcagttccagaaaaatcccgacagttacaatggtgctgtccgagagaactacacctggtcacaggactatactgacctggaggtcagggtgccagtacccaagcacgtggtgaagggaaagcaggtctcagtggcccttagcagcagctccattcgtgtggccatgctggaggaaaatggggagcgcgtcctcatggaagggaagctcacccacaagatcaacactgagagttctctctggagtctcgagcccgggaagtgcgttttggtgaacctgagcaaggtgggcgagtattggtggaacgccatcctggagggagaagagcccatcgacattgacaagatcaacaaggagcgctccatggccaccgtggatgaggaggaacaggcggtgttggacaggcttacctttgactaccaccagaagctgcagggcaagccacagagccatgagctgaaagtccatgagatgctgaagaaggggtgggatgctgaaggttctcccttccgaggccagcgattcgaccctgccatgttcaacatctccccgggggctgtgcagttttaatgaccagaaggaaaggaaaccctcgccggtggggaggcagagccttatcctcggctgcccttcttggctccctgcattccagggacttgctcgtcttgtttacccctagccatcctttctttcaagggtgaaccaggccttccaccctgaccttgcatctccagactgttccagagaaggtgcggggccagctgctatgtggtggccgctgtggctgacactgagtgaaggtgtttgaaatgcaggagaggatatcccagcaaattgggatcacatgcttttgtctccacagcaaccagccactgcaggcagcatgtctttcctcccctgctctctgcttgctgttgttttgacgctattctgcttgcatgtcttctggttgggatgtggagttgttgctggactctcaggcgaagctgaagtcattgaagtgtgtgaagctctgtgcttgcatgagggcaagcaaggaatggctgtgcctgaggctgctctgggaaactccttgccccttgacctcttttgagagcattcacgtggtcttcttgctcatccccttataaatgtgctttgcctgcctcagcctcatggtcagagcagtggagactggagccctgtttgcacgttctagttgttcggagaaagcctaggttctgggctcaggtccagatgcagcggggattctgttctctgactgtggcgaccttgctttggttcttgttgaagtgaaccaagcccggccaccacgcatggcatgctgtgcttggctccccataagacgtcctctttgggtgcacggtgtcaaagtgtgggcaggagtggagagctggtgccctcaggaggagaccacagcatgtccatcagctcagcagagctcgacagccacaagtcctgagaagctttgaccttgaagggcttctgggagaggaggaatttctgcatggggcgtgaaggcacactgtcccaccacaactgaaccagaagagagtgaagactcccctcttcccatcctctgtgccaggtgccagactgtgctccttggaacttatggcccaatcttacctgttctccagggactggtcactgcctcaggacccccaagcctatgccctgagccatggctgctgactgactccagccaaggtgcaaagacgagattatgagacaggtcctcaggcctgtgttccaagtactcacaggggctctgggtgcccatcgccgggagtatggttcagctgccaccggcactgtccatttgcctgtctgtcaagctcagagcatggataagccacacagcagggcagtgcaccctggcaccatgcacggccagcaagaatcaaggcccgcagatgctaagagggcctattgtcaggggaaggtccccgctcctgcacactctctatggatacttgggttgtgggggctctcttggagagtaagtttgtggtttgtttctggtttacagtggtggctgacaccccttgtaagaaagcattcctgggaagtcttctgtgggtccaaacatgttgctccgatcatcacaggagagcaaaaggccctagataccccctttggaatgtgagagtcttgttgtctgatatttgccactgagctggtgaagcccctctaaagagatctcgaccctggggagcagaattcttgtcatctatgaggggtcctgagaaagacttgtcattttttttcctggagttcttcccattgaggtcctaggatttgcacaccactgtcccacaagagctttcctgcctaatgaaaggaggtcttgtggtgtgtgtctcctctcttctctatagttcccgagttggcccccattgcagcccccaccctgtgggtagtcttccagaagtgatgcagtggtgtgagatgccctacaccttgttatttgggagactttgagagtcattcacttccatggtgactagtgtttgttttgcctgattttatattctgtgttgcatttctccccactccctgccctgctttaataaacagcaaaccaatatctaggaagaatgactgagggatagtattgggtattggccccatggcaggaacagccacttgcatctggtcccggtgccacactgcggtgcttggtgtggttgtggagcctgtccctgcgcgccttgctcccgttgagccacgctgtctggtgggtgattctctgccctgagccaccaccctggactggcccagtctccagagctggcacaccctgcctgttttctctttttagacacaacagccgcagtttggccagccactaagtcccaccagctgaggtccgaggaaagcggggtgactcatttcccttgtccagggcccgaggagagtgaggtgtccagcctgcaaagctattccagctccttggtgttggtttgcaataaattggtatttaagcagttctgggtctgcgtgtgacatttgctgctgagacagttctgtctgtgcatggtcattattgttgcattctagccttgaggtcccaggccaacgtacacagcaaacaccagcatggggaattcttaggggttgtttcccatctggtctgaatgcactgggcaagatctcaatacagctttagaaatcctgtaagattttgaccagtggggagaaaaagaatgtagctatagatcttacatcctttcaaacaggttctggaattctgtagttactggaaagcttagggtgagtgcagagttgggaatgattccactgaagggccacctttgcccaccaggctccaaggccctccttggtctccaggtgcatacctgctgttaactttgctgagccctcgcaatgggcttcctccaggacataacgccgtgtctgacacagaagtctcccaggtggctggccacctgcttcttcctcagtcagatctttgactctccttctctgtgcccaccccatctccagcctcctctgaccctgctcacccctggggacaggacctaggggtgtgagaagtacttggctgaataaagactgtttcaaaggcaatccttagaattgcctagcatactcccagggccagaaataacccgccagaaaggagaggcgtatttgcccctgaagagtgcaggagggagaacagttgagaagtgttttgtgtggaaatgtgtccaagaggcgtcagctgctgcacagagaactcactgcccagaacactgcgcttggggaacagacctcacccccacctcaaatctgctctccactgggcctgttggcagccagctcagctggggaagggacagcatgactcgctttgtcgatgaaaagcacgaagttgtcagcacagaacctggccagtccttgagaaactccctccttggtggtcagaggtcaagcagcccatgtggcccacggtcctgaagaactgggctatgtccctgaggctcctctctaccgtctgactgtggggtctggggaacaggcatttaaaccaggctgctgccctggggagtgcccactggacgccagggtgccccatagggacagggtcacaaagccctggggcttcccctgccagtcctggtgaggacagtgtggtcactatctcagagagacgaaaaatgaatattctgtcatttcagactaaactactcacccagctcacactaatatggatttgttaattttacctttttttttctttccaactttaggttcaagggttgttacatgggtaaattggatcataggggtttggtgtacagataattttgtcacccaggtaatcagcatgatacctgatatgtagtttttcagtcctcaccttcctcccactcggttttattttttagtactgaaagtttaacagattggtcttacctcagagggagggaagaaacccccccatcgctgggctccttggtgtgacaggggtctggtaggggttttcaatcccaccacccattcctccacaccaaatgcctgaagtccccactttgcacagggagacagcatcgtgccagggaagagaggtcaggcccggctacccctcacaacttcctgcttccccctcagagggtgatggggagaccagagcccatggcaggatgaactgtcactgaacccagctggcacaggtctgccagaacactctgggggtatgcgctgggctttctgggtaaacccctggcaagctggcgtttgctgtcttctcagtgctgatggagataggcacacatggggtgtgggaatgtggccaccctcaggcaggttcacgagggtactgtcaggcgctcaggtgtatgccgcctcctgtcaggcagggctgaggctattctccctggagaaggacagcttaggaaacacttgcaggaaagctgcctggacctgggaggtgaccctggccagcctccctgctgcctctctcagtcctaggccttcttccccagagctggtcagggcctgagggactttgtagtctaacccctcattgtgctacaatcacaggagtaagtaacactcccaaggccatgtggctggtgactcggggggcccaggtccaggatcctgccccatctgcaggccagtggttccttgtctcctatttgcttcttggagcagcctcctcataagccaacagctccttcacctgagcccagtcactttgcgctcctccccagaaccaaagagcaagaccatctgccccaggtacagtcctggccatgccacactctctgtggcatcatgaccaaggtgagtggcagatactgaaatcatccagggccactgcaggccccattcccagtggactgttcatcaagggaccctgtctcaggccatctcagccaaccttgttgcccagcacaggtctggcacattggagatgatctgtgttggatggggaaggcagagggaggatcctccagcattgatcacccatcaaaaccctcaacaacccagacattgccgctgcactgaccccatgctatgaggaggtcactcaggctgttaggagcctgctgactcaggcattgggctggggccctgcctgccttgtctgcctgccagcggagcactgccccaagcccttcttactgcagagacaggctcttgcctcccagtgtgcactttgtgcaagacacaggcaggtaagggtctaccagaggacaggaagtgttgttggggcactgtggggtttggaggaggcccctctagcagggaaagcgagccctaacctctgctggactagggagtttaggaagctgctctggttcagggaactggggatccagataactggggatcaaggccatcttgtgaccccagtggtggtccctagtgggactgctgagctccagcctgagagttcatgaactcaacagtgattgcttgtgggtactaatgacccagtgtgtggagacctcatttaccaggtgtgcctagcctgcaggcaaatcccaaggcagtgacccttagggaagagacagcgtttggggtcatcaaaggctgggaaacccaggtacctgtcagggaatgggctacagactggagctaagccttaaggtggggaagattccagcacccctgagtgaccacctcttttggtaatgcaaagaagggattttgtgactccagggtgacatttctaagcttggcatcatgcagggtgggcttgggctcaatatgggtgactgttagtctagggctgtctcaatgaggctgtccaggcagaaaggcttacacacctggcaggcagagggtctagagaggaaggggcaacaggcctaaggaggggacagccaggcaaggaggtagaataggccttgtctggacagtggtcacctgttaggtccacagcttgtcctccctggcctgaccagccaggtgaggagagatccaaaccatccacctgaaagcattcagggtgcctgatgacaagaccccagccactgtgggctctcatgtcctggtaggaaggtatacctaaagcaggtggacctggtagtggtggacgctgtctgcctccccggggcttgtctgtttatgccagaccgttttcccatttgcttccacctccagctcagagaggaatcaccttcacacctctgctaaaactaacccagctctgcacccaccattccccactgtgcaacacctgctactggagaaccctgccccctcaaatacacgtcatcctcagggccctgcgatgtgctgtggtctccctgccaccattcaaggggccacagccaggtccagcctgtcttccctggcaccaggctctatgcagtgggggaaactcgggcacccctaaactattctccagtgttctcaccagaggtggtcagccatgtgatggcaagagtcacttcttaagcttttgctatccccagaaacttaaagcaacaccaaccacacccaaaagtcaagtgatatccagacagcaacagtagagcattaactgagtgcagggccgtggtgactcctcgacactccaggctctcctgctggtaacctcccattggcagagccaggcactcagcaaagccctggacagtcagcagcctcctgaacaggctctgctgtccccactcacgacttcagagcagctaggactcctgtgaccacccctgtcccctgttcccccccaccccgccccgccccgccaactgcctcatctctgtcccaagataactgctctccagaattttccatgatatggtcattttaaaagttttttttttttttgagacagagtttttcctgtgttgcccagactggactcaaacctctgggctcaagtgatcctcctgcttcagcctcccaagtagctgggactgtaagtgtgcaccactgtgcctggcttgatggtgtcatttttcactgtacgtgtatttgtaaaccgtataaatcag

SEQ ID NO: 161509 - DNA, 1800 bp, Homo sapiens
  Payload ID: 11531
  Gene Symbol: NUDC
  Gene Name: nudC nuclear distribution protein
  Uniprot ID: Q9Y266
  ENST ID: ENST00000321265
  CDS Start-End: 124-1119
gtgtttccggctccgctgcggaaggcggacgactagagtcgttgggcccggcgcgacccgcaggagcgtagagagcgcgggactagagtgcagagctccgggacgtggatcggagccggcgcgatgggcggagagcaggaggaggagcggttcgacggcatgttgctggccatggctcagcagcacgagggcggcgtgcaggagcttgtgaacaccttcttcagcttccttcgacgcaaaacagactttttcattggaggagaagaagggatggcagagaagcttatcacacagactttcagccaccacaatcagctggcacagaagacccggcgggagaagagagcccggcaggaggccgagcggcgggagaaggcggagcgggcggccagactggccaaggaagccaagtcagagacctcagggccccagatcaaggagctaactgatgaagaggcagagaggctgcagctagagattgaccagaaaaaggatgcagagaatcatgaggcccagctcaagaacggcagccttgactccccagggaagcaggatactgaggaagatgaggaggaagatgagaaggacaaaggaaaactgaagcccaacctaggcaacggggcagacctgcccaattaccgctggacccagaccctgtcggagctggacctggcggtccctttctgtgtgaacttccggctgaaagggaaggacatggtggtggacatccagcggcggcacctccgggtggggctcaaggggcagccagcgatcattgatggggagctctacaatgaagtgaaggtggaggagagctcgtggctcattgaggacggcaaggtggtgactgtgcatctggagaagatcaataagatggagtggtggagccgcttggtgtccagtgaccctgagatcaacaccaagaagattaaccctgagaattccaagctgtcagacctggacagtgagactcgcagcatggtggaaaagatgatgtatgaccagcgacagaagtccatggggctgccaacttcagacgaacagaagaaacaggagattctgaagaagttcatggatcaacatccggagatggatttttccaaggctaaattcaactagcccctgttttttcctccctgaactcttggggctgagctgcaaccacccaactttctttcccactcttctctgggacttgtgggcctcagggcttggggcaggcatgggactggcccaggcacacaggtcccggggcatcaggagaaaggctgggtcttgggaccttgtcctccccagttggcctactgttacacattaaaacgatttgcccagctccttctgtgtcctctcttgcctctggcctttctctggggcacaggcctcttacggctgctgctgggaactgggagtttggcttctagcccagattctgccatgtgacctagggcacatccttgcccctctctgggcctcagtttctcattacttaaagattaaaacaaggcttggccgggtgtgatggttcatgtctgtaatcccagcactttgggaggctgaggggagcagatcacctgatgtcaggagtttgagaccagcttggccaacatggagaaacccagtctctactaaaaatacaaaaattagccgggtgtggtggtgcacacctgtaatcccagctactcgggaggctgaggcaggagaatcgcttgaacccgggtggcggaggttgcagtgagccgagattgcactacttcactccagcatgggtgacagagactccatctcaaaaaaataaataaa

SEQ ID NO: 161510 - DNA, 816 bp, Homo sapiens
  Payload ID: 11531
  Gene Symbol: NUDC
  Gene Name: nudC nuclear distribution protein
  ENST ID: ENST00000452707
  CDS Start-End: 418-816
gcaaattatcgcatccctgagcttaggatccccctttagtttcacatatgcccccacccccgtttccactttgatggcggcttccaaggagcatcccttagtaagaaccgtcgcaaatatcgtgatttggatccaccaaggcttggggcgagccgtcgaatgtgtgtggtaggggagcgggctgatgttagcacgtggtcttgttaggccttgaatgggggaataggaggcctgtgttcacgattagtttccaccacctaccaacttggaacctttacatctctccaagcctgagtttccttatctgtgagacagctgcgaataccggtttccagagagtagttaagaacccttgtgaacaccttcttcagcttccttcgacgcaaaacagactttttcattggaggagaagaagggatggcagagaagcttatcacacagactttcagccaccacaatcagctggcacagaagacccggcgggagaagagagcccggcaggaggccgagcggcgggagaaggcggagcgggcggccagactggccaaggaagccaagtcagagacctcagggccccagatcaaggagctaactgatgaagaggcagagaggctgcagctagagattgaccagaaaaaggatgcagagaatcatgaggcccagctcaagaacggcagccttgactccccagggaagcaggatactgaggaagatgaggaggaagatgagaaggacaaaggaaaactgaagcccaacctaggcaacggggcagacctgcccaattaccgctggacccagaccctgtcggagctggac

SEQ ID NO: 161511 - DNA, 821 bp, Homo sapiens
  Payload ID: 11531
  Gene Symbol: NUDC
  Gene Name: nudC nuclear distribution protein
  ENST ID: ENST00000435827
  CDS Start-End: 264-821
taggaattagggcagagttaggagcggcctgcggaggggcccgctcaggccgatgccggtagtggaaacagaggaagccaccgccgcgctcttctcggaactggctaaaatagctccgtaaatgggccgagcgcaacacggaggggataccgctcactaccagcttcccgaactttggcttaccctcagcttgagccagcgcacatctcctccttaacagcctctcctgagaataggctggcttcaaggaatgggggaagtgaatgatctcaaactacagaaatggcagtgaacttgtctgtttcaattcgggagtgggctgcttcctgattggctgtgattgggctttcactgtgcttgtgaacaccttcttcagcttccttcgacgcaaaacagactttttcattggaggagaagaagggatggcagagaagcttatcacacagactttcagccaccacaatcagctggcacagaagacccggcgggagaagagagcccggcaggaggccgagcggcgggagaaggcggagcgggcggccagactggccaaggaagccaagtcagagacctcagggccccagatcaaggagctaactgatgaagaggcagagaggctgcagctagagattgaccagaaaaaggatgcagagaatcatgaggcccagctcaagaacggcagccttgactccccagggaagcaggatactgaggaagatgaggaggaagatgagaaggacaaaggaaaactgaagcccaacctaggcaacggggcagacctgcccaattaccgctggacccagaccctgtcggagctggac

SEQ ID NO: 161512 - DNA, 3166 bp, Homo sapiens
  Payload ID: 11532
  Gene Symbol: NDE1
  Gene Name: nudE neurodevelopment protein 1
  Uniprot ID: Q9NXR1
  ENST ID: ENST00000342673
  CDS Start-End: 57-1064
ccttctctcctagacaccatgccacaaggagagtgatctcttcccctgttttcacaatggaggactccggaaagactttcagctccgaggaggaagaagctaactattggaaagatctggcgatgacctacaaacagagggcagaaaatacgcaagaggaactccgagaattccaggagggaagccgagaatatgaagctgaattggagacgcagctgcaacaaattgaaaccaggaacagagacctcctgtccgaaaataaccgccttcgcatggagctggaaaccatcaaggagaagtttgaagtgcagcactctgaaggctaccggcagatctcagccttggaggatgacctcgcgcagaccaaagccattaaagaccaattgcagaaatacatcagagagctggagcaagcaaatgacgacctggaaagagccaagcgcgccacgatcatgtctctcgaagactttgagcagcgcttgaatcaggccatcgaaagaaatgccttcctggaaagtgaacttgatgaaaaagagaatctcctggaatctgttcagagactgaaggatgaagccagagatttgcggcaggaactggccgtgcagcagaagcaggagaaacccaggacccccatgcccagctcagtggaagctgagaggacagacacagctgtgcaggccacgggctccgtgccgtccacgcccattgctcaccgaggacccagctcaagtttaaacacacctgggagcttcagacgtggcctggacgactccaccggggggacccccctcacacctgcggcccggatatcagccctcaacattgtgggagacctactgcggaaagtcggggcactggagtccaaactcgcttcctgccggaacctcgtgtacgatcagtccccaaaccgaacaggtggcccagcctctgggcggagcagcaagaacagagatggcggggagagacggccaagcagcaccagcgtgcctttgggtgataaggggttggacacgagttgccgctggttgtccaaatcaacaaccaggtcgtccagctcctgctgaagcctgttcttggtcttttccagtttatcataagcggccgccttctcctcgtactgctgggtgaggttctcgatctccttctggaacctcttcttcccctcttccagagcttccacggtgctggcaaagtcctgcagcttcttcttcgagtcggagagctacaaggacagcgtccagggtagggtgagagggggaccatgagtggcccctgtccctggccccacagactctgagaagcgaagaccatgtctcctcgttggagaaacccaatagcaggggaagctggggggtcaagcaccatcgcaccaacactccaccgcgatctgcctgcgggggatctcagcgcagagaagttgagaggacccatgaaggaagcaaggacacggggcaggcacctggatgttgagagtggagatgtggcgctccaggttctgcttggcctccatctcctcgtccagctggtcttgcaggctgttccgctcctcctccagctggcgcagcttcgtagacacgttgagcttctgccgggtttcttcttgaagcagctcctgcaaaagggatgcaaagaggtcccagggacctgccccgaggaaggccaccccccaggtcccctggatgatgtggcaggacactcacctgggtgtcctggagctgggaactgagggacgccacgtccttggccagcttaatggccttcccctcggcctcgttaagcatccctgtgacgctctcaacttcattctaagggtgccaagagactggttagtcaaagcctctagaaggggatcctcgttgaaaggagccctttttactcaaaacacatgggctagtacttgaggtgttcactgattgagaaaatacccgtgaggtatgggactctgataaaaaaaaaaaaaaacacacacacacacaaaaaaaacagaatctgtggcttgaagggaactccgtcacctatgagttgggaccctggccctagactctgtggttctaagaacttatttgagccccaatggtattgactgggacctgatcccactaaatggatcctagatccctgccaaggttggtagagacaaagcagcaggtctgagagtccagacgaggtgctctggctggtccactctctaaggctggagaagggagaccaggatggtacttgaacgtcccagggatgctgtcccatcccttccttcctcactcctactctttgaccctgatggccaaagccagagacgcaggccctaaaggtaaaaacgtcctctctgtattctctggcttttactccctagtgtctctgcataagtccctttgaggctgttagcctacccctccatctcttccattgacaaggaggatatgaatgatcttgacactgcttatatgagggcggcaaaagccctgctctcaactgcatgtgagaaaaaaacatctcacttaattcttccctcgccccttggtccctggctgtggacatgttaaacatttgtgaaaactttggccacgtccccatgagtggcaaggcagggtaaatggctatgccaagtgaaagaagaccaaagacaaaaagaccatgtcattcagcagcttaaaacccctcaacagcttcacattgcccagagtaaggatcaacatacatgtaataggttctcaaaagccctacatcatctgggtacaagctccccctccaaccccactctgtactatctccccctacccccaaccccagctgggcactccagctctactggctgtatgtctctctcctaatttttctacttaccacagggcctttgcacacgctgttccctctgcctggtagacttatccatgctccttagggaagcctttcgtggctcctcctcccccaggttaggccccctggttatttacacttgggcatcatgtgccttccctttgctgcatcatttgacattcatttgtgtgattattcatgtctttcccttcccttcccttccccttactcggctggagtcctactggggcagcgacagtgtctcttcttccttgctgttggatctcaggattaagcacagtgcctggcatacagcaggtgctcaataaatacttatcaaattggaaaa

SEQ ID NO: 161513 - DNA, 3221 bp, Homo sapiens
  Payload ID: 11532
  Gene Symbol: NDE1
  Gene Name: nudE neurodevelopment protein 1
  Uniprot ID: Q9NXR1
  ENST ID: ENST00000396354
  CDS Start-End: 112-1119
ggggccgcaccgcccttcgcagccgcctctgccgccgccgccgcgttggcctcgccgcccctgctcggacaccatgccacaaggagagtgatctcttcccctgttttcacaatggaggactccggaaagactttcagctccgaggaggaagaagctaactattggaaagatctggcgatgacctacaaacagagggcagaaaatacgcaagaggaactccgagaattccaggagggaagccgagaatatgaagctgaattggagacgcagctgcaacaaattgaaaccaggaacagagacctcctgtccgaaaataaccgccttcgcatggagctggaaaccatcaaggagaagtttgaagtgcagcactctgaaggctaccggcagatctcagccttggaggatgacctcgcgcagaccaaagccattaaagaccaattgcagaaatacatcagagagctggagcaagcaaatgacgacctggaaagagccaagcgcgccacgatcatgtctctcgaagactttgagcagcgcttgaatcaggccatcgaaagaaatgccttcctggaaagtgaacttgatgaaaaagagaatctcctggaatctgttcagagactgaaggatgaagccagagatttgcggcaggaactggccgtgcagcagaagcaggagaaacccaggacccccatgcccagctcagtggaagctgagaggacagacacagctgtgcaggccacgggctccgtgccgtccacgcccattgctcaccgaggacccagctcaagtttaaacacacctgggagcttcagacgtggcctggacgactccaccggggggacccccctcacacctgcggcccggatatcagccctcaacattgtgggagacctactgcggaaagtcggggcactggagtccaaactcgcttcctgccggaacctcgtgtacgatcagtccccaaaccgaacaggtggcccagcctctgggcggagcagcaagaacagagatggcggggagagacggccaagcagcaccagcgtgcctttgggtgataaggggttggacacgagttgccgctggttgtccaaatcaacaaccaggtcgtccagctcctgctgaagcctgttcttggtcttttccagtttatcataagcggccgccttctcctcgtactgctgggtgaggttctcgatctccttctggaacctcttcttcccctcttccagagcttccacggtgctggcaaagtcctgcagcttcttcttcgagtcggagagctacaaggacagcgtccagggtagggtgagagggggaccatgagtggcccctgtccctggccccacagactctgagaagcgaagaccatgtctcctcgttggagaaacccaatagcaggggaagctggggggtcaagcaccatcgcaccaacactccaccgcgatctgcctgcgggggatctcagcgcagagaagttgagaggacccatgaaggaagcaaggacacggggcaggcacctggatgttgagagtggagatgtggcgctccaggttctgcttggcctccatctcctcgtccagctggtcttgcaggctgttccgctcctcctccagctggcgcagcttcgtagacacgttgagcttctgccgggtttcttcttgaagcagctcctgcaaaagggatgcaaagaggtcccagggacctgccccgaggaaggccaccccccaggtcccctggatgatgtggcaggacactcacctgggtgtcctggagctgggaactgagggacgccacgtccttggccagcttaatggccttcccctcggcctcgttaagcatccctgtgacgctctcaacttcattctaagggtgccaagagactggttagtcaaagcctctagaaggggatcctcgttgaaaggagccctttttactcaaaacacatgggctagtacttgaggtgttcactgattgagaaaatacccgtgaggtatgggactctgataaaaaaaaaaaaaaacacacacacacacaaaaaaaacagaatctgtggcttgaagggaactccgtcacctatgagttgggaccctggccctagactctgtggttctaagaacttatttgagccccaatggtattgactgggacctgatcccactaaatggatcctagatccctgccaaggttggtagagacaaagcagcaggtctgagagtccagacgaggtgctctggctggtccactctctaaggctggagaagggagaccaggatggtacttgaacgtcccagggatgctgtcccatcccttccttcctcactcctactctttgaccctgatggccaaagccagagacgcaggccctaaaggtaaaaacgtcctctctgtattctctggcttttactccctagtgtctctgcataagtccctttgaggctgttagcctacccctccatctcttccattgacaaggaggatatgaatgatcttgacactgcttatatgagggcggcaaaagccctgctctcaactgcatgtgagaaaaaaacatctcacttaattcttccctcgccccttggtccctggctgtggacatgttaaacatttgtgaaaactttggccacgtccccatgagtggcaaggcagggtaaatggctatgccaagtgaaagaagaccaaagacaaaaagaccatgtcattcagcagcttaaaacccctcaacagcttcacattgcccagagtaaggatcaacatacatgtaataggttctcaaaagccctacatcatctgggtacaagctccccctccaaccccactctgtactatctccccctacccccaaccccagctgggcactccagctctactggctgtatgtctctctcctaatttttctacttaccacagggcctttgcacacgctgttccctctgcctggtagacttatccatgctccttagggaagcctttcgtggctcctcctcccccaggttaggccccctggttatttacacttgggcatcatgtgccttccctttgctgcatcatttgacattcatttgtgtgattattcatgtctttcccttcccttcccttccccttactcggctggagtcctactggggcagcgacagtgtctcttcttccttgctgttggatctcaggattaagcacagtgcctggcatacagcaggtgctcaataaatacttatcaaattggaaaa

SEQ ID NO: 161514 - DNA, 3936 bp, Homo sapiens
  Payload ID: 11532
  Gene Symbol: NDE1
  Gene Name: nudE neurodevelopment protein 1
  Uniprot ID: Q9NXR1
  ENST ID: ENST00000396355
  CDS Start-End: 827-1834
ggggggggcggggcctcgcggccctgcagcctcgtcaggctcagtcccctcccgataaacccctaaatagggactttcccggggggtgaccctggcttttttggcgaaaacccccagtttaaggaggccttccccctggcttcacgttgtggagtcgaaaggaaccttgaagcggagaatgagctcgtgacgtggacccgaggaaaaaacctgccaaccaggatttaatagaattcagctctttcaggctttggagggaaggcgatttgaacgggatttcaatgaaaaaccctgtcccttcggctttttttttttcctctctcgggtctcgtcacgtgatggtcctactttatttttaaaaattaaatggcgcatattccccagcatcctaaatctagtgcaacctagtggcaagtggagaaaaaaataactgccaacctggcttcctacgaggtcccccggagttctcgcaaagttgcgacccagttggcaaaaatacagtgtgtgcaaagactcaactggacattgccaccaagaatcaagagatttttggggactttagcaagaaaacgttatttttaaaagccctgctccaaagctggttacaaatgaatactgcgtttccagtgacaggttgggcgagcagaaaggaaatcttacgacggagtcttgccctgtcgcctaggctagagtgcagtggtgtgatctcggctcactgcaaccgccacctcccggtttcccgtgattctcctgcctcagcctcctgagtagctgggattacagacaccatgccacaaggagagtgatctcttcccctgttttcacaatggaggactccggaaagactttcagctccgaggaggaagaagctaactattggaaagatctggcgatgacctacaaacagagggcagaaaatacgcaagaggaactccgagaattccaggagggaagccgagaatatgaagctgaattggagacgcagctgcaacaaattgaaaccaggaacagagacctcctgtccgaaaataaccgccttcgcatggagctggaaaccatcaaggagaagtttgaagtgcagcactctgaaggctaccggcagatctcagccttggaggatgacctcgcgcagaccaaagccattaaagaccaattgcagaaatacatcagagagctggagcaagcaaatgacgacctggaaagagccaagcgcgccacgatcatgtctctcgaagactttgagcagcgcttgaatcaggccatcgaaagaaatgccttcctggaaagtgaacttgatgaaaaagagaatctcctggaatctgttcagagactgaaggatgaagccagagatttgcggcaggaactggccgtgcagcagaagcaggagaaacccaggacccccatgcccagctcagtggaagctgagaggacagacacagctgtgcaggccacgggctccgtgccgtccacgcccattgctcaccgaggacccagctcaagtttaaacacacctgggagcttcagacgtggcctggacgactccaccggggggacccccctcacacctgcggcccggatatcagccctcaacattgtgggagacctactgcggaaagtcggggcactggagtccaaactcgcttcctgccggaacctcgtgtacgatcagtccccaaaccgaacaggtggcccagcctctgggcggagcagcaagaacagagatggcggggagagacggccaagcagcaccagcgtgcctttgggtgataaggggttggacacgagttgccgctggttgtccaaatcaacaaccaggtcgtccagctcctgctgaagcctgttcttggtcttttccagtttatcataagcggccgccttctcctcgtactgctgggtgaggttctcgatctccttctggaacctcttcttcccctcttccagagcttccacggtgctggcaaagtcctgcagcttcttcttcgagtcggagagctacaaggacagcgtccagggtagggtgagagggggaccatgagtggcccctgtccctggccccacagactctgagaagcgaagaccatgtctcctcgttggagaaacccaatagcaggggaagctggggggtcaagcaccatcgcaccaacactccaccgcgatctgcctgcgggggatctcagcgcagagaagttgagaggacccatgaaggaagcaaggacacggggcaggcacctggatgttgagagtggagatgtggcgctccaggttctgcttggcctccatctcctcgtccagctggtcttgcaggctgttccgctcctcctccagctggcgcagcttcgtagacacgttgagcttctgccgggtttcttcttgaagcagctcctgcaaaagggatgcaaagaggtcccagggacctgccccgaggaaggccaccccccaggtcccctggatgatgtggcaggacactcacctgggtgtcctggagctgggaactgagggacgccacgtccttggccagcttaatggccttcccctcggcctcgttaagcatccctgtgacgctctcaacttcattctaagggtgccaagagactggttagtcaaagcctctagaaggggatcctcgttgaaaggagccctttttactcaaaacacatgggctagtacttgaggtgttcactgattgagaaaatacccgtgaggtatgggactctgataaaaaaaaaaaaaaacacacacacacacaaaaaaaacagaatctgtggcttgaagggaactccgtcacctatgagttgggaccctggccctagactctgtggttctaagaacttatttgagccccaatggtattgactgggacctgatcccactaaatggatcctagatccctgccaaggttggtagagacaaagcagcaggtctgagagtccagacgaggtgctctggctggtccactctctaaggctggagaagggagaccaggatggtacttgaacgtcccagggatgctgtcccatcccttccttcctcactcctactctttgaccctgatggccaaagccagagacgcaggccctaaaggtaaaaacgtcctctctgtattctctggcttttactccctagtgtctctgcataagtccctttgaggctgttagcctacccctccatctcttccattgacaaggaggatatgaatgatcttgacactgcttatatgagggcggcaaaagccctgctctcaactgcatgtgagaaaaaaacatctcacttaattcttccctcgccccttggtccctggctgtggacatgttaaacatttgtgaaaactttggccacgtccccatgagtggcaaggcagggtaaatggctatgccaagtgaaagaagaccaaagacaaaaagaccatgtcattcagcagcttaaaacccctcaacagcttcacattgcccagagtaaggatcaacatacatgtaataggttctcaaaagccctacatcatctgggtacaagctccccctccaaccccactctgtactatctccccctacccccaaccccagctgggcactccagctctactggctgtatgtctctctcctaatttttctacttaccacagggcctttgcacacgctgttccctctgcctggtagacttatccatgctccttagggaagcctttcgtggctcctcctcccccaggttaggccccctggttatttacacttgggcatcatgtgccttccctttgctgcatcatttgacattcatttgtgtgattattcatgtctttcccttcccttcccttccccttactcggctggagtcctactggggcagcgacagtgtctcttcttccttgctgttggatctcaggattaagcacagtgcctggcatacagcaggtgctcaataaatacttatcaaattggaaaa

SEQ ID NO: 161515 - DNA, 411 bp, Homo sapiens
  Payload ID: 11532
  Gene Symbol: NDE1
  Gene Name: nudE neurodevelopment protein 1
  ENST ID: ENST00000573694
  CDS Start-End: 1-411
cgtgcagcagaagcaggagaaacccaggacccccatgcccagctcagtggaagctgagaggacagacacagctgtgcaggccacgggctccgtgccgtccacgcccattgctcaccgaggacccagctcaagtttaaacacacctgggagcttcagacgtggcctggacgactccaccggggggacccccctcacacctgcggcccggatatcagccctcaacattgtgggagacctactgcggaaagtcggggttggggaagcgcctggaatttgggaagccgccttcacacatgtcttcatcgccgctgccgtcagcccagggggtagtcaagatgttgctttaggaaaaccacggaagctgaaggtcttggtgttggttggacacgagttgccgctggttgtccaaat

SEQ ID NO: 161516 - DNA, 843 bp, Homo sapiens
  Payload ID: 11532
  Gene Symbol: NDE1
  Gene Name: nudE neurodevelopment protein 1
  ENST ID: ENST00000574109
  CDS Start-End: 1-522
gaaagaaatgccttcctggaaagtgaacttgatgaaaaagagaatctcctggaatctgttcagagactgaaggatgaagccagagatttgcggcaggaactggccgtgcagcagaagcaggagaaacccaggacccccatgcccagctcagtggaagctgagaggacagacacagctgtgcaggccacgggctccgtgccgtccacgcccattgctcaccgaggacccagctcaagtttaaacacacctgggagcttcagacgtggcctggacgactccaccggggggacccccctcacacctgcggcccggatatcagccctcaacattgtgggagacctactgcggaaagtcggggcactggagtccaaactcgcttcctgccggaacctcgtgtacgatcagtccccaaaccgaacaggtggcccagcctctgggcggagcagcaagaacagagatggcggggagagacggccaagcagcaccagcgtgcctttgggtgataaggggagagaaaattgagaccctgtgagaccctgctcctgactcttgatgttcacccttataactctctgggccccggtgctagccagtttgtcacagctgttatgtcagcttaatttggtttgctctgtctgaaggttggggaagcgcctggaatttgggaagccgccttcacacatgtcttcatcgccgctgccgtcagcccagggggtagtcaagatgttgctttaggaaaaccacggaagctgaaggtcttggtgttggtgcggaagtcgttaccttttgtcgtctttttacactaggtttttgttttaagttagtttgagaaataagagcagt

SEQ ID NO: 161517 - DNA, 588 bp, Homo sapiens
  Payload ID: 11532
  Gene Symbol: NDE1
  Gene Name: nudE neurodevelopment protein 1
  ENST ID: ENST00000570727
  CDS Start-End: 208-588
agccgcctctgccgccgccgccgcgttggcctcgccgcccctgctcggagtctcactctcgcccaggttggagtgcagtggtgcgattttggctcactgcaacctccgcttcccgggttcaagcgattctcctgcctcagcctccggagtagctgggactacagacaccatgccacaaggagagtgatctcttcccctgttttcacaatggaggactccggaaagactttcagctccgaggaggaagaagctaactattggaaagatctggcgatgacctacaaacagagggcagaaaatacgcaagaggaactccgagaattccaggagggaagccgagaatatgaagctgaattggagacgcagctgcaacaaattgaaaccaggaacagagacctcctgtccgaaaataaccgccttcgcatggagctggaaaccatcaaggagaagtttgaagtgcagcactctgaaggctaccggcagatctcagccttggaggatgacctcgcgcagaccaaagccattaaagaccaattgcagaaatacatcagagagctggagcaagcaaatgacgacctggaaagagcc

SEQ ID NO: 161518 - DNA, 484 bp, Homo sapiens
  Payload ID: 11532
  Gene Symbol: NDE1
  Gene Name: nudE neurodevelopment protein 1
  ENST ID: ENST00000572967
  CDS Start-End: 1-420
gccacgggctccgtgccgtccacgcccattgctcaccgaggacccagctcaagtttaaacacacctgggagcttcagacgtggcctggacgactccaccggggggacccccctcacacctgcggcccggatatcagccctcaacattgtgggagacctactgcggaaagtcggggcactggagtccaaactcgcttcctgccggaacctcgtgtacgatcagtccccaaaccgaacaggtggcccagcctctgggcggagcagcaagaacagagatggcggggagagacggccaagcagcaccagcgtgcctttgggtgataaggggttggggaagcgcctggaatttgggaagccgccttcacacatgtcttcatcgccgctgccgtcagcccagggggtagtcaagatgttgctttaggaaaaccacggaagctgaaggtcttggtgttggttggacacgagttgccgctggttgtccaaat

SEQ ID NO: 161519 - DNA, 915 bp, Homo sapiens
  Payload ID: 11532
  Gene Symbol: NDE1
  Gene Name: nudE neurodevelopment protein 1
  ENST ID: ENST00000572756
  CDS Start-End: 212-590
agccgcctctgccgccgccgccgcgttggcctcgccgcccctgctcggacggagtcttgttcttgtccaggctggagtgcagtggcatgatctcgactcactgcaacctcagtcctccgggttcaagtgattcttctgcctcaccctcctgagtagctgggattacagacaccatgccacaaggagagtgatctcttcccctgttttcacaatggaggactccggaaagactttcagctccgaggaggaagaagctaactattggaaagatctggcgatgacctacaaacagagggcagaaaatacgcaagaggaactccgagaattccaggagggaagccgagaatatgaagctgaattggagacgcagctgcaacaaattgaaaccaggaacagagacctcctgtccgaaaataaccgccttcgcatggagctggaaaccatcaaggagaagtttgaagtgcagcactctgaaggctaccggcagatctcagccttggaggatgacctcgcgcagaccaaagccattaaagaccaattgcagaaatacatcagagagctggagcaagcaaatgacgacctggaaagagccaagcgcgccacgatcatgtctctcgaagactttgagcagcgcttgaatcaggccatcgaaagaaatgccttcctggaaagtgaacttgatgaaaaagagaatctcctggaatctgttcagagactgaaggatgaagccagagatttgcggcaggaactggccgtgcagcagaagcaggagaaacccaggacccccatgcccagctcagtggaagctgagaggacagacacagctgtgcaggccacgggctccgtgccgtccacgcccattgctcaccgaggacccagctcaagtttaaacacacctgggagcttcagacgtgg

SEQ ID NO: 161520 - DNA, 762 bp, Homo sapiens
  Payload ID: 11532
  Gene Symbol: NDE1
  Gene Name: nudE neurodevelopment protein 1
  ENST ID: ENST00000573203
  CDS Start-End: 82-411
gccgccgccgccgcgttggcctcgccgcccctgctcggacaccatgccacaaggagagtgatctcttcccctgttttcacaatggaggactccggaaagactttcagctccgaggaggaagaagctaactattggaaagatctggcgatgacctacaaacagagggcagaaaatacgcaagaggaactccgagaattccaggagggaagccgagaatatgaagctgaattggagacgcagctgcaacaaattgaaaccaggaacagagacctcctgtccgaaaataaccgccttcgcatggagctggaaaccatcaaggttccgaggagatctctcaatcgccagtgcagtcggtggagcccactcgctgcgtcctcctggagcctgcgtttgaatttaggagaagtttgaagtgcagcactctgaaggctaccggcagatctcagccttggaggatgacctcgcgcagaccaaagccattaaagaccaattgcagaaatacatcagagagctggagcaagcaaatgacgacctggaaagagccaagcgcgccacgatcatgtctctcgaagactttgagcagcgcttgaatcaggccatcgaaagaaatgccttcctggaaagtgaacttgatgaaaaagagaatctcctggaatctgttcagagactgaaggatgaagccagagatttgcggcaggaactggccgtgcagcagaagcaggagaaacccaggacccccatgcccagctcagtggaagctga

SEQ ID NO: 161521 - DNA, 575 bp, Homo sapiens
  Payload ID: 11532
  Gene Symbol: NDE1
  Gene Name: nudE neurodevelopment protein 1
  ENST ID: ENST00000577101
  CDS Start-End: 1-575
atgacgacctggaaagagccaagcgcgccacgatcatgtctctcgaagactttgagcagcgcttgaatcaggccatcgaaagaaatgccttcctggaaagtgaacttgatgaaaaagagaatctcctggaatctgttcagagactgaaggatgaagccagagatttgcggcaggaactggccgtgcagcagaagcaggagaaacccaggacccccatgcccagctcagtggaagctgagaggacagacacagctgtgcaggccacgggctccgtgccgtccacgcccattgctcaccgaggacccagctcaagtttaaacacacctgggagcttcagacgtggcctggacgactccaccggggggacccccctcacacctgcggcccggatatcagccctcaacattgtgggagacctactgcggaaagtcgggaggtttaacaaggtaaaccaaagggtgaaggattccagaagtggatttcctacttcctacaagcggagttggataattggtaggcactggagtccaaactcgcttcctgccggaacctcgtgtacgatcagtccccaaacc

SEQ ID NO: 161522 - DNA, 1131 bp, Homo sapiens
  Payload ID: 11532
  Gene Symbol: NDE1
  Gene Name: nudE neurodevelopment protein 1
  ENST ID: ENST00000576502
  CDS Start-End: 1-462
cccagctcagtggaagctgagaggacagacacagctgtgcaggccacgggctccgtgccgtccacgcccattgctcaccgaggacccagctcaagtttaaacacacctgggagcttcagacgtggcctggacgactccaccggggggacccccctcacacctgcggcccggatatcagccctcaacattgtgggagacctactgcggaaagtcggggcactggagtccaaactcgcttcctgccggaacctcgtgtacgatcagtccccaaaccgaacaggtggcccagcctctgggcggagcagcaagaacagagatggcggggagagacggccaagcagcaccagcgtgcctttgggtgataaggggttggggaagcgcctggaatttgggaagccgccttcacacatgtcttcatcgccgctgccgtcagcccagggggtagtcaagatgttgctttaggaaaaccacggaagctgaaggtcttggtgttggtgcggaagtcgttaccttttgtcgtctttttacactaggtttttgttttaagttagtttgagaaataagagcagtcaccatagttagttagctttgcggcccaagccaatgaccgaggccatcacctgtgctctggggtttgtccctgggaaatgtcttttcatccttacctgccaccgtgtgcattgcaaagagggacaaaaggggctctctgggaagggctctaagttgtcggtgatgaggctaccgtgttgtttttgagatagagtcttgctctgtcacccaggctggagtgtggtggcgtgatctcagctcactgcaacctccgcctcctgggttcaaacggttcttgttcctgagtcttccaggtagctgggattacaggcacccaccaccacacctggctgaattttttgtatttttaatagagacggggttttgccatgttgcccagtgtggtcttgaactcctggcctcaagtgatcctcccatctcggcctcccagaatgctgggatttcaagcatgagccatcgttcccatgccccattgtgttgcactaacccaagcggaggtcctgattggtcttttttttttttttcttttttgagacagagtcatgctcttgccctgtcttg

SEQ ID NO: 161523 - DNA, 3166 bp, Homo sapiens; identical to SEQ ID NO: 161512
  Payload ID: 11532
  Gene Symbol: NDE1
  Gene Name: nudE neurodevelopment protein 1
  Uniprot ID: Q9NXR1
  ENST ID: ENST00000619489
  CDS Start-End: 57-1064

SEQ ID NO: 161524 - DNA, 484 bp, Homo sapiens; identical to SEQ ID NO: 161518
  Payload ID: 11532
  Gene Symbol: NDE1
  Gene Name: nudE neurodevelopment protein 1
  ENST ID: ENST00000632452
  CDS Start-End: 1-420

SEQ ID NO: 161525 - DNA, 588 bp, Homo sapiens; identical to SEQ ID NO: 161517
  Payload ID: 11532
  Gene Symbol: NDE1
  Gene Name: nudE neurodevelopment protein 1
  ENST ID: ENST00000632288
  CDS Start-End: 208-588

SEQ ID NO: 161526 - DNA, 1131 bp, Homo sapiens; identical to SEQ ID NO: 161522
  Payload ID: 11532
  Gene Symbol: NDE1
  Gene Name: nudE neurodevelopment protein 1
  ENST ID: ENST00000634195
  CDS Start-End: 1-462

SEQ ID NO: 161527 - DNA, 3936 bp, Homo sapiens; identical to SEQ ID NO: 161514
  Payload ID: 11532
  Gene Symbol: NDE1
  Gene Name: nudE neurodevelopment protein 1
  Uniprot ID: Q9NXR1
  ENST ID: ENST00000631923
  CDS Start-End: 827-1834

SEQ ID NO: 161528 - DNA, 3221 bp, Homo sapiens; identical to SEQ ID NO: 161513
  Payload ID: 11532
  Gene Symbol: NDE1
  Gene Name: nudE neurodevelopment protein 1
  Uniprot ID: Q9NXR1
  ENST ID: ENST00000631844
  CDS Start-End: 112-1119

SEQ ID NO: 161529 - DNA, 843 bp, Homo sapiens; identical to SEQ ID NO: 161516
  Payload ID: 11532
  Gene Symbol: NDE1
  Gene Name: nudE neurodevelopment protein 1
  ENST ID: ENST00000632668
  CDS Start-End: 1-522

SEQ ID NO: 161530 - DNA, 575 bp, Homo sapiens; identical to SEQ ID NO: 161521
  Payload ID: 11532
  Gene Symbol: NDE1
  Gene Name: nudE neurodevelopment protein 1
  ENST ID: ENST00000633132
  CDS Start-End: 1-575

SEQ ID NO: 161531 - DNA, 411 bp, Homo sapiens; identical to SEQ ID NO: 161515
  Payload ID: 11532
  Gene Symbol: NDE1
  Gene Name: nudE neurodevelopment protein 1
  ENST ID: ENST00000631507
  CDS Start-End: 1-411

SEQ ID NO: 161532 - DNA, 915 bp, Homo sapiens; identical to SEQ ID NO: 161519
  Payload ID: 11532
  Gene Symbol: NDE1
  Gene Name: nudE neurodevelopment protein 1
  ENST ID: ENST00000632578
  CDS Start-End: 212-590

SEQ ID NO: 161533 - DNA, 762 bp, Homo sapiens; identical to SEQ ID NO: 161520
  Payload ID: 11532
  Gene Symbol: NDE1
  Gene Name: nudE neurodevelopment protein 1
  ENST ID: ENST00000631789
  CDS Start-End: 82-411

SEQ ID NO: 161534 - DNA, 2372 bp, Homo sapiens
  Payload ID: 11533
  Gene Symbol: NDEL1
  Gene Name: nudE neurodevelopment protein 1-like 1
  Uniprot ID: Q9GZM8
  ENST ID: ENST00000334527
  CDS Start-End: 198-1235
agaatggcctcggacacccaggcagtccctgacgtgtcggggaggagccgggcgcggaggtacgctgagtggagctcggggctgcgtaggggagctgagccgagcggctgggcgggcctggccgggccggcggaggggagacgtcggttgagcggcggcgaacatgcgcttttgacacattggaggctttcttgatcatggatggtgaagatataccagatttttcaagtttaaaggaggaaactgcttattggaaggaactttccttgaagtataagcaaagcttccaggaagctcgggatgagctagttgaattccaggaaggaagcagagaattagaagcagagttggaggcacaattagtacaggctgaacaaagaaatagagacttgcaggctgataaccaaagactgaaatatgaagtggaggcattaaaggagaagctagagcatcaatatgcacagagctataagcaggtctcagtgttagaagatgatttaagtcagactcgggccattaaggagcagttgcataagtatgtgagagagctggagcaggccaacgacgacctggagcgagccaaaagggcaacaatagtttcactggaagactttgaacaaaggctaaaccaggccattgaacgaaatgcatttttagaaagtgaacttgatgaaaaggaatctttgttggtctctgtacagaggttaaaggatgaagcaagagatttaaggcaagaactagcagttcgggaaagacaacaggaagtaactagaaagtcggctcctagctctccaactctagactgtgaaaagatggactccgccgtccaagcatcactttctttgccagctacccctgttggcaaaggaacggagaacacttttccttcaccgaaagctataccaaatggttttggtaccagtccactaactccctctgctaggatatcagcactaaacatcgtgggggatctcttacggaaagtaggggctttagaatccaaattagcagcttgcaggaattttgcaaaggaccaagcatcacgaaaatcctatatttcagggaatgttaactgtggggtgctgaatggcaatggcacaaagttctctcgatcagggcatacatctttcttcgacaaaggggcagtaaacggctttgaccccgctcctcctcctcctggtctgggctcctcgcgtccatcgtcagcgccgggtatgctgcctctcagtgtgtgagtgcctagcctccaggtgggggctcctgccctcctccaacaacccaggacacccacgcctcacccctcggtgcctgggcccagccccgtgcccctccgtctgcctccgcacggctggcagagggcaggctgcatgcagtggcggctactgggccctgcccagccccggaactctgcgcgatatcaatactggctattttctcttctcgccgtagtgccgttggtttcacatgattgcacttttgtgggtcgcaaggtgatacatacgtgtattacttggtcactggatgcagaagtacccattcatcacacctgccccatagcccccactctgctgtactgataggatttagttgtgttttaggacattgcaaatcttctagaagttctcccccaaatcaggtcaatgtgtgccctcctgagctcccacccaggcatctccagtgctcatgatcatgtgtcccccaactccacccctcacagtttgggcctgtttctggcaaagagtcaggaaggttactgaattagggaacattttctgcaccttctgattttacttaagcagctaccattccatggacttgcctcccagagcagcacaatgcccgtctgagccccacgtggcaggagcctctgggacggggcacacacaggcccagcctctgtgctgtctcctcctccgtgcgcctcagactcggggtgagggaggcgggcagcctctcgccagccttcccgtccttcagttcaacgacatctttggagtgtttttgttttctcttccaagggccgtcccgttgtgttaggaagggtgagtggctggttccagggtgggccggtgccagctccggggtggactgaacagcggcggctgtccctgtgcatcctttgattactctcatgctgcatttactgtttacatttgttttattgtacataggtttgtaaacattattgcctgagatatttgtatataacttgggctttgtagcttttatttattcagaacgcatacggcatgttaatgactctgatggtgtcctcctctgggcagctgtataggatcatcatgtggttacaaaaaatacttccctcaaaaaaattcttttaatgtggaaacaataaatttcacagaaaaaaa

SEQ ID NO: 161535 - DNA, 2181 bp, Homo sapiens
  Payload ID: 11533
  Gene Symbol: NDEL1
  Gene Name: nudE neurodevelopment protein 1-like 1
  ENST ID: ENST00000380025
  CDS Start-End: 159-968
gggaggagccgggcgcggaggtacgctgagtggagctcggggctgcgtaggggagctgagccgagcggctgggcgggcctggccgggccggcggaggggagacgtcggttgagcggcggcgaacatgcgcttttgacacattggaggctttcttgatcatggatggtgaagatataccagatttttcaagtttaaaggaggaaactgcttattggaaggaactttccttgaagtataagcaaagcttccaggaagctcgggatgagctagttgaattccaggaaggaagcagagaattagaagcagagttggaggcacaattagtacaggctgaacaaagaaatagagacttgcaggctgataaccaaagactgaaatatgaagtggaggcattaaaggagaagctagagcatcaatatgcacagagctataagcaggtctcagtgttagaagatgatttaagtcagactcgggccattaaggagcagttgcataagtatgtgagagagctggagcaggccaacgacgacctggagcgagccaaaagggcaacaatagtttcactggaagactttgaacaaaggctaaaccaggccattgaacgaaatgcatttttagaaagtgaacttgatgaaaaggaatctttgttggtctctgtacagaggttaaaggatgaagcaagagatttaaggcaagaactagcagttcgggaaagacaacaggaagtaactagaaagtcggctcctagctctccaactctagactgtgaaaagatggactccgccgtccaagcatcactttctttgccagctacccctgttggcaaaggaacggagaacacttttccttcaccgaaagctataccaaatggttttggtaccagtccactaactccctctgctaggatatcagcactaaacatcgtgggggatctcttacggaaagtagggggcagtaaacggctttgaccccgctcctcctcctcctggtctgggctcctcgcgtccatcgtcagcgccgggtatgctgcctctcagtgtgtgagtgcctagcctccaggtgggggctcctgccctcctccaacaacccaggacacccacgcctcacccctcggtgcctgggcccagccccgtgcccctccgtctgcctccgcacggctggcagagggcaggctgcatgcagtggcggctactgggccctgcccagccccggaactctgcgcgatatcaatactggctattttctcttctcgccgtagtgccgttggtttcacatgattgcacttttgtgggtcgcaaggtgatacatacgtgtattacttggtcactggatgcagaagtacccattcatcacacctgccccatagcccccactctgctgtactgataggatttagttgtgttttaggacattgcaaatcttctagaagttctcccccaaatcaggtcaatgtgtgccctcctgagctcccacccaggcatctccagtgctcatgatcatgtgtcccccaactccacccctcacagtttgggcctgtttctggcaaagagtcaggaaggttactgaattagggaacattttctgcaccttctgattttacttaagcagctaccattccatggacttgcctcccagagcagcacaatgcccgtctgagccccacgtggcaggagcctctgggacggggcacacacaggcccagcctctgtgctgtctcctcctccgtgcgcctcagactcggggtgagggaggcgggcagcctctcgccagccttcccgtccttcagttcaacgacatctttggagtgtttttgttttctcttccaagggccgtcccgttgtgttaggaagggtgagtggctggttccagggtgggccggtgccagctccggggtggactgaacagcggcggctgtccctgtgcatcctttgattactctcatgctgcatttactgtttacatttgttttattgtacataggtttgtaaacattattgcctgagatatttgtatataacttgggctttgtagcttttatttattcagaacgcatacggcatgttaatgactctgatggtgtcctcctctgggcagctgtataggatcatcatgtggttacaaaaaatacttccctcaaaaaaattcttttaatgtggaaacaataaatttcacagaaaaaaa

SEQ ID NO: 161536 - DNA, 1858 bp, Homo sapiens
  Payload ID: 11533
  Gene Symbol: NDEL1
  Gene Name: nudE neurodevelopment protein 1-like 1
  Uniprot ID: Q9GZM8
  ENST ID: ENST00000402554
  CDS Start-End: 151-1137
ccgggcgcggaggtacgctgagtggagctcggggctgcgtaggggagctgagccgagcggctgggcgggcctggccgggccggcggaggggagacgtcggttgagcggcggcgaacatgcgcttttgacacattggaggctttcttgatcatggatggtgaagatataccagatttttcaagtttaaaggaggaaactgcttattggaaggaactttccttgaagtataagcaaagcttccaggaagctcgggatgagctagttgaattccaggaaggaagcagagaattagaagcagagttggaggcacaattagtacaggctgaacaaagaaatagagacttgcaggctgataaccaaagactgaaatatgaagtggaggcattaaaggagaagctagagcatcaatatgcacagagctataagcaggtctcagtgttagaagatgatttaagtcagactcgggccattaaggagcagttgcataagtatgtgagagagctggagcaggccaacgacgacctggagcgagccaaaagggcaacaatagtttcactggaagactttgaacaaaggctaaaccaggccattgaacgaaatgcatttttagaaagtgaacttgatgaaaaggaatctttgttggtctctgtacagaggttaaaggatgaagcaagagatttaaggcaagaactagcagttcgggaaagacaacaggaagtaactagaaagtcggctcctagctctccaactctagactgtgaaaagatggactccgccgtccaagcatcactttctttgccagctacccctgttggcaaaggaacggagaacacttttccttcaccgaaagctataccaaatggttttggtaccagtccactaactccctctgctaggatatcagcactaaacatcgtgggggatctcttacggaaagtaggggctttagaatccaaattagcagcttgcaggaattttgcaaaggaccaagcatcacgaaaatcctatatttcagggaatgttaactgtggggtgctgaatggcaatggcacaaagttctctcgatcagggcatacatctttcttcgacaaagggcaagaaaaagtcatatttcccacgttgttcatggggcagtaaacggctttgaccccgctcctcctcctcctggtctgggctcctcgcgtccatcgtcagcgccgggtatgctgcctctcagtgtgtgagtgcctagcctccaggtgggggctcctgccctcctccaacaacccaggacacccacgcctcacccctcggtgcctgggcccagccccgtgcccctccgtctgcctccgcacggctggcagagggcaggctgcatgcagtggcggctactgggccctgcccagccccggaactctgcgcgatatcaatactggctattttctcttctcgccgtagtgccgttggtttcacatgattgcacttttgtgggtcgcaaggtgatacatacgtgtattacttggtcactggatgcagaagtacccattcatcacacctgccccatagcccccactctgctgtactgataggatttagttgtgttttaggacattgcaaatcttctagaagttctcccccaaatcaggtcaatgtgtgccctcctgagctcccacccaggcatctccagtgctcatgatcatgtgtcccccaactccacccctcacagtttgggcctgtttctggcaaagagtcaggaaggttactgaattagggaacattttctgcaccttctgattttacttaagcagctaccattccatggacttgcctcccagagcagcacaatgcccgtctgagccccacgtggcaggagcctctg

SEQ ID NO: 161537 - DNA, 588 bp, Homo sapiens
  Payload ID: 11533
  Gene Symbol: NDEL1
  Gene Name: nudE neurodevelopment protein 1-like 1
  ENST ID: ENST00000582812
  CDS Start-End: 152-588
atttcccatccttgcgtatctttggtcggacggtgattctcactcttcctattgacttctactttgtgtcagcaagttcagcgtgggccccgtatgctgccgtggatctgatcagctgaggcctgagacacaggaccaggctttcttgatcatggatggtgaagatataccagatttttcaagtttaaaggaggaaactgcttattggaaggaactttccttgaagtataagcaaagcttccaggaagctcgggatgagctagttgaattccaggaaggaagcagagaattagaagcagagttggaggcacaattagtacaggctgaacaaagaaatagagacttgcaggctgataaccaaagactgaaatatgaagtggaggcattaaaggagaagctagagcatcaatatgcacagagctataagcaggtctcagtgttagaagatgatttaagtcagactcgggccattaaggagcagttgcataagtatgtgagagagctggagcaggccaacgacgacctggagcgagccaaaagggcaacaatagtttcactggaagactttgaacaaaggctaaaccaggc

SEQ ID NO: 161538 - DNA, 577 bp, Homo sapiens
  Payload ID: 11533
  Gene Symbol: NDEL1
  Gene Name: nudE neurodevelopment protein 1-like 1
  ENST ID: ENST00000584866
  CDS Start-End: 478-577
gcggaggtacgctgagtggagctcggggctgcgtaggggagctgagccgagcggctgggcgggcctggccgggccggcggaggggagacgtcggttgagcggcggcgaacatgcgcttttgacacattggagaagaccacgtggccttaaaccaactgctgcaactctgtgtgcaggatgattctgtgggcccaagtcacccagcgcctatgctgcaaccaaaagtgcctcctgtcgctttgtatcaaaggacctttgtcatgatctcattcacaatattggtggtccctgagagtggagcagtggagtgattgacgtgcctgagtttgaagagagttaaccactggaatctctcatgttttattccctccaaaatgctgcagttcagtgttgtcccagattttatgcttgtgcttagatttctctgttctctaatttgttaagtttgtctttaatatttcacaggctttcttgatcatggatggtgaagatataccagatttttcaagtttaaaggaggaaactgcttattggaaggaactttccttgaagtataagcaaagcttccaggaagctc

SEQ ID NO: 161539 - DNA, 602 bp, Homo sapiens
  Payload ID: 11533
  Gene Symbol: NDEL1
  Gene Name: nudE neurodevelopment protein 1-like 1
  ENST ID: ENST00000582490
  CDS Start-End: 387-602
acgctgagtggagctcggggctgcgtaggggagctgagccgagcggctgggcgggcctggccgggccggcggaggggagacgtcggttgagcggcggcgaacatgcgcttttgacacattggagaagaccacgtggccttaaaccaactgctgcaactctgtgtgcaggatgattctgtgggcccaagtcacccagcgcctatgctgcaaccaaaagtgcctcctgtcgctttgtatcaaaggacctttgtcatgatctcattcacaatattggtggtccctgagagtggagcagtggagtgattgacgtgcctgagtttgaagagagttaaccactggaatctctcatgttttattccctccaaaatgctgcagctttcttgatcatggatggtgaagatataccagatttttcaagtttaaaggaggaaactgcttattggaaggaactttccttgaagtataagcaaagcttccaggaagctcgggatgagctagttgaattccaggaaggaagcagagaattagaagcagagttggaggcacaattagtacaggctgaacaaagaaatagagacttgcaggctgataaccaaagactg

SEQ ID NO: 161540 - DNA, 790 bp, Homo sapiens
  Payload ID: 11533
  Gene Symbol: NDEL1
  Gene Name: nudE neurodevelopment protein 1-like 1
  ENST ID: ENST00000580012
  CDS Start-End: 614-790
cggcgccgaggcctgcccttggggagccttcccggcccggggccgtgtctgaggctccgccggggcgggccgggccgggttccggggcggccagcctgggggcaactgttccaaccgctctaactgtcccctcccttccctggtccgatgtgtggccccccaggggcgcctgcaagggaacgattccggtggcctccggaagatgtgccccgttccgggtagggtgagggctggcggtgacggaggccgggacgtggcaccgtgggctggggcgctggcggcgcaaggagtggcccagtcggaggtggcagcggcgcgcccagcccgcctcctcctaccccctcttcgaaattccttcatttgcgagggtggcttggagcggggttgcattttgatctctcagtgcctctctcccatggggggcgagagcgcgagcagcccacgttgggctcggattggcattctcctgactcccgcccggaactgctaatcatcctccccctggagttcggcaaagtgtcaccaacgggctcgggttacttgtgctcgactcttttcttgctgtaagccatgagatgaccctttaagttttgcaaaggaggctttcttgatcatggatggtgaagatataccagatttttcaagtttaaaggaggaaactgcttattggaaggaactttccttgaagtataagcaaagcttccaggaagctcgggatgagctagttgaattccaggaaggaagcagagaattagaagcagagttggaggcacaattagtacaggctgaa

SEQ ID NO: 161541 - DNA, 555 bp, Homo sapiens
  Payload ID: 11533
  Gene Symbol: NDEL1
  Gene Name: nudE neurodevelopment protein 1-like 1
  ENST ID: ENST00000582665
  CDS Start-End: 81-555
gtgcgtcacagaatggcctcggacacccaggcagtccctgacgtgtcggggaggagccgggcgcggaggctttcttgatcatggatggtgaagatataccagatttttcaagtttaaaggaggaaactgcttattggaaggaactttccttgaagtataagcaaagcttccaggaagctcgggatgagctagttgaattccaggaaggaagcagagaattagaagcagagttggaggcacaattagtacaggctgaacaaagaaatagagacttgcaggctgataaccaaagactgaaatatgaagtggaggcattaaaggagaagctagagcatcaatatgcacagagctataagcaggtctcagtgttagaagatgatttaagtcagactcgggccattaaggagcagttgcataagtatgtgagagagctggagcaggccaacgacgacctggagcgagccaaaagggcaacaatagtttcactggaagactttgaacaaaggctaaaccaggccattgaacgaaatgcatttttagaaagtgaacttgatg

SEQ ID NO: 161542 - DNA, 454 bp, Homo sapiens
  Payload ID: 11533
  Gene Symbol: NDEL1
  Gene Name: nudE neurodevelopment protein 1-like 1
  ENST ID: ENST00000585098
  CDS Start-End: 165-422
gtgtcggggaggagccgggcgcggaggtacgctgagtggagctcggggctgcgtaggggagctgagccgagcggctgggcgggcctggccgggccggcggaggggagacgtcggttgagcggcggcgaacatgcgcttttgacacattggaggctttcttgatcatggatggtgaagatataccagatttttcaagtttaaaggaggaaactgcttattggaaggaactttccttgaagtataagcaaagcttccaggaagctcgggatgagctagttgaattccaggaaggaagcagagaattagaagcagagttggaggcacaattagtacaggctgcatgcagtggcggctactgggccctgcccagccccggaactctgcgcgatatcaatactggctattttctcttctcgccgtagtgccgttggtttcacatgattgcacttttgtg

SEQ ID NO: 161543 - DNA, 577 bp, Homo sapiens
  Payload ID: 11533
  Gene Symbol: NDEL1
  Gene Name: nudE neurodevelopment protein 1-like 1
  ENST ID: ENST00000580237
  CDS Start-End: 88-318
tgtgtcagcaagttcagcgtgggccccgtatgctgccgtggatctgatcagctgaggcctgagacacaggaccaggctttcttgatcatggatggtgaagatataccagatttttcaagtttaaaggaggaaactgcttattggaaggaactttccttgaagtataagcaaagtaggcggggccatctttggcccgttttgcatgcactgattctgcctcatcattttggtcatttggagattctgataagctgtctggggctccatagaacagactttacgttctcctcagcttccaggaagctcgggatgagctagttgaattccaggaaggaagcagagaattagaagcagagttggaggcacaattagtacaggctgaacaaagaaatagagacttgcaggctgataaccaaagactgaaatatgaagtggaggcattaaaggagaagctagagcatcaatatgcacagagctataagcaggtctcagtgttagaagatgatttaagtcagactcgggccattaaggagcagttgcataagtatgtgagagagctggagcaggccaacgacga

SEQ ID NO: 161544 - DNA, 749 bp, Homo sapiens
  Payload ID: 11533
  Gene Symbol: NDEL1
  Gene Name: nudE neurodevelopment protein 1-like 1
  ENST ID: ENST00000582277
  CDS Start-End: 1-589
acgaaatgcatttttagaaagtgaacttgatgaaaaggaatctttgttggtctctgtacagaggttaaaggatgaagcaagagatttaaggcaagaactagcagttcgggaaagacaacaggaagtaactagaaagtcggctcctagctctccaactctagactgtgaaaagatggactccgccgtccaagcatcactttctttgccagctacccctgttggcaaaggaacggagaacacttttccttcaccgaaagctataccaaatggttttggtaccagtccactaactccctctgctaggatatcagcactaaacatcgtgggggatctcttacggaaagtaggggctttagaatccaaattagcagcttgcaggaattttgcaaaggaccaagcatcacgaaaatcctatatttcagggaatgttaactgtggggtgctgaatggcaatggcacaaagttctctcgatcagggcatacatctttcttcgacaaaggcagagcaggtacaactctagaaacgctcacaatctctgaaagcagctgggattttctgccgtcctcaataattatggcacatgtgtaaaggagcagattcgacacacggtgcactctgaataggctcttatccttgcagtggagtgttttggttgatctctgtccctgattttaccctggagaatatacatttcattaaggattttgtattaaaagcacatcctaaaacatcactatacaaattagaa

SEQ ID NO: 161545 - DNA, 582 bp, Homo sapiens
  Payload ID: 11533
  Gene Symbol: NDEL1
  Gene Name: nudE neurodevelopment protein 1-like 1
  ENST ID: ENST00000581679
  CDS Start-End: 1-582
tttaaggcaagaactagcagttcgggaaagacaacaggaagtaactagaaagtcggctcctagctctccaactctagactgtgaaaagatggactccgccgtccaagcatcactttctttgccagctacccctgttggcaaaggaacggagaacacttttccttcaccgaaagctataccaaatggttttggtaccagtccactaactccctctgctaggatatcagcactaaacatcgtgggggatctcttacggaaagtaggggctttagaatccaaattagcagcttgcaggaattttgcaaaggaccaagcatcacgaaaatcctatatttcagggaatgttaactgtggggtgctgaatggcaatggcacaaagttctctcgatcagggcatacatctttcttcgacaaaggatgtgttctaacacgaatgaacaggatactgacccagagctgggctttgagagcctgcaccccttgttgtggaggccgcaccctctgccctacctgtttgatcagcagccgcttcttctcttcattctgctcatccctggtttgcaggtctctctcgaactgcgc

SEQ ID NO: 161546 - DNA, 771 bp, Homo sapiens
  Payload ID: 11534
  Gene Symbol: NUDT1
  Gene Name: nudix (nucleoside diphosphate linked moiety X)-type motif 1
  Uniprot ID: P36639
  ENST ID: ENST00000343985
  CDS Start-End: 88-627
agggctttctgtatccctaggtttcttgccttgatgtactggagcaatcagatcacacggcggcttggagagtgagtgcaaggttttatgagtggaattagccctcagcagatgggggagccagaaggcagttggagtgggaagaacccagggaccatgggcgcctccaggctctataccctggtgctggtcctgcagcctcagcgagttctcctgggcatgaaaaagcgaggcttcggggccggccggtggaatggctttgggggcaaagtgcaagaaggagagaccatcgaggatggggctaggagggagctgcaggaggagagcggtctgacagtggacgccctgcacaaggtgggccagatcgtgtttgagttcgtgggcgagcctgagctcatggacgtgcatgtcttctgcacagacagcatccaggggacccccgtggagagcgacgaaatgcgcccatgctggttccagctggatcagatccccttcaaggacatgtggcccgacgacagctactggtttccactcctgcttcagaagaagaaattccacgggtacttcaagttccagggtcaggacaccatcctggactacacactccgcgaggtggacacggtctagcgggagcccagggcagcccctgggcaggagacgtggctgctgaacagccgcaaaccatcttcacctgggggcattgagtggcgcagagccgggtttcatctggaattaactggatggaagggaaaataaagctatctagcggtg

SEQ ID NO: 161547 - DNA, 698 bp, Homo sapiens
  Payload ID: 11534
  Gene Symbol: NUDT1
  Gene Name: nudix (nucleoside diphosphate linked moiety X)-type motif 1
  Uniprot ID: P36639
  ENST ID: ENST00000339737
  CDS Start-End: 84-554
agggctttctgtatccctaggtttcttgccttgatgtactggagcaatcagatcacacggcggcttggagaaacccagggaccatgggcgcctccaggctctataccctggtgctggtcctgcagcctcagcgagttctcctgggcatgaaaaagcgaggcttcggggccggccggtggaatggctttgggggcaaagtgcaagaaggagagaccatcgaggatggggctaggagggagctgcaggaggagagcggtctgacagtggacgccctgcacaaggtgggccagatcgtgtttgagttcgtgggcgagcctgagctcatggacgtgcatgtcttctgcacagacagcatccaggggacccccgtggagagcgacgaaatgcgcccatgctggttccagctggatcagatccccttcaaggacatgtggcccgacgacagctactggtttccactcctgcttcagaagaagaaattccacgggtacttcaagttccagggtcaggacaccatcctggactacacactccgcgaggtggacacggtctagcgggagcccagggcagcccctgggcaggagacgtggctgctgaacagccgcaaaccatcttcacctgggggcattgagtggcgcagagccgggtttcatctggaattaactggatggaagggaaaataaagctatctagcggtg

SEQ ID NO: 161548 - DNA, 662 bp, Homo sapiens
  Payload ID: 11534
  Gene Symbol: NUDT1
  Gene Name: nudix (nucleoside diphosphate linked moiety X)-type motif 1
  Uniprot ID: P36639
  ENST ID: ENST00000356714
  CDS Start-End: 48-518
ggtcagaggccacgcccccggaagcggcggtgcagaacccagggaccatgggcgcctccaggctctataccctggtgctggtcctgcagcctcagcgagttctcctgggcatgaaaaagcgaggcttcggggccggccggtggaatggctttgggggcaaagtgcaagaaggagagaccatcgaggatggggctaggagggagctgcaggaggagagcggtctgacagtggacgccctgcacaaggtgggccagatcgtgtttgagttcgtgggcgagcctgagctcatggacgtgcatgtcttctgcacagacagcatccaggggacccccgtggagagcgacgaaatgcgcccatgctggttccagctggatcagatccccttcaaggacatgtggcccgacgacagctactggtttccactcctgcttcagaagaagaaattccacgggtacttcaagttccagggtcaggacaccatcctggactacacactccgcgaggtggacacggtctagcgggagcccagggcagcccctgggcaggagacgtggctgctgaacagccgcaaaccatcttcacctgggggcattgagtggcgcagagccgggtttcatctggaattaactggatggaagggaaaataaagctatctagcggtg

SEQ ID NO: 161549 - DNA, 712 bp, Homo sapiens
  Payload ID: 11534
  Gene Symbol: NUDT1
  Gene Name: nudix (nucleoside diphosphate linked moiety X)-type motif 1
  Uniprot ID: P36639
  ENST ID: ENST00000397046
  CDS Start-End: 98-568
acgaaaagcgcgcgcggggattccaggagtcgtggtttcttgccttgatgtactggagcaatcagatcacacggcggcttggagaaacccagggaccatgggcgcctccaggctctataccctggtgctggtcctgcagcctcagcgagttctcctgggcatgaaaaagcgaggcttcggggccggccggtggaatggctttgggggcaaagtgcaagaaggagagaccatcgaggatggggctaggagggagctgcaggaggagagcggtctgacagtggacgccctgcacaaggtgggccagatcgtgtttgagttcgtgggcgagcctgagctcatggacgtgcatgtcttctgcacagacagcatccaggggacccccgtggagagcgacgaaatgcgcccatgctggttccagctggatcagatccccttcaaggacatgtggcccgacgacagctactggtttccactcctgcttcagaagaagaaattccacgggtacttcaagttccagggtcaggacaccatcctggactacacactccgcgaggtggacacggtctagcgggagcccagggcagcccctgggcaggagacgtggctgctgaacagccgcaaaccatcttcacctgggggcattgagtggcgcagagccgggtttcatctggaattaactggatggaagggaaaataaagctatctagcggtg

SEQ ID NO: 161550 - DNA, 783 bp, Homo sapiens
  Payload ID: 11534
  Gene Symbol: NUDT1
  Gene Name: nudix (nucleoside diphosphate linked moiety X)-type motif 1
  Uniprot ID: P36639
  ENST ID: ENST00000397048
  CDS Start-End: 100-639
gaaaagcgcgcgcggggattccaggagtcgtggtttcttgccttgatgtactggagcaatcagatcacacggcggcttggagagtgagtgcaaggttttatgagtggaattagccctcagcagatgggggagccagaaggcagttggagtgggaagaacccagggaccatgggcgcctccaggctctataccctggtgctggtcctgcagcctcagcgagttctcctgggcatgaaaaagcgaggcttcggggccggccggtggaatggctttgggggcaaagtgcaagaaggagagaccatcgaggatggggctaggagggagctgcaggaggagagcggtctgacagtggacgccctgcacaaggtgggccagatcgtgtttgagttcgtgggcgagcctgagctcatggacgtgcatgtcttctgcacagacagcatccaggggacccccgtggagagcgacgaaatgcgcccatgctggttccagctggatcagatccccttcaaggacatgtggcccgacgacagctactggtttccactcctgcttcagaagaagaaattccacgggtacttcaagttccagggtcaggacaccatcctggactacacactccgcgaggtggacacggtctagcgggagcccagggcagcccctgggcaggagacgtggctgctgaacagccgcaaaccatcttcacctgggggcattgagtggcgcagagccgggtttcatctggaattaactggatggaagggaaaataaagctatctagcggtg

SEQ ID NO: 161551 - DNA, 714 bp, Homo sapiens
  Payload ID: 11534
  Gene Symbol: NUDT1
  Gene Name: nudix (nucleoside diphosphate linked moiety X)-type motif 1
  Uniprot ID: P36639
  ENST ID: ENST00000397049
  CDS Start-End: 100-570
cagagcacgtccccttcctcctggcccctggcacgtgcttcctccacgcacgtcatggctgactctgccctctcaccttcctttcagaacccagggaccatgggcgcctccaggctctataccctggtgctggtcctgcagcctcagcgagttctcctgggcatgaaaaagcgaggcttcggggccggccggtggaatggctttgggggcaaagtgcaagaaggagagaccatcgaggatggggctaggagggagctgcaggaggagagcggtctgacagtggacgccctgcacaaggtgggccagatcgtgtttgagttcgtgggcgagcctgagctcatggacgtgcatgtcttctgcacagacagcatccaggggacccccgtggagagcgacgaaatgcgcccatgctggttccagctggatcagatccccttcaaggacatgtggcccgacgacagctactggtttccactcctgcttcagaagaagaaattccacgggtacttcaagttccagggtcaggacaccatcctggactacacactccgcgaggtggacacggtctagcgggagcccagggcagcccctgggcaggagacgtggctgctgaacagccgcaaaccatcttcacctgggggcattgagtggcgcagagccgggtttcatctggaattaactggatggaagggaaaataaagctatctagcggtg

SEQ ID NO: 161552 - DNA, 822 bp, Homo sapiens
  Payload ID: 11534
  Gene Symbol: NUDT1
  Gene Name: nudix (nucleoside diphosphate linked moiety X)-type motif 1
  ENST ID: ENST00000454650
  CDS Start-End: 712-822
gattccaggagtcgtggtgaccagggaggggagccgggccagcgggcggcaggagactaggggagctgagccatgggcttgggggagagcggggccgggagctcgaaggagaccagaagagcagggtcgggggctcgagggagacgaggagagcggggccgggggtttgggagagagacaaggagagcggggcggaggcttgggggagaccaggagtaaatcacaaaaatttactttggaaaccgtggcttctggcagaaacagatcagtgtcgggacaaagtacacgggcctggtgtgaaactaagccacaaacccatttaccctgtctgacctgcctccgccaccaggacccagtctcagtgaaatgggaaaggttcccttgtcctcctcgaagggcgtgcgatgaggatgtggctcacttcttcagtgccccgcttctcaagcctctaggggaacatacagacaggcaggctgaggggctcccaccccacggcagtgtctaggggtgaatgtttgcagctcctgaagccccagcaggcatgtgttagagggtgctctttcagtttagccttgtaggtggcttgtgttagtcagctgttagactccctgccttatcgcaaggacagagggctttctgtatccctaggtttcttgccttgatgtactggagcaatcagatcacacggcggcttggagaaacccagggaccatgggcgcctccaggctctataccctggtgctggtcctgcagcctcagcgagttctcctgggcatgaaaaagcgaggcttcggggccggccggtggaatggctttgggggc

SEQ ID NO: 161553 - DNA, 1917 bp, Homo sapiens
  Payload ID: 11535
  Gene Symbol: NUDT10
  Gene Name: nudix (nucleoside diphosphate linked moiety X)-type motif 10
  Uniprot ID: Q8NFP7
  ENST ID: ENST00000356450
  CDS Start-End: 137-631
gacggaggcgcctctctctccccgcccctctcctcggccctttctcttcccagcacctcggctgctgcccggcagcggcagcagctgcgtcggcggcccacacagcagcgagaggcgagaggaggctgcctcgaggatgaagtgcaaacccaaccagacacggacctacgaccccgaggggttcaagaagcgggcggcgtgcctgtgcttccggagcgagcgcgaggacgaggtcctgttagtgagtagcagccggtacccggaccgctggatcgtgccgggcgggggcatggagcccgaggaggagccgggcggtgcggcggtccgagaggtgtacgaagaggcgggagtcaaggggaagttaggccggctcctgggcgtcttcgaacagaaccaggaccccaagcacagaacgtacgtgtatgtactgactgtcacggagctgctggaggattgggaagattcggttagcattgggaggaagcgagagtggttcaaagtcgaagatgccatcaaggttctccagtgccacaagcccgtgcacgccgaatatctggagaaactaaagctgggcggttccccaaccaatggaaactccatggccccatcctcgccagatagcgatccctagtgaatggcatagatgttgttcagatttactttgaaagaatcaagtatgtgaatggatggatgaatggaattgtgaagcacagatgagctctttcacactccaaggacacagctcatcctatgcttttggacacttcttccctgtttattacaatgactattctccaggttgttgcactaccgctgtatctgtacataattctaacttggcacctgtggccttttttgtgctcttatgtgtctgtatttcccggcagagtatacgcccttgaatgccaggaacttgtttccttagtcttttttatatatctagcatataagatattgcttagaatatggtagacatcactgaagatttgtttcagtagttcatattttgtaatgatactgaatggttaaacaatccctttctaatctgtctagcatatatgtgacttttgtttatcaagtgtcacacaactgcttcaaggcagctgtgagatactagaaagcaaaaattcttactcctatgtctgtgtcatcccagatgtgtgcctccagatggcagtatactacactatctgtaaaatatatttgcaaagccaggcacagtgttacgcgtctgcctcaggaggctgaggcagaagaatagcttgagcccaggagctttagtctagcctgagcaatataatgagactccgtctcttaaaatatttgcccaaacattgaacctaaatttgaccatgcccctagaaataattcctaatctttagaaaatagggcagagaaacattattttacaccatggagatgagatcagcagaatccagactataagaaactacaggacacatgacctagtttcttctgtaaataacttgcaaggatgaaagatggaggatgaacctatagatttaaagagacttaagagacatattaaccaattgttaattggatcttatttgaattgtgatttgaccgaactgtaaaacgaatacatttatgagacaatcggggtaatttgaacattggtggggtatttggtattagaataatggttttatcattatgttagaaagaagggtcctcatctacattctcaaacatctgtggctgatatgatatgattcttggaatttgcttcaaaataataagtctggatgttaagtgcattggaaatattgatgaaacgaaattggccttgataattgttgaagctgggtgatggctaaaatgatggttcattatatatgttcatctctatttttgtatgtttggcattttccgtaataaagtttataaaaataa

SEQ ID NO: 161554 - DNA, 2001 bp, Homo sapiens
  Payload ID: 11535
  Gene Symbol: NUDT10
  Gene Name: nudix (nucleoside diphosphate linked moiety X)-type motif 10
  Uniprot ID: Q8NFP7
  ENST ID: ENST00000376006
  CDS Start-End: 221-715
tgagtaagccagaatggttgatagtgggggaggatgatgacgacgctgcctttgcccctgtcttgtgtgaaacaactgcctgtgggtttcctgcagcgcagtggggagtgagaggagaaacgtcctgccgtgccacacacctcggctgctgcccggcagcggcagcagctgcgtcggcggcccacacagcagcgagaggcgagaggaggctgcctcgaggatgaagtgcaaacccaaccagacacggacctacgaccccgaggggttcaagaagcgggcggcgtgcctgtgcttccggagcgagcgcgaggacgaggtcctgttagtgagtagcagccggtacccggaccgctggatcgtgccgggcgggggcatggagcccgaggaggagccgggcggtgcggcggtccgagaggtgtacgaagaggcgggagtcaaggggaagttaggccggctcctgggcgtcttcgaacagaaccaggaccccaagcacagaacgtacgtgtatgtactgactgtcacggagctgctggaggattgggaagattcggttagcattgggaggaagcgagagtggttcaaagtcgaagatgccatcaaggttctccagtgccacaagcccgtgcacgccgaatatctggagaaactaaagctgggcggttccccaaccaatggaaactccatggccccatcctcgccagatagcgatccctagtgaatggcatagatgttgttcagatttactttgaaagaatcaagtatgtgaatggatggatgaatggaattgtgaagcacagatgagctctttcacactccaaggacacagctcatcctatgcttttggacacttcttccctgtttattacaatgactattctccaggttgttgcactaccgctgtatctgtacataattctaacttggcacctgtggccttttttgtgctcttatgtgtctgtatttcccggcagagtatacgcccttgaatgccaggaacttgtttccttagtcttttttatatatctagcatataagatattgcttagaatatggtagacatcactgaagatttgtttcagtagttcatattttgtaatgatactgaatggttaaacaatccctttctaatctgtctagcatatatgtgacttttgtttatcaagtgtcacacaactgcttcaaggcagctgtgagatactagaaagcaaaaattcttactcctatgtctgtgtcatcccagatgtgtgcctccagatggcagtatactacactatctgtaaaatatatttgcaaagccaggcacagtgttacgcgtctgcctcaggaggctgaggcagaagaatagcttgagcccaggagctttagtctagcctgagcaatataatgagactccgtctcttaaaatatttgcccaaacattgaacctaaatttgaccatgcccctagaaataattcctaatctttagaaaatagggcagagaaacattattttacaccatggagatgagatcagcagaatccagactataagaaactacaggacacatgacctagtttcttctgtaaataacttgcaaggatgaaagatggaggatgaacctatagatttaaagagacttaagagacatattaaccaattgttaattggatcttatttgaattgtgatttgaccgaactgtaaaacgaatacatttatgagacaatcggggtaatttgaacattggtggggtatttggtattagaataatggttttatcattatgttagaaagaagggtcctcatctacattctcaaacatctgtggctgatatgatatgattcttggaatttgcttcaaaataataagtctggatgttaagtgcattggaaatattgatgaaacgaaattggccttgataattgttgaagctgggtgatggctaaaatgatggttcattatatatgttcatctctatttttgtatgtttggcattttccgtaataaagtttataaaaataa

SEQ ID NO: 161555 - DNA, 2385 bp, Homo sapiens
  Payload ID: 11536
  Gene Symbol: NUDT11
  Gene Name: nudix (nucleoside diphosphate linked moiety X)-type motif 11
  Uniprot ID: Q96G61
  ENST ID: ENST00000375992
  CDS Start-End: 153-647
gggcagacggaggcgcctctctttccccgcccctcgcctcggccctttctcttcccagcacctcggctgttccccggcggcggcagcggcagcggcggcccacacagcagcgagaggcgagaggaggctgcctcgaggaggctgcctcgaggatgaagtgcaaacccaaccagacgcggacctacgaccccgaggggttcaagaagcgggcggcgtgcctgtgcttccggagcgaacgcgaggacgaggtcctgttagtgagtagcagccggtacccggaccgctggatcgtgccgggcgggggcatggagcccgaggaggagccgggcggtgcggcggtccgagaggtgtacgaagaagcgggagtcaaggggaagttaggccggctcctgggcgtcttcgaacagaaccaggatcgcaagcacagaacgtacgtgtatgtactgactgtcacggagctgctggaggattgggaagattcggttagcattgggaggaagcgagagtggttcaaagtcgaagatgccatcaaggttctccagtgccacaagcccgtgcacgccgaatatctggagaaactaaagctgggcggttccccaaccaatggaaactccatggccccatcctcgccagatagcgatccctaatgaacagcaaagatgttcagtattgtgctgaaagaaacattgatgtgaacccagtgatcagtggaattgtcaagtacaggtgagcacttctgtgttcccaagaagacagctcatctggtttcttcctgcatcttgggacactccttccctgtctataccactgactcttgctctggttgttgtactcttatacgtgaatagactcttaattcagcacctatagccttttgttgtgcttttttgatgtgtctgccttcattagactatgatgtctttgagagcaaagactatttttccttactctttgcatattctgcatctgagacactacttgaaatatggttggcatcactgaaggttctttgattcaattaatattttgtaatcaccgtgtggcaaaacattccccttccaatctggtgctagtagagtatatgctatctaggcaccatgtgtgtggcttttgtgtatcaggtgtttcagaaatatttcaagacagttgtaagatgtttgaggacaagaattattactcctatttctatgtcataccacacagtagctgcacagttttaagattatgccatcacctagggtaatgttttgtagaatcagtccttcgtgtaacaactctagtgtttttgtactgttgatgatttgcttaaattttattcaaaaactatcacttgctataaaggtaattgtaaaaataaatacagtggacgcaaaataatgttgtgagtttttataaaaataaattttaaaatgatatataagacatttttttgcaatgcctgccctaaccacttcttacatgtcatcttaacatctctttgaggaaacactgtttcctcattttacagatttaacatactgtattatttgatgccagagccaacaggctatatcataggcagtttccaaacttaattatgccatttagtttgtctagatttcttttgcctctctcactgatccatttggctgtagttttcatcccttttccagtacacacagctagctcctcatcctacctggtttctgcatatgagaatgcagagggctgagagagggcaaaattgttgtcatttagaaaaggcatttaggaaagaggctgctattagaggggaacacaaagtgaaggtttttttaaaaaagaggacttgcatcagctgcctccagaacaattttaagaaaataacaaagatgtttagaagaaatcttacggagtttgccatgggatgtgtgatatcagcagtcttcagctccttacaaattaccaaaagtggttctaatatgctagtttgtttgattttttcttttatattataaagcaattgcatcgataaaagcttggactccattttagtgtgacactcttcctcatgataccagtgaaatgtattgattgtgtccccagttgttacataatttgaaataaaaatataacttcttgatttattgttttttaagatgtgatatggtactgtggttatgttgttttaaaaaatgattatcttttagagaagtatactgaaaaatgtacaggtgaaatgatatgttactggtattcgcttcaaaatcatctgagtgtggggtaattgagtacatagatgaaacaagattggccataaattggtaattgctgaagctgtgtgatggatgtttgagagttcattatactattctctatacttttgtatatgtttgaaattttccataataaaaattgaaaaaagta

SEQ ID NO: 161556 - DNA, 3492 bp, Homo sapiens
  Payload ID: 11537
  Gene Symbol: NUDT12
  Gene Name: nudix (nucleoside diphosphate linked moiety X)-type motif 12
  Uniprot ID: Q9BQG2
  ENST ID: ENST00000230792
  CDS Start-End: 98-1486
cgggaagactgcatccggctccaggaaaagcgagtgggatatcccaatctttggactgcatcctggttgcctctactgtggtcacctttgggaagaaatgtcttctgtaaaaagaagtctgaagcaagaaatagttactcagtttcactgttcagctgctgaaggagatattgccaagttaacaggaatactcagtcattctccatctcttctcaatgaaacttctgaaaatggctggactgctttaatgtatgcggcaaggaatgggcacccagagatagtccaatttctgcttgagaaagggtgtgacagatcaattgtcaataaatcaaggcagactgcactggacattgctgtattttggggttataagcatatagctaatttactagctactgctaaaggtgggaagaagccttggttcctaacgaatgaagtggaagaatgtgaaaattattttagcaaaacactactggaccggaaaagtgaaaagagaaataattctgactggctgctagctaaagaaagccatccagccacagtttttattcttttctcagatttaaatcccttggttactctaggtggcaataaagaaagtttccaacagccagaagttaggctttgtcagctgaactacacagatataaaggattatttggcccagcctgagaagatcaccttgatttttcttggagtagaacttgaaataaaagacaaactacttaattatgctggtgaagtcccgagagaggaggaagatggattggttgcctggtttgctctaggtatagatcctattgctgctgaagaattcaagcaaagacatgaaaattgttactttcttcatcctcctatgccagcccttctgcaattgaaagaaaaagaagctggggttgtagctcaagcaagatctgttcttgcctggcacagtcgatacaagttttgcccaacctgtggaaatgcaactaaaattgaagaaggtggctataagagattatgtttaaaagaagactgtcctagtctcaatggcgtccataatacctcatacccaagagttgatccagtagtaatcatgcaagttattcatccagatgggaccaaatgccttttaggcaggcagaaaagatttcccccaggcatgtttacttgccttgctggatttattgagcctggagagacaatagaagatgctgttaggagagaagtagaagaggaaagtggagtcaaagttggccatgttcagtatgttgcttgtcaaccatggccaatgccttcctccttaatgattggttgcttagctctagcagtgtctacagaaattaaagttgacaagaatgaaatagaggatgcccgctggttcactagagaacaggtcctggatgttctgaccaaagggaagcagcaggcattctttgtgccaccaagccgagctattgcacatcaattaatcaaacactggattagaataaatcctaatctctaaatctaagaactaagctttgagtattatttaataatttctaataacactcattcctcaagtgatattagagattattcagtactcttgagagtgtcacaacacaaaatacgatgttgggttttcgaaatattttcaaagtgttctgtcttaatcacaaattcatatttttacacatttttacaatattgcctcagattatgttaaatttgggtcagtcttctctgaactttttctctcttggtttcttttcttccttcacagttttatctcacaaaaccatttttctaataagagacatcatgttggaaagatgttctagaaatgtgcataaatttcagtgcctcttgtaagcattaaactgatgatgaagaaagttcctgatttgagaaatgaatcaaagtaattttaatgaatttttagcttgtattagcttgagttagctggcattgattttttagtccttttgttacctttaagttgtcaatatatggtttttgttcatctccccattgtagtcccacttgctctttcctgggggttccattgttctagcagtggaggtgttatagtgtcgccactcgtctaatttgaccagtgttaagaattttctaatttaataatttaatagtgatctcaataccacaccctcatggaaggagaaaagcatactattatatctgggacctctcttttagacctaaaattaattaacatatctacttatatgttacttatacctaaagctgttattaagacaaaccaagattctctgcttttgcactgaaattaaacttgaaaggaattctcctcaaaggtcggatattaaataagtcccaggcagatttacatatttaatttaaaacattggctttatttcattttgtgatgagtgatgtatctgtgttaacaaaaaattgtataatcattaccaatactatttattatgctcaaatatatcttggctttgaccttatttcaacacattctaagaagccttgacaaagtaagtatattttagagctgaatcagtaagattctagagaaagcaaaacatagtagttcacaattttgcaacatagaaagtcacattttgaaaggctattttgaaattgatttaatagctattatagtttatgaatatcaaaatttgtataatttgcatctttactaatgtatgctagagctacaagagaccttaaggataatatatgaaattagctttccttattttatagataaggaaaaagaaattgtgaaaggtgaatttacctaattagtgaaagttacataactaattacaacagtctgtactatataatgcagaggacgattctccctgtaaaaggaactagaagctattactaaaaatatatatagacaaaattaaaagaaggaatgataagaataaatttaatttaccaaatattgttaattaaaattttagatacttaacatttatttaacttaaataaaagataactgtcagataaaactttattttactaatgagcagtgattttcttaggaattgatgaaggcttattggtatcaagaatttaaaccaaattaaaactgacagaggacatttagatacataataaaattcgagctacataagtatatggaaaataatgtaccttgattattatgaaatagagcatcttgaaattcagttttactctaaatgtacttttaatacttgcagattctaagattacattgtaaaattccaggttttcataatgttaaaataggaaagtagaatataaagtatcaacaagtgtagttatacattttgttttggatatttaatccttacttgggaaaaaatcagcatctaggtaaattattattttaataacaactcttaaattgccaacctctgagaggtgaaaagctatgtaaatagaaggaatggccagttcaaaagaatagtagatgtgatagtgccgtgaatgtattctactggaaatgaatgtaataatacattaaatttttaaaatcta

SEQ ID NO: 161557 - DNA, 1781 bp, Homo sapiens
  Payload ID: 11537
  Gene Symbol: NUDT12
  Gene Name: nudix (nucleoside diphosphate linked moiety X)-type motif 12
  ENST ID: ENST00000507423
  CDS Start-End: 94-1428
aagactgcatccggctccaggaaaagcgagtgggatatcccaatctttggactgcatcctggttgcctctactgtggtcacctttgggaagaaatgtcttctgtaaaaagaagtctgaagcaagaaatagttactcagtttcactgttcagctgctgaaggagatattgccaagttaacaggaatactcagtcattctccatctcttctcaatgaaacttctgaaaatggctggactgctttaatgtgtgacagatcaattgtcaataaatcaaggcagactgcactggacattgctgtattttggggttataagcatatagctaatttactagctactgctaaaggtgggaagaagccttggttcctaacgaatgaagtggaagaatgtgaaaattattttagcaaaacactactggaccggaaaagtgaaaagagaaataattctgactggctgctagctaaagaaagccatccagccacagtttttattcttttctcagatttaaatcccttggttactctaggtggcaataaagaaagtttccaacagccagaagttaggctttgtcagctgaactacacagatataaaggattatttggcccagcctgagaagatcaccttgatttttcttggagtagaacttgaaataaaagacaaactacttaattatgctggtgaagtcccgagagaggaggaagatggattggttgcctggtttgctctaggtatagatcctattgctgctgaagaattcaagcaaagacatgaaaattgttactttcttcatcctcctatgccagcccttctgcaattgaaagaaaaagaagctggggttgtagctcaagcaagatctgttcttgcctggcacagtcgatacaagttttgcccaacctgtggaaatgcaactaaaattgaagaaggtggctataagagattatgtttaaaagaagactgtcctagtctcaatggcgtccataatacctcatacccaagagttgatccagtagtaatcatgcaagttattcatccagatgggaccaaatgccttttaggcaggcagaaaagatttcccccaggcatgtttacttgccttgctggatttattgagcctggagagacaatagaagatgctgttaggagagaagtagaagaggaaagtggagtcaaagttggccatgttcagtatgttgcttgtcaaccatggccaatgccttcctccttaatgattggttgcttagctctagcagtgtctacagaaattaaagttgacaagaatgaaatagaggatgcccgctggttcactagagaacaggtcctggatgttctgaccaaagggaagcagcaggcattctttgtgccaccaagccgagctattgcacatcaattaatcaaacactggattagaataaatcctaatctctaaatctaagaactaagctttgagtattatttaataatttctaataacactcattcctcaagtgatattagagattattcagtactcttgagagtgtcacaacacaaaatacgatgttgggttttcgaaatattttcaaagtgttctgtcttaatcacaaattcatatttttacacatttttacaatattgcctcagattatgttaaatttgggtcagtcttctctgaactttttctctcttggtttcttttcttccttcacagttttatctcacaaaaccatttttctaataagagacatcatgttggaaagatgttctagaaatgtgcataaatttcagtgcctcttgtaagca

SEQ ID NO: 161558 - DNA, 1835 bp, Homo sapiens
  Payload ID: 11538
  Gene Symbol: NUDT13
  Gene Name: nudix (nucleoside diphosphate linked moiety X)-type motif 13
  Uniprot ID: Q86X67
  ENST ID: ENST00000349051
  CDS Start-End: 119-910
gcagcaatggtccctccagggaacggaagccgttgaacgtgaacatttggagtttcctcttttgtgctgattcctgaggactaggaaggtgccccgaaaagaattcagagacctgacaatgtccctgtattgtggaatagcttgcaggagaaaatttttttggtgctataggctgctgtcaacctatgttactaagacacggtatttatttgaactgaaggaagatgatgatgcatgtaaaaaagcccagcaaacaggagcgttttacctctttcatagtctggctcctctgcttcagacttcagcacatcaatacctggccccccggcacagcctgttagagttggaaaggctcctgggtaaatttggacaggatgcacaaagaatagaagattctgtgctgattggatgctctgagcagcaggaagcatggtttgctctggatctaggtctggatagctccttttccataagtgcctccttacacaaacctgaaatggagacagagctcaaggggtctttcattgagctgagaaaggcactctttcaactcaatgcaagggatgcctccttgctgtccacggctcaagctcttctccgctggcatgatgctcatcagttctgcagcagaagtgggcagcccaccaagaagaacgtggctggcagcaagcgtgtgtgcccttccaataatataatctattatccacagatccaggtgaacttgagagaattagagacagctgcctggttcagtcatgatgaggtagccacagccctgaagagaaagggcccctatactcagcaacagaatgggactttcccattctggctgccccctaagttagccatctcccaccaactgattaaggagtgggtggaaaaacagacctgttcttccctgcctgcttagcccggatcaagtcacttagatcgctccttggtattcctgagggacaaactagagatcagttgacaaaggagaagtgacaaaagataagctgcagaaggacctcagaagggcagagcaaagggtgagcctacagtaagacacttctatcagcagtgttaatggaagaaattcctaccaatgggcaatcaaaaaagccagtgtgagaagaaaactgatgagctgtcaactgtcaaaaatcagggggaagggggaagcattagtttggatgtaggcccttgttcagtcattttctctaaggccttggaagcaaacatcttctggcatatggcttgttaatgttgtgtttacactaactgccaaaatgtgcctgttgtaagtttggttaaaacttttatcttagtattgaaaatatatagcaagttttaagtcattactgagttacttgttacccttacagaattaagaaaaatagcacagtatgacattttaaaattcatgtacaggtgcattctagttacatgaacatgctagttaaataaaagtcacaattaagtcattatgactcagagtactttataataaatcagatgccctgaggctctgttgaggaagtagaatcccaatgggactccagacagtaaatctttttcgctgttttcagctctgtcacatgctcagtttgtgacccagggaaaagactattgctttgccatgcctgttttcctaaataaaacagttgctggcatttgcacatccacaacgtgttgattaacaaagggattggtggagataaacagatgccaaacctgacctatttcttaaactttatggaataaactaaatttaggatttctcatcattcatatatgatgccataagggagaagagtttatttggggaaaataaaagaaatttccacaccttt

SEQ ID NO: 161559 - DNA, 2102 bp, Homo sapiens
  Payload ID: 11538
  Gene Symbol: NUDT13
  Gene Name: nudix (nucleoside diphosphate linked moiety X)-type motif 13
  Uniprot ID: Q86X67
  ENST ID: ENST00000357321
  CDS Start-End: 119-1177
gcagcaatggtccctccagggaacggaagccgttgaacgtgaacatttggagtttcctcttttgtgctgattcctgaggactaggaaggtgccccgaaaagaattcagagacctgacaatgtccctgtattgtggaatagcttgcaggagaaaatttttttggtgctataggctgctgtcaacctatgttactaagacacggtatttatttgaactgaaggaagatgatgatgcatgtaaaaaagcccagcaaacaggagcgttttacctctttcatagtctggctcctctgcttcagacttcagcacatcaatacctggccccccggcacagcctgttagagttggaaaggctcctgggtaaatttggacaggatgcacaaagaatagaagattctgtgctgattggatgctctgagcagcaggaagcatggtttgctctggatctaggtctggatagctccttttccataagtgcctccttacacaaacctgaaatggagacagagctcaaggggtctttcattgagctgagaaaggcactctttcaactcaatgcaagggatgcctccttgctgtccacggctcaagctcttctccgctggcatgatgctcatcagttctgcagcagaagtgggcagcccaccaagaagaacgtggctggcagcaagcgtgtgtgcccttccaataatataatctattatccacagatggctcctgtggcgatcacgctggtgtcagatgggacccgatgcctgcttgcccgccaaagctcctttcccaagggaatgtattctgccttggcaggtttttgtgatataggtgaaagtgtggaagagaccatccgccgagaagttgcagaagaggtgggattggaggtggaaagcctgcagtactatgcatcccagcattggcccttccctagtggctcactcatgattgcttgccatgcaactgtgaaaccagggcagacagaaatccaggtgaacttgagagaattagagacagctgcctggttcagtcatgatgaggtagccacagccctgaagagaaagggcccctatactcagcaacagaatgggactttcccattctggctgccccctaagttagccatctcccaccaactgattaaggagtgggtggaaaaacagacctgttcttccctgcctgcttagcccggatcaagtcacttagatcgctccttggtattcctgagggacaaactagagatcagttgacaaaggagaagtgacaaaagataagctgcagaaggacctcagaagggcagagcaaagggtgagcctacagtaagacacttctatcagcagtgttaatggaagaaattcctaccaatgggcaatcaaaaaagccagtgtgagaagaaaactgatgagctgtcaactgtcaaaaatcagggggaagggggaagcattagtttggatgtaggcccttgttcagtcattttctctaaggccttggaagcaaacatcttctggcatatggcttgttaatgttgtgtttacactaactgccaaaatgtgcctgttgtaagtttggttaaaacttttatcttagtattgaaaatatatagcaagttttaagtcattactgagttacttgttacccttacagaattaagaaaaatagcacagtatgacattttaaaattcatgtacaggtgcattctagttacatgaacatgctagttaaataaaagtcacaattaagtcattatgactcagagtactttataataaatcagatgccctgaggctctgttgaggaagtagaatcccaatgggactccagacagtaaatctttttcgctgttttcagctctgtcacatgctcagtttgtgacccagggaaaagactattgctttgccatgcctgttttcctaaataaaacagttgctggcatttgcacatccacaacgtgttgattaacaaagggattggtggagataaacagatgccaaacctgacctatttcttaaactttatggaataaactaaatttaggatttctcatcattcatatatgatgccataagggagaagagtttatttggggaaaataaaagaaatttccacaccttt

SEQ ID NO: 161560 - DNA, 1919 bp, Homo sapiens
  Payload ID: 11538
  Gene Symbol: NUDT13
  Gene Name: nudix (nucleoside diphosphate linked moiety X)-type motif 13
  Uniprot ID: Q86X67
  ENST ID: ENST00000372997
  CDS Start-End: 48-755
tcctgaggactaggaaggtgccccgaaaagaattcagagacctgacaatgtccctgtattgtggaatagcttgcaggagaaaatttttttggtgctataggctgctgtcaacctatgttactaagacacggtatttatttgaactgaaggaagatgatgatgcatgtaaaaaagcccagcaaacaggagcgttttacctctttcatagtctggctcctctgcttcagacttcagcacatcaatacctggccccccggcacagcctgttagagttggaaaggctcctgggtaaatttggacaggatgcacaaagaatagaagattctgtgctgattggatgctctgagcagcaggaagcatggtttgctctggatctaggtctggatagctccttttccataagtgcctccttacacaaacctgaaatggagacagagctcaaggggtctttcattgagctgagaaaggcactctttcaactcaatgcaagggatgcctccttgctgtccacggctcaagctcttctccgctggcatgatgctcatcagttctgcagcagaagtgggcagcccaccaagaagaacgtggctggcagcaagcgtgtgtgcccttccaataatataatctattatccacaggtgaaagtgtggaagagaccatccgccgagaagttgcagaagaggtgggattggaggtggaaagcctgcagtactatgcatcccagcattggcccttccctagtggctcactcatgattgcttgccatgcaactgtgaaaccagggcagacagaaatccaggtgaacttgagagaattagagacagctgcctggttcagtcatgatgaggtagccacagccctgaagagaaagggcccctatactcagcaacagaatgggactttcccattctggctgccccctaagttagccatctcccaccaactgattaaggagtgggtggaaaaacagacctgttcttccctgcctgcttagcccggatcaagtcacttagatcgctccttggtattcctgagggacaaactagagatcagttgacaaaggagaagtgacaaaagataagctgcagaaggacctcagaagggcagagcaaagggtgagcctacagtaagacacttctatcagcagtgttaatggaagaaattcctaccaatgggcaatcaaaaaagccagtgtgagaagaaaactgatgagctgtcaactgtcaaaaatcagggggaagggggaagcattagtttggatgtaggcccttgttcagtcattttctctaaggccttggaagcaaacatcttctggcatatggcttgttaatgttgtgtttacactaactgccaaaatgtgcctgttgtaagtttggttaaaacttttatcttagtattgaaaatatatagcaagttttaagtcattactgagttacttgttacccttacagaattaagaaaaatagcacagtatgacattttaaaattcatgtacaggtgcattctagttacatgaacatgctagttaaataaaagtcacaattaagtcattatgactcagagtactttataataaatcagatgccctgaggctctgttgaggaagtagaatcccaatgggactccagacagtaaatctttttcgctgttttcagctctgtcacatgctcagtttgtgacccagggaaaagactattgctttgccatgcctgttttcctaaataaaacagttgctggcatttgcacatccacaacgtgttgattaacaaagggattggtggagataaacagatgccaaacctgacctatttcttaaactttatggaataaactaaatttaggatttctcatcattcatatatgatgccataagggagaagagtttatttggggaaaataaaagaaatttccacaccttt

SEQ ID NO: 161561 - DNA, 2151 bp, Homo sapiens
  Payload ID: 11538
  Gene Symbol: NUDT13
  Gene Name: nudix (nucleoside diphosphate linked moiety X)-type motif 13
  ENST ID: ENST00000537969
  CDS Start-End: 759-1226
ctggagaacacagcagcatgcctgggaactgaactacaattcccagagtgcatctctaggaggattctgggaagtgtggcagaagcagcaatggtccctccagggaacggaagccgttgaacgtgaacatttggagtttcctcttttgtgctgattcctgaggactaggaaggtgccccgaaaagaattcagagacctgacaatgtccctgtattgtggaatagcttgcaggagaaaatttttttggtgctataggctgctgtcaacctatgttactaagacacgattgaatgagggtcactgaagatacagtgtttactctttgtctgctgtgaaaaagtctgttcccatctctaggtatttatttgaactgaaggaagatgatgatgcatgtaaaaaagcccagcaaacaggagcgttttacctctttcatagtctggctcctctgcttcagacttcagcacatcaatacctggccccccggcacagcctgttagagttggaaaggctcctgggtaaatttggacaggatgcacaaagaatagaagattctgtgctgattggatgctctgagcagcaggaagcatggtttgctctggatctaggtctggatagctccttttccataagtggctcaagctcttctccgctggcatgatgctcatcagttctgcagcagaagtgggcagcccaccaagaagaacgtggctggcagcaagcgtgtgtgcccttccaataatataatctattatccacagatggctcctgtggcgatcacgctggtgtcagatgggacccgatgcctgcttgcccgccaaagctcctttcccaagggaatgtattctgccttggcaggtttttgtgatataggtgaaagtgtggaagagaccatccgccgagaagttgcagaagaggtgggattggaggtggaaagcctgcagtactatgcatcccagcattggcccttccctagtggctcactcatgattgcttgccatgcaactgtgaaaccagggcagacagaaatccaggtgaacttgagagaattagagacagctgcctggttcagtcatgatgaggtagccacagccctgaagagaaagggcccctatactcagcaacagaatgggactttcccattctggctgccccctaagttagccatctcccaccaactgattaaggagtgggtggaaaaacagacctgttcttccctgcctgcttagcccggatcaagtcacttagatcgctccttggtattcctgagggacaaactagagatcagttgacaaaggagaagtgacaaaagataagctgcagaaggacctcagaagggcagagcaaagggtgagcctacagtaagacacttctatcagcagtgttaatggaagaaattcctaccaatgggcaatcaaaaaagccagtgtgagaagaaaactgatgagctgtcaactgtcaaaaatcagggggaagggggaagcattagtttggatgtaggcccttgttcagtcattttctctaaggccttggaagcaaacatcttctggcatatggcttgttaatgttgtgtttacactaactgccaaaatgtgcctgttgtaagtttggttaaaacttttatcttagtattgaaaatatatagcaagttttaagtcattactgagttacttgttacccttacagaattaagaaaaatagcacagtatgacattttaaaattcatgtacaggtgcattctagttacatgaacatgctagttaaataaaagtcacaattaagtcattatgactcagagtactttataataaatcagatgccctgaggctctgttgaggaagtagaatcccaatgggactccagacagtaaatctttttcgctgttttcagctctgtcacatgctcagtttgtgacccagggaaaagactattgctttgccatgcctgttttcctaaataaaacagttgctggcatttgcacatccacaacgtgttgattaacaaagggattggtggagataaacagatgccaaacctgacctatttcttaaactttatggaataaactaaatttaggatttctcatcattcatatatgatgccataagggagaagagtttatttggggaaaataaaagaaatttccacaccttt

SEQ ID NO: 161562 - DNA, 2258 bp, Homo sapiens
  Payload ID: 11538
  Gene Symbol: NUDT13
  Gene Name: nudix (nucleoside diphosphate linked moiety X)-type motif 13
  Uniprot ID: Q86X67
  ENST ID: ENST00000544879
  CDS Start-End: 653-1333
ctggagaacacagcagcatgcctgggaactgaactacaattcccagagtgcatctctaggaggattctgggaagtgtggcagaagcagcaatggtccctccagggaacggaagccgttgaacgtgaacatttggagtttcctcttttgtgctgattcctgaggactaggaaggtgccccgaaaagaattcagagacctgacaatgtccctgtattgtggaatagcttgcaggagaaaatttttttggtgctataggctgctgtcaacctatgttactaagacacgattgaatgagggtcactgaagatacagtgtttactctttgtctgctgtgaaaaagtctgttcccatctctaggtatttatttgaactgaaggaagatgatgatgcatgtaaaaaagcccagcaaacaggagcgttttacctctttcatagtctggctcctctgcttcagacttcagcacatcaatacctggccccccggcacagcctgttagagttggaaaggctcctgggtaaatttggacaggatgcacaaagaatagaagattctgtgctgattggatgctctgagcagcaggaagcatggtttgctctggatctaggtctggatagctccttttccataagtgcctccttacacaaacctgaaatggagacagagctcaaggggtctttcattgagctgagaaaggcactctttcaactcaatgcaagggatgcctccttgctgtccacggctcaagctcttctccgctggcatgatgctcatcagttctgcagcagaagtgggcagcccaccaagaagaacgtggctggcagcaagcgtgtgtgcccttccaataatataatctattatccacagatggctcctgtggcgatcacgctggtgtcagatgggacccgatgcctgcttgcccgccaaagctcctttcccaagggaatgtattctgccttggcaggtttttgtgatataggtgaaagtgtggaagagaccatccgccgagaagttgcagaagaggtgggattggaggtggaaagcctgcagtactatgcatcccagcattggcccttccctagtggctcactcatgattgcttgccatgcaactgtgaaaccagggcagacagaaatccaggtgaacttgagagaattagagacagctgcctggttcagtcatgatgaggtagccacagccctgaagagaaagggcccctatactcagcaacagaatgggactttcccattctggctgccccctaagttagccatctcccaccaactgattaaggagtgggtggaaaaacagacctgttcttccctgcctgcttagcccggatcaagtcacttagatcgctccttggtattcctgagggacaaactagagatcagttgacaaaggagaagtgacaaaagataagctgcagaaggacctcagaagggcagagcaaagggtgagcctacagtaagacacttctatcagcagtgttaatggaagaaattcctaccaatgggcaatcaaaaaagccagtgtgagaagaaaactgatgagctgtcaactgtcaaaaatcagggggaagggggaagcattagtttggatgtaggcccttgttcagtcattttctctaaggccttggaagcaaacatcttctggcatatggcttgttaatgttgtgtttacactaactgccaaaatgtgcctgttgtaagtttggttaaaacttttatcttagtattgaaaatatatagcaagttttaagtcattactgagttacttgttacccttacagaattaagaaaaatagcacagtatgacattttaaaattcatgtacaggtgcattctagttacatgaacatgctagttaaataaaagtcacaattaagtcattatgactcagagtactttataataaatcagatgccctgaggctctgttgaggaagtagaatcccaatgggactccagacagtaaatctttttcgctgttttcagctctgtcacatgctcagtttgtgacccagggaaaagactattgctttgccatgcctgttttcctaaataaaacagttgctggcatttgcacatccacaacgtgttgattaacaaagggattggtggagataaacagatgccaaacctgacctatttcttaaactttatggaataaactaaatttaggatttctcatcattcatatatgatgccataagggagaagagtttatttggggaaaataaaagaaatttccacaccttt

SEQ ID NO: 161563 - DNA, 928 bp, Homo sapiens
  Payload ID: 11538
  Gene Symbol: NUDT13
  Gene Name: nudix (nucleoside diphosphate linked moiety X)-type motif 13
  ENST ID: ENST00000617744
  CDS Start-End: 203-928
ctggagaacacagcagcatgcctgggaactgaactacaattcccagagtgcatctctaggaggattctgggaagtgtggcagaagcagcaatggtccctccagggaacggaagccgttgaacgtgaacatttggagtttcctcttttgtgctgattcctgaggactaggaaggtgccccgaaaagaattcagagacctgacaatgtccctgtattgtggaatagcttgcaggagaaaatttttttggtgctataggctgctgtcaacctatgttactaagacacggtatttatttgaactgaaggaagatgatgatgcatgtaaaaaagcccagcaaacaggagcgttttacctctttcatagtctggctcctctgcttcagacttcagcacatcaatacctggccccccggcacagcctgttagagttggaaaggctcctgggtaaatttggacaggatgcacaaagaatagaagattctgtgctgattggatgctctgagcagcaggaagcatggtttgctctggatctaggtctggatagctccttttccataagtgcctccttacacaaacctgaaatggagacagagctcaaggggtctttcattgagctgagaaaggcactctttcaactcaatgcaagggatgcctccttgctgtccacggctcaagctcttctccgctggcatgatgctcatcagttctgcagcagaagtgggcagcccaccaagaagaacgtggctggcagcaagcgtgtgtgcccttccaataatataatctattatccacagatggctcctgtggcgatcacgctggtgtcagatgggacccgatgcctgcttgcccgccaaagctcctttcccaagggaatgtattctgccttggcaggtttttgtgatatagcctacagggctgtcctgaattaa

SEQ ID NO: 161564 - DNA, 845 bp, Homo sapiens
  Payload ID: 11539
  Gene Symbol: NUDT14
  Gene Name: nudix (nucleoside diphosphate linked moiety X)-type motif 14
  Uniprot ID: O95848
  ENST ID: ENST00000392568
  CDS Start-End: 95-763
gtcacgcgcccgcccgaaggctcctgtcgggacagggcgccgccccgtgtcggcccccgcagagctcgcggcccccgcctgtccgggcgccgccatggagcgcatcgagggggcgtccgtgggccgctgcgccgcctcaccctacctgcggccgctcacgctgcattaccgccagaatggtgcccagaagtcctgggacttcatgaagacgcatgacagcgtgaccgttctcttattcaactcttctcggaggagcctggtgttggtgaagcagttccggccagctgtgtatgcgggtgaggtggagcgccgcttcccagggtccctagcagctgtagaccaggacgggcctcgggagctacagccagccctgcccggctcagcgggggtgacagttgagctgtgtgccggcctcgtggaccagcctgggctctcgctggaggaagtggcttgcaaggaggcttgggaggagtgtggctaccacttggccccctctgatctgcgccgggtcgccacatactggtctggagtgggactgactggctccagacagaccatgttctacacagaggtgacagatgcccagcgtagcggtccaggtgggggcctggtggaggagggtgagctcattgaggtggtgcacctgcccctggaaggcgcccaggcctttgcagacgacccggacatccccaagaccctcggcgtcatctttggtgtctcatggttcctcagccaggtggcccccaacctggatctccagtgagactccagggttctagacagaggccagtcttggccactcaccccacaccccgcggaccccaataaaggcttgcatagctcca

SEQ ID NO: 161565 - DNA, 527 bp, Homo sapiens
  Payload ID: 11539
  Gene Symbol: NUDT14
  Gene Name: nudix (nucleoside diphosphate linked moiety X)-type motif 14
  ENST ID: ENST00000546553
  CDS Start-End: 104-394
agagccgcggtcacgcgcccgcccgaaggctcctgtcgggacagggcgccgccccgtgtcggcccccgcagagctcgcggcccccgcctgtccgggcgccgccatggagcgcatcgagggggcgtccgtgggccgctgcgccgcctcaccctacctgcggccgctcacgctgcattaccgccagaatggtgcccagaagtcctgggacttcatgaagacgcatgacagtcacccggcctcagctgcgagcaccctgacctactcagctgcccgtgtgtccttccctgccccccgcctcccatcctgccagctggaatacagcaggtctgggtcctggccagactgtgaccctggaaagctctggtcccgcctgggcctcagccatcctatctgagcaaggggcctgacctccctgggctgctggcaaggagcgtgaccgttctcttattcaactcttctcggaggagcctggtgttggtgaagcagttccggccagctgtgtatgcgggtgaggtggagcgccgctt

SEQ ID NO: 161566 - DNA, 2098 bp, Homo sapiens
  Payload ID: 11540
  Gene Symbol: NUDT15
  Gene Name: nudix (nucleoside diphosphate linked moiety X)-type motif 15
  Uniprot ID: Q9NV35
  ENST ID: ENST00000258662
  CDS Start-End: 181-675
attccccaacctgatagccctccgcgacgcattacgcaccgcggacagctggagaggccgaggcgctctcgctttgatttcggcgcctccgccctcgcggggagagattggctgcggccgcgggacggggtagtgagcgcgtcacttcctgccgctgccaggcgcgtcctcccgcgcgctatgacggccagcgcacagccgcgcgggcggcggccaggagtcggagtcggagtcgtggtgaccagctgcaagcatccgcgttgcgtcctcctggggaagaggaaaggctcggttggagctggcagtttccaactccctggaggtcatctggagttcggtgaaacctgggaagaatgtgctcaaagggaaacctgggaagaagcagctcttcacctgaaaaatgttcactttgcctcagttgtgaattctttcattgagaaggagaattaccattatgttactatattaatgaaaggagaagtggatgtgactcatgattcagaaccaaagaatgtagagcctgaaaaaaatgaaagttgggagtgggttccttgggaagaactacctcccctggaccagcttttctggggactgcgttgtttaaaagaacaaggctatgatccatttaaagaagatctgaaccatctggtgggatacaaaggaaatcatctctaggtggccgagaagatttgattttctttaaaaagacaagaataaggtctggttagggaatgaaaaatgtatacatttcggaacaactccattttatctaaaaaagttcttgtgattgccagtttatttgcagtctcttaatgtatcccccactctttcagccagtacttgagaaaatttttctgaaatatgtcattgaattgtattccagacacagaatacatgataaatactgatattatgggtaatctgctttccatatttacctatgatatttactgtgcagtttgtcattactagcttgcatggagtaggatgcagtcaaatttgccttagtgtttctgttcaaatagagacctgaattcaaatattgtagtttaggttcaaacagagtatggctgttgcaaaatttaccaaatttgttgattacctcttttattaaagaaatgttggggagagggtaatatattgtgacaatttttgcaacttacagggaataggacaggtcattagggtgtatttcccaggtttccaattgagaatctaaaccaagagaagtgagacaaaccatctaatatctgtatcatgctattaataggctgtgatgttgagtttctcacttactctttctgaggtccagggtccttatatgaagagattcatatatatgaagagattcgtctagagcagtggttgtcaaagtgtggtctgggggggcctcaagagcctttcaagggtattctaggtcaaagctgtttttataacactaagacatcatttcactatttatagcttttccttttttttatttgagaaggagtcttgctctgttgcccacattggagtgcagtggcacgatctcagctcattgcagcctccgccacctgggttcaagcaattctcctacctcagcttcccgagtagctgggattataggcacccaccaccacacctggctaatttttgtatttttagtggagacggggtttcaccatgttggccaggctggtctggaactcctgagctcaagtgatctgcccatctcagcctcccaaagtgctgggattacaggtatgagccacaacgcccagccatcatttatctttttcactcattttttcatgagtatgcagaggagttttcaagaggctatctggtgtgatattgtaataggctgaatgcaaaagcagatacaagattccagctttcgtctgtcatcagacattgaagagatttggagaaatgtaaagcagcagtactcttctcactaatttttgttgtggttagttagaaaaatggttatttttagtgggttttaatatgtgaaaaaaataaaattagctatttgccaaaaatgtttttatgtgtttatatatacttggttcttgttacttgcaaatgattaataaaaattttaagaaatttc

SEQ ID NO: 161567 - DNA, 1552 bp, Homo sapiens
  Payload ID: 11541
  Gene Symbol: NUDT16
  Gene Name: nudix (nucleoside diphosphate linked moiety X)-type motif 16
  Uniprot ID: Q96DE0
  ENST ID: ENST00000502852
  CDS Start-End: 21-704
cagaggagcagtgtccggccatggccggagcccgcaggctggagctaggcgaggccctggcgctggggtcgggctggcgtcatgcgtgccacgctctcctctacgcgccggaccctgggatgctcttcggccgcatcccgctgcgctacgccatactgatgcagatgcgcttcgatggacgcctgggcttccccggcggattcgtggacacgcaggacagaagcctagaggacgggctgaaccgcgagctgcgcgaggagctgggcgaagcggctgccgctttccgcgtggagcgcactgactaccgcagctcccacgtcgggtcagggccacgcgttgtggcccacttctatgccaagcgtctgacgctcgaggagctgttggctgtggaggccggcgcaacacgcgccaaggaccacgggctggaggtgggaccagcctgggactctgtccctttcccaatttcctcttctcccaaagctttctctcccccaagaaagcatccctggagaaaagtctttgcccctctgaccttgccctctccccagctttcttggtggagttgggatcgtgatcatctatactctgaattagtactgccaacctgggctttctgtaaaggtctttcccaccctttaccaggagagatcctttctagaacacactcatccatgtctctctgctgttccctattgacagtgtgatagattatcacattatctaggtgtggcaacctaggttttattcttggggtttgcttttcttgtgtaggagatgtggccctgatatttcaggcagggctagtagatagattatgtatgaaggtggttctcaaaatttggcaggtagcagaatcatcggggcgtcttattaaaatagcgatttctctcagcattcctgcattggtggtggggcggggggagaggaaacctgagaatttgtagttttcaaaagttcccaaataatgctgatgcaaataatctgaggaccacattttgacaaccactggtgaaagggtatgaatacatctttgaggcagtagccactagaggtttagaagcagatgtgggaaagattaattgatagagctagataatatgttttgggtcattttcctgcagaaggttgggccactaggctttagtgaggtgtgagccttgggcctggttctgctggagtattaaggggtgaggcctgatctgctggagaaaggatggagttaagggaatgagccacctggggccctagtgtctcctgtctccttccttttacaggtgctgggcctggtgcgagtgcccctgtataccctgcgggatggtgtaggaggcctgcctaccttcctggagaattcctttattggctctgcgcgggagcagttacttgaagctctccaggacttgggactgctgcagtctggctctatttcaggccttaagattccagctcatcactagaggcagccctccatggacccatgaaaactgagatgaggaccttggtactagggagggagggaaggacgtgggaatgttttcttattggatctgagaga

SEQ ID NO: 161568 - DNA, 6108 bp, Homo sapiens
  Payload ID: 11541
  Gene Symbol: NUDT16
  Gene Name: nudix (nucleoside diphosphate linked moiety X)-type motif 16
  Uniprot ID: Q96DE0
  ENST ID: ENST00000521288
  CDS Start-End: 32-619
cttcgggacagcagaggagcagtgtccggccatggccggagcccgcaggctggagctaggcgaggccctggcgctggggtcgggctggcgtcatgcgtgccacgctctcctctacgcgccggaccctgggatgctcttcggccgcatcccgctgcgctacgccatactgatgcagatgcgcttcgatggacgcctgggcttccccggcggattcgtggacacgcaggacagaagcctagaggacgggctgaaccgcgagctgcgcgaggagctgggcgaagcggctgccgctttccgcgtggagcgcactgactaccgcagctcccacgtcgggtcagggccacgcgttgtggcccacttctatgccaagcgtctgacgctcgaggagctgttggctgtggaggccggcgcaacacgcgccaaggaccacgggctggaggtgctgggcctggtgcgagtgcccctgtataccctgcgggatggtgtaggaggcctgcctaccttcctggagaattcctttattggctctgcgcgggagcagttacttgaagctctccaggacttgggactgctgcagtctggctctatttcaggccttaagattccagctcatcactagaggcagccctccatggacccatgaaaactgagatgaggaccttggtactagggagggagggaaggacgtgggaatgttttcttattggatctgagagatgatacatgataccagatgaaaagaaggagaagtgtgtaccatatgttttgagcagaggaccctccaacttatggcatcaggggcaaaaagtcacagcttatcccaggcaccctggcaggttctcagagcctgcctcctccctgtttatatgcgtacagcctggtaacccccaggcatgcaaatatacaatctgtaacaacacacagcctgacaccttcccctggtcatgtccagtttaaccttgaagtggcatttgtcacactaccctggtccctgattgcaaggagcttctgaagcaagggtgaatccttcccacactcctccatggttgccctccagggtctagcccagcctatttgttagggaggatagagaaacagagcaccccctgtgctttctgaaaatagacttgctcttgtcttgagtggtgaccaaagcagttggctcttaaaaggtgggagagcagcccaaccaatccccaatccttttcttctgaaactgagcaggaagggtaaggaagtggctaggtctccttggactgagcatggacatgagtcctgtgaggactggtgtctctcctctagagctttcatctttgggatgcctgagactccgagactatcagaagggaattgacccaccccagtctagcaccaccctgccttcacttcatctacataaaggtggtataaaaacatagactggaggaggtaatccatggagagagaaaaagaagagggctcaggacaaggccctgaggaggcccaatcctaaaagtttgggcagagggaaccaggcacgttaaagaagacagaaagcggactatgcagagtgcttgtgagggtttcactaaaacagaggcaaaactgtccattgaattcagtaacatgaagtgtttgatgactatgatggcagcagtttcaggaagggcggtatggaaggcaggctgtactggttgagtgaatggaaagttggggagtagaacgtgtgagaagttggccttcaaggggctcaggttaataatagagagctatggagtcaaggcatgtttaagatgggaggtagagcatgccaatattgatggcaacagtcaagatggtgtgatgagagagatgggaggggcacaaagaggaggacccctgaaggagcagagtccatgagaaagaaggagggatgggacctttgtaggaagagacacagtcctgcagcctcatatggctcaataaaacagaaaggggcaagtatagaagattaggatgactaaattaatggggaaatgatgaaggagtttgaatctcttctttgtgaaatgaagtgagactatcagctagttgtgggtggagtgtgttctcagaaggtatgaagtagatgttttcctaggtgttggaaaacaggttgattaaggcaacagcagaagggcagggcaaggctgagctctgagatggtcagtttagagtaggatgctgggcactcaggtgtgtgtgtgttgagtggggctctgcacacacctgtcttcccctcatcaggattcaggagctgggatgggtacacttactgcagtgttggggttttgccagggaagtaaaaggagttgagagaaagatgggtcagttcagaagacatacacaggagaaattgtagtgatgaaatgtgcagtctaaggtttaatctgaccaagaaattggaattgaaaacaggaggtgactagggagggattaggaaattagaggtcttgacaagatagaaactccagcatggtgaggggttgggcagggaggtatatttgagccagacaggagtgctttggaaattgagaggtggagcaatctcaggtaaaggcaaaatagagggtatgacctggggttgctggccagagccagggaggagccttaagaagtgaaatctagggttggcgaggctggagggcagggtgagcctccacatgggtgctgaagcaagaaaccgacagatgttgaggagaatggtgtgacctaggagtcagcatccttggtgaacaagaggagtggccacaaggccagtggcacctgccagaggggaaagcaggcatgacaggatagcatctcccaggtgagagccttttgaggaagggagggtgggcagtggtctggaagcttgatgcagagcagtgtgggtcccactggcagcccttggtcttagaagaatgggagtacccagtgggggagcagctgtacaatgaggtagactcctagaggttaattatcatctcctaatcttaccctgacccttttgtcaaacgttatctagattaaacctcagtataggcaggctgcaggaaatggacattccagtggcccctggggttccagcctgtagcagcttcatctgtgctttgtgcacttggttctcagtcatctctgcaagggaccctgacgcctgggagatcagagccactgaccctttatggcactgctaacagaccccttccctcaggtaattctggatccagaactcattatgggatgtaatccaggtcaacactaataccacttggaaggttccgctctgtctcactctgcttgagtatcccactgatcagtctctcagtgcctgcctactgggcagctcatctgtccacttattcgtattaaatttgctttttatttaggtctctggagatggttgcgtggggaagagcccatgactttcctatatgatcccttgaacatactctccaagtcagtagattacctctcaggcagccttcataaaagtgtttcactgtactggggtttgtgttcatctcactcacatagacagtctctgggtaggcaggtggggggtgatacaagttcacactctgtgtttctcctcctgttagccattcccaccctgctgatgtttaaggaaagccagggatgatgacccacttaagctttccttggccttgttaagtccaatcatctggggcaggaagaagagaaatgctcattgcaatctttgacccccactaactgctgtggtgactttgacccaagcccttgacctccttttccttatctgaaatgttgctgtgattcctgtggtgagatcagatgaggcagcacttgggataagcttgcagagatgcattgagcggtatgaaagtacaggatgctatgtactttcctgcttcacagcacattttgtttcttgcaaggtgagtggcccagccgcctctccacaaacacgtgtttctgcctttctcagcataatcagcaagatgttcccacttctcagcattgcacttttctgctggtgcagaataaaaacactttgagccccaccctgtcctgagacaaagtcctctgtggtcacttggcatatggcaaagctgctgctgtgggctggaacatttgaggcaacagtgacttcctcctttcctagttaccggaacccttagagctgggagccggccagtgaaacagacaaggggaggggaagagaagagggaaggcatgtttcctatatgagtttcagtttgttgcacagaaatgtttttgaaacctttatctccaatagaatcacaaacgggtgtcagagagtcaaaactagaggaaaaagtttagtctgtaaacaaatcattagatggcatcagaatttgaaccaaagtaaaagatgctggaccttggcacttatcagagaagtatagaagagccaggtaggggattttatttacaacatgttcaattctgaggaagaggagtatgggcagggcagaggaaaaaggaaaaatgggaaacccccatggacttagggcccccacaaagagaaaccatgtgccttctccccacttcccttctggcttgggcaaatgaggctccctttaggggtagaggtactctacaggggctatgttccctttaggggtagaggtagtctacaggggccagctgggcagagatgaaatcttgcaaaggaacccttcttacactcgaaaagcaagaatagcaaagggactttgggaaggacataaaacaagaaaaggaagctcctcaccaacagctcccagatggagggagtttgtgtgtctagcattttcaccaaagtgctgctcatcctgatgcacagatgcagattggagctgctgcctgtgccctcaccatgggtatgtacccaccacaggcattcccaggtgatgcgggggcagaggattccctctttccactcaggataacaacccctcgatggggttttcaacaagtatagaaagctcctggactcagccaagaccctcacctacagtcccagtcctcccaccttcttcaggtctctagaagacagaactgatgggtttacaacatcctattatccagcactagtcctaggttgtggatgtagggaaaggccaggtaaacaaggaagggagaacaggtgaatgaccccaattgtttgaaaccaaaagagcagaattgcccctaattgatttaagtaaacagcaagtaacataggtctgttaaatagaagaggatgtgagcaccagatgcacgtgataaagaccatgctctggaagattcattccaaggagtagaagtggtatttactcagggcatttaaggagagcagggactctgaaatgaggtgagagaaaagataagacatgcaggaacagctggcaacaccaagaaagaatttaaggagagggatctctctgttagagaacttaacattaccctaggaacagcaagagcatcatcagccccaggaaaatctacctctgatatggagaccaggcttaagaaaatcccctagaacccagagaaaaagtgcaaaacaaggaaaatggccaaagagaatatcatagatacagagatcagacaatgagaatccagagtcttgttaagtgatagaaggaaaatactaacagaacacatgtaacaggaacaacattttagaggaaacaggacaaaaacttccctaaactcaagatactacaccagaagtgggcagtactcactatgttcaggggaacaaaaagataaaaactaaaaagcatcagactgttttttgtgtgaaggaaatttgtaaggtaggagaattaggtcacttactacagcacaaattgcatgtctatctaaattgacgtttaagtgcaaaagcatggatattactcatgcagttttactggaaaaccatacagatgtttttcaggaatgtacagaatgaatcaaaggaaataactgatcgacaggaaaactgtaggaaatttgtgggctggctgtgaggcagtggctcctattatgtacaattttagtgctaagtactgtgttaatgatggctatcaaacaatatgttaacatctgaaaggaaatatgtatattgagcataataaatattttataaataacaataaatcatttgattttatgcta

SEQ ID NO: 161569 - DNA, 5943 bp, Homo sapiens
  Payload ID: 11541
  Gene Symbol: NUDT16
  Gene Name: nudix (nucleoside diphosphate linked moiety X)-type motif 16
  Uniprot ID: Q96DE0
  ENST ID: ENST00000537561
  CDS Start-End: 76-555
aggcgcctaggttcctccccttatccctgcagggattgggccttgcagcaccgcccaggctcggattggtccgagatgcagatgcgcttcgatggacgcctgggcttccccggcggattcgtggacacgcaggacagaagcctagaggacgggctgaaccgcgagctgcgcgaggagctgggcgaagcggctgccgctttccgcgtggagcgcactgactaccgcagctcccacgtcgggtcagggccacgcgttgtggcccacttctatgccaagcgtctgacgctcgaggagctgttggctgtggaggccggcgcaacacgcgccaaggaccacgggctggaggtgctgggcctggtgcgagtgcccctgtataccctgcgggatggtgtaggaggcctgcctaccttcctggagaattcctttattggctctgcgcgggagcagttacttgaagcagccctccatggacccatgaaaactgagatgaggaccttggtactagggagggagggaaggacgtgggaatgttttcttattggatctgagagatgatacatgataccagatgaaaagaaggagaagtgtgtaccatatgttttgagcagaggaccctccaacttatggcatcaggggcaaaaagtcacagcttatcccaggcaccctggcaggttctcagagcctgcctcctccctgtttatatgcgtacagcctggtaacccccaggcatgcaaatatacaatctgtaacaacacacagcctgacaccttcccctggtcatgtccagtttaaccttgaagtggcatttgtcacactaccctggtccctgattgcaaggagcttctgaagcaagggtgaatccttcccacactcctccatggttgccctccagggtctagcccagcctatttgttagggaggatagagaaacagagcaccccctgtgctttctgaaaatagacttgctcttgtcttgagtggtgaccaaagcagttggctcttaaaaggtgggagagcagcccaaccaatccccaatccttttcttctgaaactgagcaggaagggtaaggaagtggctaggtctccttggactgagcatggacatgagtcctgtgaggactggtgtctctcctctagagctttcatctttgggatgcctgagactccgagactatcagaagggaattgacccaccccagtctagcaccaccctgccttcacttcatctacataaaggtggtataaaaacatagactggaggaggtaatccatggagagagaaaaagaagagggctcaggacaaggccctgaggaggcccaatcctaaaagtttgggcagagggaaccaggcacgttaaagaagacagaaagcggactatgcagagtgcttgtgagggtttcactaaaacagaggcaaaactgtccattgaattcagtaacatgaagtgtttgatgactatgatggcagcagtttcaggaagggcggtatggaaggcaggctgtactggttgagtgaatggaaagttggggagtagaacgtgtgagaagttggccttcaaggggctcaggttaataatagagagctatggagtcaaggcatgtttaagatgggaggtagagcatgccaatattgatggcaacagtcaagatggtgtgatgagagagatgggaggggcacaaagaggaggacccctgaaggagcagagtccatgagaaagaaggagggatgggacctttgtaggaagagacacagtcctgcagcctcatatggctcaataaaacagaaaggggcaagtatagaagattaggatgactaaattaatggggaaatgatgaaggagtttgaatctcttctttgtgaaatgaagtgagactatcagctagttgtgggtggagtgtgttctcagaaggtatgaagtagatgttttcctaggtgttggaaaacaggttgattaaggcaacagcagaagggcagggcaaggctgagctctgagatggtcagtttagagtaggatgctgggcactcaggtgtgtgtgtgttgagtggggctctgcacacacctgtcttcccctcatcaggattcaggagctgggatgggtacacttactgcagtgttggggttttgccagggaagtaaaaggagttgagagaaagatgggtcagttcagaagacatacacaggagaaattgtagtgatgaaatgtgcagtctaaggtttaatctgaccaagaaattggaattgaaaacaggaggtgactagggagggattaggaaattagaggtcttgacaagatagaaactccagcatggtgaggggttgggcagggaggtatatttgagccagacaggagtgctttggaaattgagaggtggagcaatctcaggtaaaggcaaaatagagggtatgacctggggttgctggccagagccagggaggagccttaagaagtgaaatctagggttggcgaggctggagggcagggtgagcctccacatgggtgctgaagcaagaaaccgacagatgttgaggagaatggtgtgacctaggagtcagcatccttggtgaacaagaggagtggccacaaggccagtggcacctgccagaggggaaagcaggcatgacaggatagcatctcccaggtgagagccttttgaggaagggagggtgggcagtggtctggaagcttgatgcagagcagtgtgggtcccactggcagcccttggtcttagaagaatgggagtacccagtgggggagcagctgtacaatgaggtagactcctagaggttaattatcatctcctaatcttaccctgacccttttgtcaaacgttatctagattaaacctcagtataggcaggctgcaggaaatggacattccagtggcccctggggttccagcctgtagcagcttcatctgtgctttgtgcacttggttctcagtcatctctgcaagggaccctgacgcctgggagatcagagccactgaccctttatggcactgctaacagaccccttccctcaggtaattctggatccagaactcattatgggatgtaatccaggtcaacactaataccacttggaaggttccgctctgtctcactctgcttgagtatcccactgatcagtctctcagtgcctgcctactgggcagctcatctgtccacttattcgtattaaatttgctttttatttaggtctctggagatggttgcgtggggaagagcccatgactttcctatatgatcccttgaacatactctccaagtcagtagattacctctcaggcagccttcataaaagtgtttcactgtactggggtttgtgttcatctcactcacatagacagtctctgggtaggcaggtggggggtgatacaagttcacactctgtgtttctcctcctgttagccattcccaccctgctgatgtttaaggaaagccagggatgatgacccacttaagctttccttggccttgttaagtccaatcatctggggcaggaagaagagaaatgctcattgcaatctttgacccccactaactgctgtggtgactttgacccaagcccttgacctccttttccttatctgaaatgttgctgtgattcctgtggtgagatcagatgaggcagcacttgggataagcttgcagagatgcattgagcggtatgaaagtacaggatgctatgtactttcctgcttcacagcacattttgtttcttgcaaggtgagtggcccagccgcctctccacaaacacgtgtttctgcctttctcagcataatcagcaagatgttcccacttctcagcattgcacttttctgctggtgcagaataaaaacactttgagccccaccctgtcctgagacaaagtcctctgtggtcacttggcatatggcaaagctgctgctgtgggctggaacatttgaggcaacagtgacttcctcctttcctagttaccggaacccttagagctgggagccggccagtgaaacagacaaggggaggggaagagaagagggaaggcatgtttcctatatgagtttcagtttgttgcacagaaatgtttttgaaacctttatctccaatagaatcacaaacgggtgtcagagagtcaaaactagaggaaaaagtttagtctgtaaacaaatcattagatggcatcagaatttgaaccaaagtaaaagatgctggaccttggcacttatcagagaagtatagaagagccaggtaggggattttatttacaacatgttcaattctgaggaagaggagtatgggcagggcagaggaaaaaggaaaaatgggaaacccccatggacttagggcccccacaaagagaaaccatgtgccttctccccacttcccttctggcttgggcaaatgaggctccctttaggggtagaggtactctacaggggctatgttccctttaggggtagaggtagtctacaggggccagctgggcagagatgaaatcttgcaaaggaacccttcttacactcgaaaagcaagaatagcaaagggactttgggaaggacataaaacaagaaaaggaagctcctcaccaacagctcccagatggagggagtttgtgtgtctagcattttcaccaaagtgctgctcatcctgatgcacagatgcagattggagctgctgcctgtgccctcaccatgggtatgtacccaccacaggcattcccaggtgatgcgggggcagaggattccctctttccactcaggataacaacccctcgatggggttttcaacaagtatagaaagctcctggactcagccaagaccctcacctacagtcccagtcctcccaccttcttcaggtctctagaagacagaactgatgggtttacaacatcctattatccagcactagtcctaggttgtggatgtagggaaaggccaggtaaacaaggaagggagaacaggtgaatgaccccaattgtttgaaaccaaaagagcagaattgcccctaattgatttaagtaaacagcaagtaacataggtctgttaaatagaagaggatgtgagcaccagatgcacgtgataaagaccatgctctggaagattcattccaaggagtagaagtggtatttactcagggcatttaaggagagcagggactctgaaatgaggtgagagaaaagataagacatgcaggaacagctggcaacaccaagaaagaatttaaggagagggatctctctgttagagaacttaacattaccctaggaacagcaagagcatcatcagccccaggaaaatctacctctgatatggagaccaggcttaagaaaatcccctagaacccagagaaaaagtgcaaaacaaggaaaatggccaaagagaatatcatagatacagagatcagacaatgagaatccagagtcttgttaagtgatagaaggaaaatactaacagaacacatgtaacaggaacaacattttagaggaaacaggacaaaaacttccctaaactcaagatactacaccagaagtgggcagtactcactatgttcaggggaacaaaaagataaaaactaaaaagcatcagactgttttttgtgtgaaggaaatttgtaaggtaggagaattaggtcacttactacagcacaaattgcatgtctatctaaattgacgtttaagtgcaaaagcatggatattactcatgcagttttactggaaaaccatacagatgtttttcaggaatgtacagaatgaatcaaaggaaataactgatcgacaggaaaactgtaggaaatttgtgggctggctgtgaggcagtggctcctattatgtacaattttagtgctaagtactgtgttaatgatggctatcaaacaatatgttaacatctgaaaggaaatatgtatattgagcataataaatattttataaataacaataaatcatttgattttatgcta

SEQ ID NO: 161570 - DNA, 1349 bp, Homo sapiens
  Payload ID: 11542
  Gene Symbol: NUDT16L1
  Gene Name: nudix (nucleoside diphosphate linked moiety X)-type motif 16-like 1
  Uniprot ID: Q9BRJ7
  ENST ID: ENST00000304301
  CDS Start-End: 34-669
agtggcagcggcggggacggggtcagtgccaagatgtcgacggcggcggttccggagctgaagcagatcagccgggtggaggcgatgcgcctagggccgggctggagccactcgtgccacgccatgctgtacgccgccaaccctgggcagctcttcggccgcatccccatgcgcttctcggtgctgatgcagatgcgtttcgacgggctgctgggcttccccgggggcttcgtggaccggcgcttctggtcgctggaggacggcctgaaccgggtgctgggcctgggcctgggctgcctgcgcctcaccgaggccgactacctgagctcgcacctgaccgagggcccacaccgcgtcgtggcgcacctgtacgcgcggcagctgacgctggagcagctgcacgccgtggagatcagcgcggtgcactcgcgcgaccacggcctggaggtgctgggcctcgtgcgggtcccgctgtacacccagaaggaccgagtcggaggcttccccaacttcctgagcaacgccttcgtgagcacggctaagtgccagctcctctttgccctcaaggtgctcaacatgatgcccgaggagaagctggttgaggccctggctgcagccaccgagaagcagaagaaggccctggagaagttgctcccggcctcctcttgagggctgcctgagctggtggcaccctcccctgggccggaagactgggaattcctgctaagtgtggcttctagagtgtttgtgtgtaccccgcttctgactgcctagggcgagtgggcatcctgtcatcatctccactgtcccaagcagtcactaggtggcggccgggccagctggaacccagcccatcctctcaggcagagcagggtggtccgggcacactgggcctgcctctccagcctcaggatgctcttgtttattctgggctcagaccctcctcttgtacgtctcatcacagctggtagagacccaggagtgcctgattgtcccacaggggtggcgcacagctctgggaccactcagaagatgggatgtgtgggtggaggatgccttgtctcggtcagctcattcctgcctccttcctgagccagttcagggcctgggggagagccagcttggggtaggaagttaataatactgttaatttgggttgttgttggatttactttgctagattttctctttcaccacgtgtgaactgtgggtgaggtttcaaagtagcttcaccccacgtggcttggttcccagggacagtcagggcctcgggggcccagctatgtacaacgaagctgtcgaaggagaagacaataaagtcgctccgcagctgctctgtgtgtttctca

SEQ ID NO: 161571 - DNA, 2040 bp, Homo sapiens
  Payload ID: 11542
  Gene Symbol: NUDT16L1
  Gene Name: nudix (nucleoside diphosphate linked moiety X)-type motif 16-like 1
  Uniprot ID: Q9BRJ7
  ENST ID: ENST00000405142
  CDS Start-End: 10-753
agtgccaagatgtcgacggcggcggttccggagctgaagcagatcagccgggtggaggcgatgcgcctagggccgggctggagccactcgtgccacgccatgctgtacgccgccaaccctgggcagctcttcggccgcatccccatgcgcttctcggtgctgatgcagatgcgtttcgacgggctgctgggcttccccgggggcttcgtggaccggcgcttctggtcgctggaggacggcctgaaccgggtgctgggcctgggcctgggctgcctgcgcctcaccgaggccgactacctgagctcgcacctgaccgagggcccacaccgcgtcgtggcgcacctgtacgcgcggcagctgacgctggagcagctgcacgccgtggagatcagcgcggtgcactcgcgcgaccacggcctggaggtggggccgccgcccgggccccgccccccgccccggggtttggctctggccccgtggaaggcaccgatgggtaacacgtctcctgagggtcccctggccgggctgggtcgggtgtcgctgtctccagcaatggggtggggagaggggtctggggctgggaggccgggaaaggaggggcgggggtgggggccggcgctggggctccctcagggctgtgttacatccgccttgctgcctgccattgccaatcctgggagtgggggagtgggatcggtggggaggaagggatgggggaggagcggggattgcttggggagttgggaaacttgagcacagcgggggttgtaaaacttgggaacctcatgttgggcgtgaaggctcttgggatttgtactttgtggtctggaagggctggactgcgggtgttcaggcttcgttgggtggacggggggagcatggggtgcggaccccggggtggggtggcctgggtacgaggggggggagtgcatggggtcagcctccacacttgcttggggaggagggggctgcactgctccgagggagctggctggcttctgccaggccctgcgtgggtctcccattaagtccttggcaaagctggctgctcataccctggcctcatagcttccaggcccctcctgctggaggtgccattgtgtggcaggcctggccccaacccctacctcctgtctgcgcaggtgctgggcctcgtgcgggtcccgctgtacacccagaaggaccgagtcggaggcttccccaacttcctgagcaacgccttcgtgagcacggctaagtgccagctcctctttgccctcaaggtgctcaacatgatgcccgaggagaagctggttgaggccctggctgcagccaccgagaagcagaagaaggccctggagaagttgctcccggcctcctcttgagggctgcctgagctggtggcaccctcccctgggccggaagactgggaattcctgctaagtgtggcttctagagtgtttgtgtgtaccccgcttctgactgcctagggcgagtgggcatcctgtcatcatctccactgtcccaagcagtcactaggtggcggccgggccagctggaacccagcccatcctctcaggcagagcagggtggtccgggcacactgggcctgcctctccagcctcaggatgctcttgtttattctgggctcagaccctcctcttgtacgtctcatcacagctggtagagacccaggagtgcctgattgtcccacaggggtggcgcacagctctgggaccactcagaagatgggatgtgtgggtggaggatgccttgtctcggtcagctcattcctgcctccttcctgagccagttcagggcctgggggagagccagcttggggtaggaagttaataatactgttaatttgggttgttgttggatttactttgctagattttctctttcaccacgtgtgaactgtgggtgaggtttcaaagtagcttcaccccacgtggcttggttcccagggacagtcagggcctcgggggcccagctatgtacaacgaagctgtcgaaggagaagacaataaagtcgctccgcagctgctctgtgtgttt

SEQ ID NO: 161572 - DNA, 709 bp, Homo sapiens
  Payload ID: 11542
  Gene Symbol: NUDT16L1
  Gene Name: nudix (nucleoside diphosphate linked moiety X)-type motif 16-like 1
  ENST ID: ENST00000590460
  CDS Start-End: 1-596
tcagccgggtggaggcgatgcgcctagggccgggctggagccactcgtgccacgccatgctgtacgccgccaaccctgggcagctcttcggccgcatccccatgcgcttctcggtgctgatgcgtttcgacgggctgctgggcttccccgggggcttcgtggaccggcgcttctggtcgctggaggacggcctgaaccgggtgctgggcctgggcctgggctgcctgcgcctcaccgaggccgactacctgagctcgcacctgaccgagggcccacaccgcgtcgtggcgcacctgtacgcgcggcagctgacgctggagcagctgcacgccgtggagatcagcgcggtgcactcgcgcgaccacggcctggaggtgctgggcctcgtgcgggtcccgctgtacacccagaaggaccgagtcggaggcttccccaacttcctgagcaacgccttcgtgagcacggctaagtgccagctcctctttgccctcaaggtgctcaacatgatgcccgaggagaagctggttgaggccctggctgcagccaccgagaagcagaagaaggccctggagaagttgctcccggcctcctcttgagggctgcctgagctggtggcaccctcccctgggccggaagactgggaattcctgctaagtgtggcttctagagtgtttgtgtgtaccccgcttctgactgcctagggcgagtg

SEQ ID NO: 161573 - DNA, 922 bp, Homo sapiens
  Payload ID: 11542
  Gene Symbol: NUDT16L1
  Gene Name: nudix (nucleoside diphosphate linked moiety X)-type motif 16-like 1
  ENST ID: ENST00000586252
  CDS Start-End: 25-540
ggcggggacggggtcagtgccaagatgtcgacggcggcggttccggagctgaagcagatcagccgggtggaggcgatgcgcctagggccgggctggagccactcgtgccacgccatgctgtacgccgccaaccctgggcagctcttcggccgcatccccatgcgcttctcggtgctgatgcagatgcgtttcgacgggctgctgggcttccccgggggcttcgtggaccggcgcttctggtcgctggaggacggcctgaaccgggtgctgggcctgggcctgggctgcctgcgcctcaccgaggccgactacctgagctcgcacctgaccgagggcccacaccgcgtcgtggcgcacctgtacgcgcggcagctgacgctggagcagctgcacgccgtggagatcagcgcggtgcactcgcgcgaccacggcctggaggtgctcaacatgatgcccgaggagaagctggttgaggccctggctgcagccaccgagaagcagaagaaggccctggagaagttgctcccggcctcctcttgagggctgcctgagctggtggcaccctcccctgggccggaagactgggaattcctgctaagtgtggcttctagagtgtttgtgtgtaccccgcttctgactgcctagggcgagtgggcatcctgtcatcatctccactgtcccaagcagtcactaggtggcggccgggccagctggaacccagcccatcctctcaggcagagcagggtggtccgggcacactgggcctgcctctccagcctcaggatgctcttgtttattctgggctcagaccctcctcttgtacgtctcatcacagctggtagagacccaggagtgcctgattgtcccacaggggtggcgcacagctctgggaccactcagaagatgggatgtgtgggtggag

SEQ ID NO: 161574 - DNA, 1406 bp, Homo sapiens
  Payload ID: 11542
  Gene Symbol: NUDT16L1
  Gene Name: nudix (nucleoside diphosphate linked moiety X)-type motif 16-like 1
  ENST ID: ENST00000586536
  CDS Start-End: 21-599
gggacggggtcagtgccaagatgtcgacggcggcggttccggagctgaagcagatcagccgggtggaggcgatgcgcctagggccgggctggagccactcgtgccacgccatgctgtacgccgccaaccctgggcagctcttcggccgcatccccatgcgcttctcggtgctgatgcagatgcgtttcgacgggctgctgggcttccccgggggcttcgtggaccggcgcttctggtcgctggaggacggcctgaaccgggtgctgggcctgggcctgggctgcctgcgcctcaccgaggccgactacctgagctcgcacctgaccgagggcccacaccgcgtcgtggcgcacctgtacgcgcggcagctgacgctggagcagctgcacgccgtggagatcagcgcggtgcactcgcgcgaccacggcctggaggtggggccgccgcccgggccccgccccccgccccggggtttggctctggccccgtggaaggcaccgatgggtgctgggcctcgtgcgggtcccgctgtacacccagaaggaccgagtcggaggcttccccaacttcctgagcaacgccttcgtgagcacggctaagtgccagctcctctttgccctcaaggtgctcaacatgatgcccgaggagaagctggttgaggccctggctgcagccaccgagaagcagaagaaggccctggagaagttgctcccggcctcctcttgagggctgcctgagctggtggcaccctcccctgggccggaagactgggaattcctgctaagtgtggcttctagagtgtttgtgtgtaccccgcttctgactgcctagggcgagtgggcatcctgtcatcatctccactgtcccaagcagtcactaggtggcggccgggccagctggaacccagcccatcctctcaggcagagcagggtggtccgggcacactgggcctgcctctccagcctcaggatgctcttgtttattctgggctcagaccctcctcttgtacgtctcatcacagctggtagagacccaggagtgcctgattgtcccacaggggtggcgcacagctctgggaccactcagaagatgggatgtgtgggtggaggatgccttgtctcggtcagctcattcctgcctccttcctgagccagttcagggcctgggggagagccagcttggggtaggaagttaataatactgttaatttgggttgttgttggatttactttgctagattttctctttcaccacgtgtgaactgtgggtgaggtttcaaagtagcttcaccccacgtggcttggttcccagggacagtcagggcctcgggggcccagctatgtacaacgaagctgtcgaaggagaagacaataaagtcgctccgcagctgctctgtgtgtttctca

SEQ ID NO: 161575 - DNA, 1473 bp, Homo sapiens
  Payload ID: 11543
  Gene Symbol: NUDT17
  Gene Name: nudix (nucleoside diphosphate linked moiety X)-type motif 17
  Uniprot ID: P0C025
  ENST ID: ENST00000334513
  CDS Start-End: 13-999
cagagtcgcgttatggccgaggtgcgggtgcagctgctcctgtcccggcgtccggagtcggtgagcttcgcacggagtgtgtgtggcctcctgggagccggaccagggctcgggacgtggcccattcactgcagcttgaagcgaggacggcttgtcctctcgagcaggcccttcccaggcgcctccgctaggcttccgctccagcgaccccctttctgcccttttgcggccctggaggagcggcccagggtccctggggctgagctgcccacagatcgaggtgtggacctgggtgtggccgtcattctgcagtccagcgacaagactgtcttgctaacccgaagggcacgcaccctgagcgtttcccccaacctctgggtacccccgggtgggcacgtggaacttgaggaggagctgctggacggagggcttcgagaactttgggaggagagtggactacacctgccccagggccagttctcttgggtccctctgggtttatgggagtctgcctaccctcctaggctgagctggggtttacccaaataccatcacattgttctgtatctactcgtgatctcccaggaatcacagcagcagttgcaggcccggatccaaccaaacccaaatgaggtgagcgcccttatgtggctgacaccagatgtagctgctgcagtggctgccgcagaggatgggacagagacacccggacttctcccccaggacctaccaccctctgtccttgcagtggaactagaggaggatggaagagcccgacctctggtcctgcacatgtccaccctcctgcggatgatcccaaccatggcagaggacaaagagagagtcagcactggaaccaagtttgccctcaagctctggctgcaacatctgggcagaacacccccaccgtgtaaaagtgcagcttacctggacccagggccagcaaaggaagaatggaacatggaccctcttcccccaaaccaggggtctggaaagtgaagtgtaaaatcccctccctagcccatctccatgacactcacagaacattcacaacctttattatgggtgagagcttcactacaactttagaaataaaaagtaaaattacaacataggtcctaggccttggcgagcctgaaaaagaagattgggaaggagggcacagggtccttccacctccctggaaaggtgcagaatgagccaggcctaactacagggccatgagcctctagaagcttaggggggaataagaaacactgtgaacttagatatataaatagagagagacccaagcaataggccgggcctgactcccagacccctgcagatcatggctaaggccttacatcctcctctgtcatactggagtaggaggcaggggaagtcatctttggagtattttggtttttcttatttatgtacaaaaaagtccacatccacaatccaaaataaagttctctgtccatctctgaa

SEQ ID NO: 161576 - DNA, 1754 bp, Homo sapiens
  Payload ID: 11544
  Gene Symbol: NUDT18
  Gene Name: nudix (nucleoside diphosphate linked moiety X)-type motif 18
  ENST ID: ENST00000613958
  CDS Start-End: 120-521
ctcgtgagctcccggcccgctgccgcagggactgggagcgggctccgcagcgcactctagcccgcggctcggctcagtcggtctgcgaggatccggcccgccgccccccgggggacccgatggcctcggagggcctggcgggggcgctggcttccgtgctggctggccaggggtccagcgtgcacagctgcgactcggcgccggccggggagccgccggcgcccgtgcggctgcggaagaacgtgtgctacgtggtgctggccgtgttcctcagcgagcaggatgaggtgctactgatccaggaggccaagagggagtgccgggggtcgtggtacctgcctgcggggagaatggagccaggggagaccatcgtggaggcgctgcagcgggaggtgaaggaggaggcggggctgcactgtgagcccgagacactgctgtccgtggaggagcggggcccctcctgggtccgcttcgtgttcctcgctcgccccacaggtatggcccacctggaggcagtgtgaacagggccagttgacacctttcccccagctcctcggtgaggtgagcccctctacagccagtcctgttatggctggcacagcctggcatgggcagattccagcctttgggctgggggcctctctcctgggtcagggatgtctgttgactctgccagagctgcacttctctccacacagaccctccctgccccatcccccacatctcccccaggtggaattctcaagacttccaaggaggccgatgcggagtccctgcaggctgcctggtacccacggacctccctgcccactccgctgcgagcccatgacatcctgcacctggttgaactagccgcccagtatcgccagcaagccaggcaccctctcattctgccccaagagctaccctgtgatctggtctgccagcggctcgtggctacctttaccagcgcccagacagtgtgggtgttagtgggcacagtggggatgcctcacttgcctgtcactgcctgtggcctcgaccctatggagcagaggggtggcatgaagatggccgtcctgcggctgctgcaggagtgtctgaccctgcaccacttggtggtggagatcaaggggttgcttggactgcagcacctgggccgagatcacagtgatggcatctgtttgaatgtgctggtgaccgtggcttttcggagcccagggatccaggatgaacccccaaaagttcggggtgagaacttctcttggtggaaggtgatggaggaagacctgcaaagccagctcctccagcggcttcagggatcctctgttgtcccagtgaacagatagagaggtgggggaggtgacagggagctaggcagccgtgctccctccagtgcggacttgtctccctctgagggaggcaagaggctggcgatcagggatcttgttgcattgggagcaggggcggctctcctggtccccaggagagatgctttgaggagcattcctctagattgcacaagggacagtgcctttaaccaagcgaggagtccaaagctcaggacctgactaccctgagggcacgctgacgcctcttcccagggggatggggagctttctgcacccccagtggcatctcctcatcacgttctgtgccgtccttgggaaaggcctgcattctgatccttccaggcccttcgagcatggaggggcactggggaaggtcccccgagggaggagcacgttgctgagtaaagaggtgttactcacctt

SEQ ID NO: 161577 - DNA, 1497 bp, Homo sapiens
  Payload ID: 11544
  Gene Symbol: NUDT18
  Gene Name: nudix (nucleoside diphosphate linked moiety X)-type motif 18
  Uniprot ID: Q6ZVK8
  ENST ID: ENST00000611621
  CDS Start-End: 98-1069
ccgcagggactgggagcgggctccgcagcgcactctagcccgcggctcggctcagtcggtctgcgaggatccggcccgccgccccccgggggacccgatggcctcggagggcctggcgggggcgctggcttccgtgctggctggccaggggtccagcgtgcacagctgcgactcggcgccggccggggagccgccggcgcccgtgcggctgcggaagaacgtgtgctacgtggtgctggccgtgttcctcagcgagcaggatgaggtgctactgatccaggaggccaagagggagtgccgggggtcgtggtacctgcctgcggggagaatggagccaggggagaccatcgtggaggcgctgcagcgggaggtgaaggaggaggcggggctgcactgtgagcccgagacactgctgtccgtggaggagcggggcccctcctgggtccgcttcgtgttcctcgctcgccccacaggtggaattctcaagacttccaaggaggccgatgcggagtccctgcaggctgcctggtacccacggacctccctgcccactccgctgcgagcccatgacatcctgcacctggttgaactagccgcccagtatcgccagcaagccaggcaccctctcattctgccccaagagctaccctgtgatctggtctgccagcggctcgtggctacctttaccagcgcccagacagtgtgggtgttagtgggcacagtggggatgcctcacttgcctgtcactgcctgtggcctcgaccctatggagcagaggggtggcatgaagatggccgtcctgcggctgctgcaggagtgtctgaccctgcaccacttggtggtggagatcaaggggttgcttggactgcagcacctgggccgagatcacagtgatggcatctgtttgaatgtgctggtgaccgtggcttttcggagcccagggatccaggatgaacccccaaaagttcggggtgagaacttctcttggtggaaggtgatggaggaagacctgcaaagccagctcctccagcggcttcagggatcctctgttgtcccagtgaacagatagagaggtgggggaggtgacagggagctaggcagccgtgctccctccagtgcggacttgtctccctctgagggaggcaagaggctggcgatcagggatcttgttgcattgggagcaggggcggctctcctggtccccaggagagatgctttgaggagcattcctctagattgcacaagggacagtgcctttaaccaagcgaggagtccaaagctcaggacctgactaccctgagggcacgctgacgcctcttcccagggggatggggagctttctgcacccccagtggcatctcctcatcacgttctgtgccgtccttgggaaaggcctgcattctgatccttccaggcccttcgagcatggaggggcactggggaaggtcccccgagggaggagcacgttgctgagtaaagaggtgttactcaccttgc

SEQ ID NO: 161578 - DNA, 2967 bp, Homo sapiens
  Payload ID: 11545
  Gene Symbol: NUDT19
  Gene Name: nudix (nucleoside diphosphate linked moiety X)-type motif 19
  Uniprot ID: A8MXV4
  ENST ID: ENST00000397061
  CDS Start-End: 1-1128
atgagcagctccctgcggccgggccccagccgctggcggcgggcggccagcatcgtcctggcggctggctggtcgcgcccggagaccgccaccccgccgtcgcgcccgccgccggccgagggcttccggctgctgctgctgcagcgctccccgcaccaaggcttcatgccgggcgcgcacgtcttctccggcggagtgctggatgcggccgaccgctcggcggactggctgggcctcttcgcgccgcaccacgggccgccgcgcttcggcctgggcccggcgccattcagccgcaccgctttcccgtcgctgcccgacaccgatgaccacaagaccgacaacactgggacgctgcctgaggacgtagccttccgcatctgcgccgtgcgggaggcctttgaggaggcgggcgtgctgctgctgcggcccaggacttccccaccaggcccagcacccgggcctggcctcgccctggagccaccgccgggcctggcctcctggcgcgaccgcgtgcgccaggacccgcgccacttcctgcggctgtgcgcccacctcgactgcacacccgacatctgggcgctgcacaactggagcgcctggctcacccctttcttgcggggcaccactcgccgctttgacacggccttcttcctgtgctgcctgcgcgagccgccgcccgtctaccccgacttggcggaggtggtgggctaccagtggtcatctccatcagaggcaactgaaagtttcttatcaaaagaaatttggttgccacccccacagttctacgaagtgagaagacttgcaaactttgcctctctctctgacttgcacaaattttgtttgggtcgtgcattagaaggactggaaaggtggctgccgatcatcttgttaactgctgatgggatggtccatcttttaccaggtgatgagctatatttagaagattcagactttttggaaaatcttatgtctactgaaaaaaagactgaggaaatcatgaaggaaggcaagcagtttcaccggatagtgacataccatcgccacctttatgatatccacgtgactgttcagccaaagtataaacacgtttatcctaagaactctgtagtaagaaaaagccatttgtagggtgcttaagcttgtttgtaaaatggcctacttgaagtcctcatgaataatgagggttgactttcatttgcttgaaacttaaggaagtttgtgcctataaaagttactgcaattcagtatttctttatttttttcgagacagagtctcaatctgtcgcccaggctggagtgcagtggcatgatataggctcactggaagctctgcctcaggggttcatgccattctcctgcctcagcctcccgagtagctgggactacaggcgcccgccaccatgcccagctaatttttttttgtatttttagtagagacgggttttcaccgtgttagccaggatggtctcaatctcttgacctcgtgatacgcccgccttggcctcccaaagtgctgggattacaggtgtgggccaccacacccagcctttttttttttttttttttttttttttgagacagagtgtctcactcttgcccagaacccaggctggagtgcagtggcccaatctcggctcactgcaacctccacctcccaggttccagcgattctcatgcctcagcctcctgagtagctgggactataggcatgcaccaccatgccccactaaattttgtatttttagtagaaacagagtttcaccatgttggccaggctggtctcgatctcctgacctcatgatctgcccgccttggcctcccaaagtgtgggattacaggcgtgagccactgtgcccagcatggtgtttcttatatcaggtgttttagggagctcgcttgcttattccattctttaatccttacagtgtgccacacgtataaagtttataacgtattaatgatctcattacccaaaaccagaacataatttcacaagggttcctacttctgtattgttttattatctcaaaaatttaaataacatgttctgctgtttattgttcttgttatccactgtattagcaccttccctgatgtgctttggaggttgatcaatgaatttctgagactttctgctggaattactttaagggtgtcttattagatgatgaaaagttggctgagacacccttcaagtgaccatgtcattgttttcttgctatgtctttagcttaatgattaagatacaattctttttaaaatcaaatggtattagttattatgtttcccaaattagaaatcgattttagttaacattttattttattttattctattttatttatttttgagacagagtctcgctctgttgcccaggctggagtacaatggcgcaatctcagctcactccaatctccgcctcccaggttcaagcgatttttctgcctcagcctcccgagtagctgggattacaggcacccactaccatgcccagctaatctttgtatttttagtagagacggggtttcaccatgttggccagtccggtctcgaacttctgacctgaggtgatctgcccaccttggcctcacaaagtgctgagattacaggcttgagccaccacgcctggcctagttagcattttaaagaaacacaaagccataacaaaaaccatcattgtttgtattccacactgttaatgaatgtaaagaggttagaaatgtagtgtttgattaatgatgtttatttttactgtatttaatatgagtaatttttcatcatctttcaagaggaataatgtttattgattaaaggtgagaaatgatagttaagacaccaattccatgtccagatctttgactgtatcatgcattgtacaattgatttcatattttatgaaatgccttaattttcctactataacataaagacaatgatgaataaagtttatgtgtatgattaaatcca

SEQ ID NO: 161579 - DNA, 960 bp, Homo sapiens
  Payload ID: 11546
  Gene Symbol: NUDT2
  Gene Name: nudix (nucleoside diphosphate linked moiety X)-type motif 2
  Uniprot ID: P50583
  ENST ID: ENST00000346365
  CDS Start-End: 246-689
ctattgatgggcccaagcgtaaccaggctcttctgattggccggtgtacttcagtttccgtccaaggtccgcctcctacctccttctgcttcggtgcgtttgcttctgaggatctccagtgtcacaacaaacacatgccagccctgttttacagggagccctggaggagttgggatagaggccacattgactgagggtagttgccagggtcctgcagttatacacaaagtccttaggataagaccatggccttgagagcatgtggcttgatcatcttccgaagatgcctcattcccaaagtggacaacaatgcaattgagtttttactgctgcaggcatcagatggcattcatcactggactcctcccaaaggccatgtggaaccaggagaggatgacttggaaacagccctgagggagacccaagaggaagcaggcatagaagcaggccagctgaccattattgaggggttcaaaagggaactcaattatgtggccaggaacaagcctaaaacagtcatttactggctggcggaggtgaaggactatgacgtggagatccgcctctcccatgagcaccaagcctaccgctggctggggctggaggaggcctgccagttggctcagttcaaggagatgaaggcagcgctccaagaaggacaccagtttctttgctccatagaggcctgagctgactggagcagagtcatttgcttcagcaggatccttgtgggccttctaagatgaagccaccctcaggtccagggaaggttgtgctggtatttggctcatgacagccaagagcagatttgtgaaatcggctcaactcccaggtgagagcaagcaaaaatcttggctgggtggaaaggaaggcaaaagagtaaaaattaaaaaggccaggcccagtaagtgtaccttgtactttataaataaacctcaagcagctcaaggttgtccttct

SEQ ID NO: 161580 - DNA, 1002 bp, Homo sapiens
  Payload ID: 11546
  Gene Symbol: NUDT2
  Gene Name: nudix (nucleoside diphosphate linked moiety X)-type motif 2
  Uniprot ID: P50583
  ENST ID: ENST00000379155
  CDS Start-End: 288-731
ctattgatgggcccaagcgtaaccaggctcttctgattggccggtgtacttcagtttccgtccaaggtccgcctcctacctccttctgcttcggttctacagtgatggggtgcttccttttggcttctggaatgggtgcgtttgcttctgaggatctccagtgtcacaacaaacacatgccagccctgttttacagggagccctggaggagttgggatagaggccacattgactgagggtagttgccagggtcctgcagttatacacaaagtccttaggataagaccatggccttgagagcatgtggcttgatcatcttccgaagatgcctcattcccaaagtggacaacaatgcaattgagtttttactgctgcaggcatcagatggcattcatcactggactcctcccaaaggccatgtggaaccaggagaggatgacttggaaacagccctgagggagacccaagaggaagcaggcatagaagcaggccagctgaccattattgaggggttcaaaagggaactcaattatgtggccaggaacaagcctaaaacagtcatttactggctggcggaggtgaaggactatgacgtggagatccgcctctcccatgagcaccaagcctaccgctggctggggctggaggaggcctgccagttggctcagttcaaggagatgaaggcagcgctccaagaaggacaccagtttctttgctccatagaggcctgagctgactggagcagagtcatttgcttcagcaggatccttgtgggccttctaagatgaagccaccctcaggtccagggaaggttgtgctggtatttggctcatgacagccaagagcagatttgtgaaatcggctcaactcccaggtgagagcaagcaaaaatcttggctgggtggaaaggaaggcaaaagagtaaaaattaaaaaggccaggcccagtaagtgtaccttgtactttataaataaacctcaagcagctcaaggttgtccttct

SEQ ID NO: 161581 - DNA, 1075 bp, Homo sapiens
  Payload ID: 11546
  Gene Symbol: NUDT2
  Gene Name: nudix (nucleoside diphosphate linked moiety X)-type motif 2
  Uniprot ID: P50583
  ENST ID: ENST00000379158
  CDS Start-End: 359-802
ctattgatgggcccaagcgtaaccaggctcttctgattggccggtgtacttcagtttccgtccaaggtccgcctcctacctccttctgcttcggggagggcatgggatcagctacctgtttctgcctcaaccacggaccaataatatgagatctttgttcaccagttctacagtgatggggtgcttccttttggcttctggaatgggtgcgtttgcttctgaggatctccagtgtcacaacaaacacatgccagccctgttttacagggagccctggaggagttgggatagaggccacattgactgagggtagttgccagggtcctgcagttatacacaaagtccttaggataagaccatggccttgagagcatgtggcttgatcatcttccgaagatgcctcattcccaaagtggacaacaatgcaattgagtttttactgctgcaggcatcagatggcattcatcactggactcctcccaaaggccatgtggaaccaggagaggatgacttggaaacagccctgagggagacccaagaggaagcaggcatagaagcaggccagctgaccattattgaggggttcaaaagggaactcaattatgtggccaggaacaagcctaaaacagtcatttactggctggcggaggtgaaggactatgacgtggagatccgcctctcccatgagcaccaagcctaccgctggctggggctggaggaggcctgccagttggctcagttcaaggagatgaaggcagcgctccaagaaggacaccagtttctttgctccatagaggcctgagctgactggagcagagtcatttgcttcagcaggatccttgtgggccttctaagatgaagccaccctcaggtccagggaaggttgtgctggtatttggctcatgacagccaagagcagatttgtgaaatcggctcaactcccaggtgagagcaagcaaaaatcttggctgggtggaaaggaaggcaaaagagtaaaaattaaaaaggccaggcccagtaagtgtaccttgtactttataaataaacctcaagcagctcaaggttgtccttctaa

SEQ ID NO: 161582 - DNA, 825 bp, Homo sapiens
  Payload ID: 11546
  Gene Symbol: NUDT2
  Gene Name: nudix (nucleoside diphosphate linked moiety X)-type motif 2
  Uniprot ID: P50583
  ENST ID: ENST00000618590
  CDS Start-End: 111-554
ctattgatgggcccaagcgtaaccaggctcttctgattggccggtgtacttcagtttccgtccaaggtccgcctcctacctccttctgcttcggtccttaggataagaccatggccttgagagcatgtggcttgatcatcttccgaagatgcctcattcccaaagtggacaacaatgcaattgagtttttactgctgcaggcatcagatggcattcatcactggactcctcccaaaggccatgtggaaccaggagaggatgacttggaaacagccctgagggagacccaagaggaagcaggcatagaagcaggccagctgaccattattgaggggttcaaaagggaactcaattatgtggccaggaacaagcctaaaacagtcatttactggctggcggaggtgaaggactatgacgtggagatccgcctctcccatgagcaccaagcctaccgctggctggggctggaggaggcctgccagttggctcagttcaaggagatgaaggcagcgctccaagaaggacaccagtttctttgctccatagaggcctgagctgactggagcagagtcatttgcttcagcaggatccttgtgggccttctaagatgaagccaccctcaggtccagggaaggttgtgctggtatttggctcatgacagccaagagcagatttgtgaaatcggctcaactcccaggtgagagcaagcaaaaatcttggctgggtggaaaggaaggcaaaagagtaaaaattaaaaaggccaggcccagtaagtgtaccttgtactttataaataaacctcaagcagctcaaggttgtccttct

SEQ ID NO: 161583 - DNA, 4436 bp, Homo sapiens
  Payload ID: 11547
  Gene Symbol: NUDT21
  Gene Name: nudix (nucleoside diphosphate linked moiety X)-type motif 21
  Uniprot ID: O43809
  ENST ID: ENST00000300291
  CDS Start-End: 174-857
cctgccgccagaggctccgggttcacttccggcgtgcctacgcctcctcttgcgctgtcctgttaatggcgggcagtagccgctgaggggattgcagataaccgcttcccgcacggggaaagtctaccctgcctgccactttctgctcgccgtcagcgccggagctcgccagcatgtctgtggtaccgcccaatcgctcgcagaccggctggccccggggggtcactcagttcggcaacaagtacatccagcagacgaagcccctcaccctggagcgcaccatcaacctgtaccctcttaccaattatacttttggtacaaaagagcccctctacgagaaggacagctctgttgcagccagatttcagcgcatgagggaagaatttgataaaattggaatgaggaggactgtagaaggggttctgattgtacatgagcaccggctaccccatgtgttactgctgcagctgggaacaactttcttcaaactacctggtggtgaacttaacccaggagaagatgaagttgaaggactaaaacgcttaatgacagagatactgggtcgtcaggatggagttttgcaagactgggtcattgacgattgcattggtaactggtggagaccaaattttgaacctcctcagtatccatatattcctgcacatattacaaagcctaaggaacataagaagttgtttctggttcagcttcaagaaaaagccttgtttgcagtccctaaaaattacaagctggtagctgcaccattgtttgaattgtatgacaatgcaccaggatatggacccatcatttctagtctccctcagctgttgagcaggttcaattttatttacaactgaattcctgcgcagtggagaagtaaaagaagccgcttgtctctgtgagcacagctatatacagtgtagaataaatgtggtagaaaagtttttttggttttatctcttttgcgatccctaaattgccacctttctattgtttgaatagtaaaattaatatgaagaactagatagtggtgtaaacaaatgtgataatgtttatttactttcggttctgctcatacttttttgtacaacattaaagaaaatggactttttttattttaatttctcattaaacttctaaaattcttataggtgaggatcatttttccccccaccttaggatggtgaatgttgcaacacaatgacaggtttaagtcagtcaagtttattggacccttgctttgataccattcttgggcacatactccaagattgtattagatttttgtgatgaagagcttccattacttctgaaaactatatttatctgagtgagtccaaggtgcaactcctaaatgaattgtgttgcagagaactcccagtataattcactgaccagtacattttataaccatccaggccttggtttgcaagcaacagaccttaaacatacaggaaactattaaaattggctcgatcagtagtcataggaattggtataagaagagactcatttagagctcagagttttcttcacataatgggggtattaattatttgtgctgttgcgaaattatgtgtcttattcttaaagccatggtaaaaatagggatctgtgaaggaaatttctaaaattggatgtattaggttttgaactctgagattgcacaaatattcaattaacttgaagttgtgtacatagagaagaaaatttggttttagcaaatgacagagccttcaaaaatatttttggaataatgtgaatcaaccgaaaactgggggcaaggcagaggacaggttttctcaggttaagagaaaaacgaaattttaaaaactttaaaaaatactgataaattcggatcaaatttgggggaataaaaaatattagagcaaaggagtttgctggttgtgtcattatttaatgatcaaagtatagcatgtatgccttattacagacttgttgactataggcttaatgtaaaaaggaatcttgccagatgtagctacttaaggaaaaaagggtttttaatagaaatgaacttttgattagtatggtgccagtcacagggctattttcctgaatattgggtgatgtcaaaggtatatgatacttgaggaaatcaggccaagtgtagctgagcaattaataaacactcaagtttttttagttggggtcatgtcaaaccctcacatggtggttaagtagtgactaactgtgcatgtccttcatggtaggtgagcaccagtctccatgatcaaaaatgccccagtttcctttgaaaaagccactagttctgtgaattgtccttttccctcctgcccctaacagtcctacccctctagcctacattagcatatttctcatgtaatgtattttgctggtaagctcatccattagctgcgtccttcagctattcctttagattggaggaagtggatatgaagatggattgattcagctcaccttccatgattgcttttgagggaaaagctacagtggccacatttcagatgttcacttttgcaatttgtggagggtggagagaggtagacttttgttgtgtgttttataaagtactctcagtaaggagtgtttgagttgaagagtcatctgattcgaggccactcatgttctttgtaacttaaactttgaccaagaaattcttcacttctcacttcttcacttcttcccaatatacagtaagtacgtgagccagtcatccatacactaaggcctagttgagaaaaacctttgattcaggatggctgggttactaaccttgaaatgtaagagatctggttttgaatgtaaaagttgcaacacacaaacggaagtcttaaaaactttttgctctggtcagttacaggtggatccccaataatctgtttttggttttctgatggaaataatagaattaggggaaatcaaatctggttggtaggtgtctacagtattagaagagggtataagggcactgtttaacactaagttctaatacttccagaaactgtgcattccagatctacatactaaatgctcttatcattttgaaatgggctcttgattaatagacccatattttttagtggcttctatgttgtatatttgtctaaaatgaaagctcttttgcgttctaaaactacaatatatgtcatcttattttccctgagtatccaagtatagtgcagattctatgtaaaactactaaatgacactggaatatgtttagtagattagggggaaaaactataaaggtttatacaattgtttgtagttacatttaggatggacttatccctttggagaagagtgaagtttgttttttcgccatgtgatgaagaccactgtgattttttaaaaaagtagataatacttaaaatggcgtaataattctgcacttgaatttgtactgttaacagcacatttggaagattttaaaactttttattgtcttataaatagcattcacttattattttggatatttaagggttccattaagttaacactgtatttggacaaagtgtgaccaaattagccagtctgttttcttccatgtttaattagaagtgagaggtagaagtacttcaaattcaacaggccagcaagcaatcggcttaaaattccctttcttaaatgttgtgctcttatgttctcggctttttaatgactttatttttacagtacttgttcagtcacttgagatgaaatgcttggggtagcttttccatcctcaaacttaatgtttttactagttcatagtgtttggaacagtatatgccaatcactgagactgcatcagagtttgcaattttgtatgtttcattgccaaagaaggcttagtggttgttgactgtagtataagtcagctttctgtagcataagatttgattttcccatacttacttcacttgttatacatcactgattatttgggttaaactggactcatttcaagcagtttgcttttgttcaaatcgtgatgagaaacctaatactgtaatttgatttgagccataaaacacattttaatattagcttgtattatagttattaagcttgtttttgtggaaaaaaacttactaaaacctaggtaactctagattaggccagttcaggtgtattttgtatcttagtaatggatcatatcgtaaaaatagagataagttgggaagatatattgattatgctgttctgttgagggaaaggtcatgtatttagaaatttaaacttttggttattgtgttcacatcatagtattcaagcatcatttatagtttggttttgagaacttttctggtattacgtttatggcaaatgtataaaagaaacaagttttggttatatttttatatttgtaaagtaagtttggttaaagtgatcactgttctttttttattttattgtcatttcaataaaaaatatttgaaagagaa

SEQ ID NO: 161584 - DNA, 581 bp, Homo sapiens
  Payload ID: 11547
  Gene Symbol: NUDT21
  Gene Name: nudix (nucleoside diphosphate linked moiety X)-type motif 21
  ENST ID: ENST00000566340
  CDS Start-End: 133-581
ctgaagcctgcaagcattagtgtgtcgctcccattcaccgactttccgaggtaccctcttaccaattatacttttggtacaaaagagcccctctacgagaaggacagctctgttgcagccagatttcagcgcatgagggaagaatttgataaaattggaatgaggaggactgtagaaggggttctgattgtacatgagcaccggctaccccatgtgttactgctgcagctgggaacaactttcttcaaactacctggtggtgaacttaacccaggagaagatgaagttgaaggactaaaacgcttaatgacagagatactgggtcgtcaggatggagttttgcaagactgggtcattgacgattgcattggtaactggtggagaccaaattttgaacctcctcagtatccatatattcctgcacatattacaaagcctaaggaacataagaagttgtttctggttcagcttcaagaaaaagccttgtttgcagtccctaaaaattacaagctggtagctgcaccattgtttgaattgtatgacaatgcaccaggatatggacccatcatttctagtctccc

SEQ ID NO: 161585 - DNA, 385 bp, Homo sapiens
  Payload ID: 11547
  Gene Symbol: NUDT21
  Gene Name: nudix (nucleoside diphosphate linked moiety X)-type motif 21
  ENST ID: ENST00000568822
  CDS Start-End: 173-385
atttcatcttcacatctccttactgatatattggagctggctcttgcaacagagatgtgtaatggctatccttaattctttctaactcaggtaccctcttaccaattatacttttggtacaaaagagcccctctacgagaaggacagctctgttgcagccagatttcagcgcatgagggaagaatttgataaaattggaatgaggaggactgtagaaggggttctgattgtacatgagcaccggctaccccatgtgttactgctgcagctgggaacaactttcttcaaactacctggtggtgaacttaacccaggagaagatgaagttgaaggactaaaacgcttaatgacagagatactgggtcgtcaggatggagttttgcaa

SEQ ID NO: 161586 - DNA, 1094 bp, Homo sapiens
  Payload ID: 11548
  Gene Symbol: NUDT22
  Gene Name: nudix (nucleoside diphosphate linked moiety X)-type motif 22
  Uniprot ID: Q9BRQ3
  ENST ID: ENST00000279206
  CDS Start-End: 157-1068
ggcggctggtgagcgcccgctggaggctggagcttccgggccctggaaaggggtccccgcgcgccccgggtcggaggcagacccctgggtttgggggacatgggcatttggggcgcctgaacccaagacctctggatgagctgccccgttcagaccatggatcctgaggtgaccttgctgctgcagtgccctggcgggggcctgccccaggagcagatacaggccgagctgagccccgcccatgaccgtcgcccactgccaggtggggacgaggccatcactgccatctgggagacccggctaaaggcccaaccctggctcttcgacgcccccaagttccgcctgcactcagccaccctggcgcctattggctctcgggggccacagctgctcctgcgcctgggccttacttcctaccgagacttcctgggcaccaactggtccagctcagctgcctggctgcgacagcagggtgccaccgactggggtgacacgcaggcctatctggcggacccactgggggtgggcgctgcactagccacagccgatgacttccttgtcttcctgcgccgctcccggcaggtggctgaggcccctgggctggtggacgtacctggtgggcaccctgagcctcaggccctgtgccctggtggcagcccccagcaccaggacctcgctgggcagctggtggtacatgaactcttttccagtgtccttcaggagatctgtgatgaggtgaacctgccgctgctcaccctgagccagcccctgctgttgggcatcgcccgaaatgagaccagtgctggccgagccagtgccgagttctatgtccagtgcagcctgacttctgagcaggtgaggaagcactacctgagtgggggacccgaggcccacgagtctacaggaatcttctttgtggagacacagaacgtgcagagattgctcgagacggagatgtgggctgaactctgcccctcggccaaaggcgccatcatcctctacaaccgggttcagggaagtcccactggagcggccctagggtccccagccctactcccgccgctctgaaaataataaacgactttattcttgga

SEQ ID NO: 161587 - DNA, 876 bp, Homo sapiens
  Payload ID: 11548
  Gene Symbol: NUDT22
  Gene Name: nudix (nucleoside diphosphate linked moiety X)-type motif 22
  ENST ID: ENST00000428347
  CDS Start-End: 45-876
acaggcctggccgtatcctcccccagagctgccccgttcagaccatggatcctgaggtgaccttgctgctgcagtgccctggcgggggcctgccccaggagcagatacaggccgagctgagccccgcccatgaccgtcgcccactgccaggtggggacgaggccatcactgccatctgggagacccggctaaaggcccaaccctggctcttcgacgcccccaagttccgcctgcactcagccaccctggcgcctattggctctcgggggccacagctgctcctgcgcctgggccttacttcctaccgagacttcctgggcaccaactggtccagctcagctgcctggctgcgacagcagggtgccaccgactggggtgacacgcaggcctatctggcggacccactgggggtgggcgctgcactagccacagccgatgacttccttgtcttcctgcgccgctcccggcaggtggctgaggcccctgggctggtggacgtacctggtgggcaccctgagcctcagctggacctctggttgtctgtcagggaaaggacaccagactcaggatcactaactctcttacactgtgccacatcagaccctcaaggccagcaggccctgtgccctggtggcagcccccagcaccaggacctcgctgggcagctggtggtacatgaactcttttccagtgtccttcaggagatctgtgatgaggtgaacctgccgctgctcaccctgagccagcccctgctgttgggcatcgcccgaaatgagaccagtgctggccgagccagtgccgagttctatgtccagtgcagcctgacttctgagcaggtgaggaagcactacctgagtgggggacccgaggcccacg

SEQ ID NO: 161588 - DNA, 986 bp, Homo sapiens
  Payload ID: 11548
  Gene Symbol: NUDT22
  Gene Name: nudix (nucleoside diphosphate linked moiety X)-type motif 22
  Uniprot ID: Q9BRQ3
  ENST ID: ENST00000441250
  CDS Start-End: 157-969
ggcggctggtgagcgcccgctggaggctggagcttccgggccctggaaaggggtccccgcgcgccccgggtcggaggcagacccctgggtttgggggacatgggcatttggggcgcctgaacccaagacctctggatgagctgccccgttcagaccatggatcctgaggtgaccttgctgctgcagtgccctggcgggggcctgccccaggagcagatacaggccgagctgagccccgcccatgaccgtcgcccactgccaggtggggacgaggccatcactgccatctgggagacccggctaaaggcccaaccctggctcttcgacgcccccaagttccgcctgcactcagccaccctggcgcctattggctctcgggggccacagctgctcctgcgcctgggccttacttcctaccgagacttcctgggcaccaactggtccagctcagctgcctggctgcgacagcagggtgccaccgactggggtgacacgcaggcctatctggcggacccactgggggtgggcgctgcactagccacagccgatgacttccttgtcttcctgcgccgctcccggcaggtggctgaggcccctgggctggtggacgtacctggtgggcaccctgagcctcaggtgaacctgccgctgctcaccctgagccagcccctgctgttgggcatcgcccgaaatgagaccagtgctggccgagccagtgccgagttctatgtccagtgcagcctgacttctgagcaggtgaggaagcactacctgagtgggggacccgaggcccacgagtctacaggaatcttctttgtggagacacagaacgtgcagagattgctcgagacggagatgtgggctgaactctgcccctcggccaaaggcgccatcatcctctacaaccgggttcagggaagtcccactggagcggccctagggtccccagccctactcccgccgctctgaaaataataaacgacttt

SEQ ID NO: 161589 - DNA, 1071 bp, Homo sapiens
  Payload ID: 11548
  Gene Symbol: NUDT22
  Gene Name: nudix (nucleoside diphosphate linked moiety X)-type motif 22
  ENST ID: ENST00000535000
  CDS Start-End: 364-861
ggcggctggtgagcgcccgctggaggctggagcttccgggccctggaaaggggtccccgcgcgccccgggtcggaggcagacccctgggtttgggggacatgggcatttggggcgcctgaacccaagacctctggatggtagggatgcccgggcgtcctggataccctgcgggactcggggctcctgcggggaagatggcacgttttactgcccaaggagtggtcaggggggtggagaagcgctgcggataccctcaggaggtctgcgacagagggggctagctgcgcagcccaggagtggtagtggcccccctggatgacaggcctggccgtatcctcccccagagctgccccgttcagaccatggatcctgaggtgaccttgctgctgcagtgccctggcgggggcctgccccaggagcagatacaggccgagctgagccccgcccatgaccgtcgcccactgccaggtggggacgaggccatcactgccatctgggagacccggctaaaggcccaaccctggctcttcgacgcccccaagttccgcctgcactcagccaccctggcgcctattggctctcgggggccacagctgctcctgcgcctgggccttacttcctaccgagacttcctgggcaccaactggtccagctcagctgcctggctgcgacagcagggtgccaccgactggggtgacacgcaggcctatctggcggacccactgggggtgggcgctgcactagccacagccgatgacttccttgtcttcctgcgccgctcccggcaggtggctgaggcccctgggctggtggacgtacctggtgggcaccctgagcctcaggtgcagcctgacttctgagcaggtgaggaagcactacctgagtgggggacccgaggcccacgagtctacaggaatcttctttgtggagacacagaacgtgcagagattgctcgagacggagatgtgggctgaactctgcccctcggccaaaggcgccatcatcctctacaaccgggttcagggaagtcccactggagcggccctagggtccccagccctactcccgcc

SEQ ID NO: 161590 - DNA, 659 bp, Homo sapiens
  Payload ID: 11548
  Gene Symbol: NUDT22
  Gene Name: nudix (nucleoside diphosphate linked moiety X)-type motif 22
  ENST ID: ENST00000543358
  CDS Start-End: 49-546
aggggcggagcctgagggacccggcggctgagctgccccgttcagaccatggatcctgaggtgaccttgctgctgcagtgccctggcgggggcctgccccaggagcagatacaggccgagctgagccccgcccatgaccgtcgcccactgccaggtggggacgaggccatcactgccatctgggagacccggctaaaggcccaaccctggctcttcgacgcccccaagttccgcctgcactcagccaccctggcgcctattggctctcgggggccacagctgctcctgcgcctgggccttacttcctaccgagacttcctgggcaccaactggtccagctcagctgcctggctgcgacagcagggtgccaccgactggggtgacacgcaggcctatctggcggacccactgggggtgggcgctgcactagccacagccgatgacttccttgtcttcctgcgccgctcccggcaggtggctgaggcccctgggctggtggacgtacctggtgggcaccctgagcctcaggtgcagcctgacttctgagcaggtgaggaagcactacctgagtgggggacccgaggcccacgagtctacaggaatcttctttgtggagacacagagaggctccggggcggaagcagctccgtaagatatac

SEQ ID NO: 161591 - DNA, 643 bp, Homo sapiens
  Payload ID: 11548
  Gene Symbol: NUDT22
  Gene Name: nudix (nucleoside diphosphate linked moiety X)-type motif 22
  ENST ID: ENST00000534929
  CDS Start-End: 1-171
tctacaggaatcttctttgtggagacacagaacgtgcagagattgctcgagacggagatgtgggctgaactctgcccctcggccaaaggcgccatcatcctctacaaccgggttcagggaagtcccactggagcggccctagggtccccagccctactcccgccgctctgaaaataataaacgactttattcttggattccgttggcatctgctatttctgtaacagagaggagcaatgggccctgagtgtagaggctccggggcggaagcagctccgtaagatatacctcgctgcagaggggagcaacagcggaacggagacacggtggccgggccgaaaacgtcacaaagccgcagagagcgggctctgtcccgcccgctccccaggtggacgtggtcttggcatccacgccaatgagaatgtgagggcggggcctgaatagacgcaggaaatggcgacggccgcgggtctgtgagcagcgggggcggggcctggttgtggcccctccttctcccgtccccaagttccctgggtgggaacggggtcttggggtccctggctgggtggccagaccccgaagccagcgctgggaagggctgcggatgcccgggtcagaggaaggggcaggtccaaggacacgc

SEQ ID NO: 161592 - DNA, 746 bp, Homo sapiens
  Payload ID: 11548
  Gene Symbol: NUDT22
  Gene Name: nudix (nucleoside diphosphate linked moiety X)-type motif 22
  ENST ID: ENST00000539325
  CDS Start-End: 376-746
caaagcctcaggaagtgagcgctgggtgggagtatacggctcattaagttcaccacccccaagtccctgctgcagagagggaaactaaggcccagcaggccagacttgcccaaggtcacacggtcagccaggagcgcagggaggccgagccccgcaccccagatcgctggtgcgccccgcagggtggtccgggaggcagggccgacgtgccgacggaccgggcggaagcgtcggggcggcggggacaaacctccaggatcctcgaccgcggcggacccgccaatgaaaagccgcgtggaaagggggcgggcacttccgcttcggggaaggggcggagcctgagggacccggcggctgagctgccccgttcagaccatggatcctgaggtgaccttgctgctgcagtgccctggcgggggcctgccccaggagcagatacaggccgagctgagccccgcccatgaccgtcgcccactgccaggtggggacgaggccatcactgccatctgggagacccggctaaaggcccaaccctggctcttcgacgcccccaagttccgcctgcactcagccaccctggcgcctattggctctcgggggccacagctgctcctgcgcctgggccttacttcctaccgagacttcctgggcaccaactggtccagctcagctgcctggctgcgacagcagggtgccaccgactggggtgacacgcaggcctatctggcggacccactgggggtggg

SEQ ID NO: 161593 - DNA, 9905 bp, Homo sapiens
  Payload ID: 11549
  Gene Symbol: NUDT3
  Gene Name: nudix (nucleoside diphosphate linked moiety X)-type motif 3
  Uniprot ID: O95989
  ENST ID: ENST00000607016
  CDS Start-End: 313-831
gccttacgccgctgacgcatcgcgcccaagatggcggcgcggtcgtcgtcgggggtggcggcggcagagggggcggcggccctggcggcagcggagacggcagccgtgacggtggcagcggcggcgcgggacctgggcctgggggaatgaggcggccgcggcgggccagcggcggagccgtgtagcggagaagctccccctccctgcttcccttggccgagccgggggcgcgcgcgcacgcggccgtccagagcgggctccccacccctcgactcctgcgacccgcaccgcacccccacccgggcccggaggatgatgaagctcaagtcgaaccagacccgcacctacgacggcgacggctacaagaagcgggccgcatgcctgtgtttccgcagcgagagcgaggaggaggtgctactcgtgagcagtagtcgccatccagacagatggattgtccctggaggaggcatggagcccgaggaggagccaagtgtggcagcagttcgtgaagtctgtgaggaggctggagtaaaagggacattgggaagattagttggaatttttgagaaccaggagaggaagcacaggacgtatgtctatgtgctcattgtcactgaagtgctggaagactgggaagattcagttaacattggaaggaagagggaatggtttaaaatagaagacgccataaaagtgctgcagtatcacaaacccgtgcaggcatcatattttgaaacattgaggcaaggctactcagccaacaatggcaccccagtcgtggccaccacatactcggtttctgctcagagctcgatgtcaggcatcagatgactgaagacttcctgtaagagaaatggaaattggaaactagactgaagtgcaaatcttccctctcaccctggctctttccacttctcacaggcctcctctttcaaataaggcatggtgggcagcaaagaaagggtgtattgataatgttgctgtttggtgttaagtgatggggctttttcttctgtttttattgagggtgggggttgggtgtgtaatttgtaagtacttttgtgcatgatctgtccctccctcttcccacccctgcagtcctctgaagagaggccaacagccttcccctgccttggattctgaagtgttcctgtttgtcttatcctggccctggccagacgttttctttgatttttaattttttttttttattaaaagataccagtatgagatgaaaacttccaataatttgtcctataatgtgctgtacagttcagtagagtggtcactttcactgcagtatacatttatctacacattatatatcggacatataatatgtaaataaatgacttctagaaagagaaatttgtttaatttttcaaggtttttttctcttttaatttgggcatttctagaattgagagcctcacaattaacatacctttttgttttcgatgctagtggctgggcaggttgccctgtcctttctctatttcccagtcattgactgtagatatgggaagagtttagctaccttcatagtgctcccaggactcatggcctttccttctttaagctgtatttccctgcccagaaagaaacaggaagaaacctttttttatttttttatttttttttaaccaagcaaggagcaaatggcctcagcccagatctgtaaaaacaatgatagaaattgaattctgccccacatgttgacagtagagttggaactggattcttgggattacttatctaaaaaactggagcatcaggtccatttctgttctgctggtttggaatcttttccgtaatgctatttattgccaacaatggcctctctttgtgtccatatatgccttacaccgtgctgacctgggtatcatccatgtgctctgaagcatccaactttactttgcaggtgcatcaatgtagtcctgtccctgaactgagtaaccgtgttcctgaaaagtacactagggaaattcacctgcttgcttgtctttgtattggcatggcacttgtgattgcaccatggagcatgctcagagctattaaattggtctcccatctcccaccaggatatgaaaggtccatatgggaggccacgtaatcacttattacagtggttacataatacactggctcactgcagactctcttgttttttgatacagtttcgtgctggcttcatttgccaattgtgttgtttagttcggaagtaagagggtcttgagattgaggggtagggagggctacactgactgatccgtggcttaagacaggagattatctctgtactccagtggcatctccttagccaagatgtgaaattaaaatcatagttcgcctcatttaaaaattctaataaagcactcaaactttgaaaagcttttacttttccctcctactaaaagaaatgtatgtacctcatagccctgtgtcatttagtgttcagcacttttgggaacatcagttggtgaactttaaattttgctgtctactcactgggcacggtggctcacacctgtaatcccagcactttgggaggctgaggcaggtggatcacctgaggtcaggagtttgagaccagcctgaccaacatggtgaaaccccgtctctactaaaaatgcagaaattaggtgggcgcctgtaatcccagctacttgggaggctgaggcgagataatcgcttgaacctgggaggcagaggttgcagtgagccgagattgcaccactgtcgtccagcctgggtgataagagtgaaactccatctcaaaaaaaaaaaaaaaaaatttttttttttttttttgctatatactcttagtttacatcctctcccccaatcttcacacacagagccaaagagcagttatattcttgggataccatgatacctctgggaaaggaattatattcccaaggagaggtcccattggataagaacaataccatgggacttgagtctgaatgccaacttactattcacacatccttcttaaaaacgaacacactgtttcttttcctgacctagagcattctaaagttctgttcaaataaataaagggcaaaataaagtagatttaaccaagtgccaggtggaattcaaaaaacacattcttccagataaattctacctttatggtatggatttgaaagtactttgcaggaaaacagtcagtactctttaaaaagggactgcagggctgggtgtagtggctcacacctgtaatcccagcactttgggaggccaaggcaggtgggtcacttgaggccaggagtttgagaccagcctgaccaacatggcaaaaccccatctctactaaaatacaaaaattagctgggcatgatggtgcactcctgtaatcccagctacttggtaggctgaagcatgagaattgcttaaacctgggaggcagaggttgcagtaagccaagatcatgccactgcactccagcctgggcaacagagtaagactctgtcttaataaataaataagaaaataaaacggaactgcagtgctaacagtaatttatacatttttaaatgttctgagtatgttttgactgggctagtgtaacaatatactaccctgaaagtgcagttttgattgttgttggtgtctttgggtcaggaaagtgaactgtgccaagaagtatttttcagtgacatgaatggattcctgttaatgcaattgactgagagattgtgcttacgctttcttaactgacaaaaagaggctttgtccaacatcagaattgttgaaactggtgctgttttctgttgcactgggattctgatgatctgggattttccctccttggcacagtaaacaccatgactgtctttattgagaatgtcgtcacagtcctttagtgatagattagttagacccatggttgcaatacctttatctccccaaagaaaataatcaaaagaaagcacaaaagctaccctgtttgcagaatatttcactgacattgatttgtcattaattctaccagagctgacctcattcaggcttgatagaaacaggttcctatgtttagggcagatccctagcctctcgctcacagtgagtctgcatgtcctagattctggttattgctggagcatccattaaagtctaccaaactcaggacagaagaagatagcagtggatttgtaaaaatttttagtttataaattacagtcattggggaaacactagtaaggtcatgtgatcttttggaccaggattttctctctgtcttctctctgggtgtgtgtgtgtgtatgtacagaagggctaccaggaagtgtcaaccatgttagattttctgtagtcttccagaaacagtgcagcccatacaacaggaatcttaattttcctcacagcaaatataacaggatggaacagttagtgttttgttttcacaagtgtccaccactccatctgccctgcatggagagggctctctcactgctagatctaggctgagccatctggaaggatcaaagggtgtgggagtatcaccccctctcaggctgcagaaggtctcgagggtggcgtcacagcaggatttccgccttctgcattgcactgcacagccccatggaacatgaggcacttgaggccttgcttcttggagcctctggggagcagagtaggtcactgccctctgggagtgttttgcagtagttttgtaaatgtgttgctacatagtcaagttcctttgtggcaaagaaatattttgttttgatattaggagccagcccatgtaatgcctctcaggcttgcttgcttagaagaaaaaagtcaccctttgtggtttttaagaaaaaaattctgtgcagatctgttcctcctcctgctccttcccttttctctacatacagtgctcattggaggctcctgctaaaccttcttaaccagagaaataataggtatttgttagacctgagtgtacatttcacatgttatccttcacatatttctcattttcatctagtactttcttaatgcctttgttggagtccgcatcctcatctttaaaaaaaaaaaaaaaaaaacagcttagcctaagccacattcactttttttagttcacaaaaaggatttaatagccacaatgtgatttttgccacaactgtgtgattttaatattctctaatatcaagggcggatttagaattgcaggaaatacctggagaaatcacagtggaatgaatttttgctttaagagaaatgagagttggctgtctctgtaattgataatacagcttcatcctagtcccatctgcatttcagaaaataaccctcatctttacaaaacacaggacacttgtgggacagttaactcaagcagctatggggagggaggagattattgaatggtgattaaataatgcaaatggctcttctgtttcttaaagactgtggaagaggtcagactgcccagttgaggtgggcagttcatactgctcagttgaggtggcagtcatttattctgagtcctgttggatagagcctatctcctcaaggctacagaggcttccaggatatggagctgtgcatgttaatggctcagccttgcctccatcagggcacctgcctaacttggagcaagtgggagagcaccctagagtcatcctctgtgctgtttcgtgagttttgcagcggagacttcaccatccggaggagctgtgtttctgtgtcacttgggatatcacctaaaaatgaaacatttgatattttaaggtataaaaaaaaagtaaattggggaacattggctgcagtccctaaaagatactgttgtctgtgcatcaggttagcttgaggtcaccacaggtcctgggagcccagagagtttaggcatactctcctttggaggccagcagcctttcacaaaccctgcctctaaaagggcggtttcacatttgaccatgtttttgcattagcctcagaaactcttgtctttagctgataacctttgagggatgtgagaagcctagttggagcatctgagaaaatgatacctctcaccttcaaattaatcaaatagtttgtccttctagtccccttataaattaataaatggagggctggtcatggtggctcacgcctgtaatcccagcactttgggaggccgaggcgggtggatcacaaggtcaggagttcaagaccagcctgaccaatatggtgaaaccccatctctactaaaaatacaaaaattagccaggtgtagtggcacgctcctgtagtcccagctactcgggaggctgaggcaggagaatcgcttgaacccaggaggtggatgttgcagtgagccgagatcccgccactgcactgcagcctaggcgacagagcaagactccgtctcaaaaaaaaaaaaaaaaaaaagaaaagggaagggaatcccattttgtgatgatttgggcacactacttgagctgaggctagcagtcacatgattttggctgtctctgacctgaagcttttgaagtaaggttatgtctcttccctgaagctttgtttatagtggtaatttggtgagtttgagctttgagcttgtcttagaaaataagactgtccacctggggaggggagcttatagggaacccgtgttaactcagaatgctgaagaaagtgcttttagccaacaaaagtaagattactatctagaaggtggaaagaagtcattgcttctgttcctccagcagtcagttgactctaggtttcctttggtttatatccccagttcttaatactaaaacttatttgacttcctatcaggaagcacacaaaaaaagcgtcatttaaaaccctggatataggctttaaaggatacaaaaacagcagcattgtcgttttgccaggttcatcaccattttgatgtgctacccatccttccaccctccctttcctgcccccaagcctcccagccaggccagatgtgaagattctattaatcactgtttcagagaacattaattcttgtatagaataattatctactaaattgcttattatctgtgactaccttgcagagaacatctcaacagtgcagtaaaatagctctcctagacttgagcttccagccaggcatttagatcactcttaagcctttgtggaattctgaggaaaaaaagcaagatgcctcaatgccaatgctgggccataagattctactcccctccctgtagggtggggcgcgtggctcagctttggaaaatcattttgccagtaatattgcctgtgaatccctttaagaagtcgtcctgatctgagcctgtctttctgagcactttggtgctgaattgaaaatggtaagctaaagcagtgacagatccacgtagcctctttaacctctttattatcttgccaaaaaaaaagtttctcaggttaaacctttgtctttaacctccctttgttgtggagaaaatgtgtcactaatcagtggtccaagggatatctagctttggttactcagttcctgcagcataacagatatgacttatgccagggaaggtagaggctgattatggagacacccaggaacaggaataagaagggataggtctgctccacgtagaacctccccagatcggaagttaagtcttggagagtttccaaagtgctgaagtaaaaaggagacttggagggcctttgcttaatgagcaagaggcttgtgtcctcccaagaacatgagggagttcagaagggagctatagctcacagacagaaacctgcccgctcaccccatccctcgtgactgggagcatgtttgctcagaattttctaagaggactctcccttcaaaaatccaatttgctcccagaatgttgtttagcctctgagaatctcactctttcatttccatctgtgaatggacatagatgtgttgctcagggatcagaaacatcagagtccagggcccagtggcatggtgttgcattagtagttagaaaagtaattggtcagctctactgtaaaagaaataagtatgtagtacagttttgtaaatgtcaggtctgttctattgttttgtgatctgaagactgtcaaactggttgataatcaaagaaaaggttggtggttagaataagtaaaatttcagttagaaagatatagcttaccagttttccatgtgcttaaggaagtcaagaatatttcaggttgttgagaactgttgtaaaatggaattgaagctagtgtctctcaccttcttaggtgtatcagagagaggaagtggaaggccagtagtagcatcttcatacttacttttgccagcccagcctccatttcaaagactttgtcttccatcctatccaatgacatggtcagggatgggctctgaggaggcagtgaggccccaccttggtttgctccactgtggtgtgtagtctccaaacagcttaagggtttttaagttttctcacgattacctccactccactcatctactatcagcatcagaaaggttaacatccctgggaccattctacttataaaagagatgaactagtgtgctttctccccttttccaggtgtgccatccatatacaatctcctcttggccaagttcaacaaatgtttccagggaaccccgtgggttgaggcaaagtagccaagatgtattgagttaagtttttctagaggacaaaagtatttcttgtcccttttccctcatgctcatatgttttagctgaggcgtaaatggccaagttgagtaatatctgtggaactgagacagagagccagggacccatgtacccagggaccagtcccctggggaatcacacagtggctcagactagactgctctatcccaccagaactctgctgctgttcatttccatcaggaccacccaggaaagcaaataagttagccttctcatcattaggtcacctaatctcttgggttgcaggatgagagcatatatagatctcctgtttagagagtgtgttcataattgtagaaagggatagaaaatggaataaccaagaggctgtgtcattttttaagaggatggcaaggatgacctcaaatgagctcaacaaaactgggaatccaaggaatggtgcttgtagggaaagagaggtcagttgtggtccttaaacctcttggcaccttgtgcgggttataaaacaaggagctggagtaaaattgcccttacccccaatccaaatgctgtccaggatttaggagctacccaacctgtggttatatggtgttggtttccattttttgtttgtttgcttgtttccaaaatagccttgcttggtactgcatggaaagttcaagcttttcttcttgcccgctcagggctggcctcttccccgtgtcttcacagcgtccctaaggaagatttttgcagcactctctggagctgaggggagtgaaatttggtccagagaaggcggaaggaaatagttttcctgtttccttttctcgaggtggatgtcctcaggcttccttcacacctccttctcatgggtgcggctggcagtacagtcaggctgtggaggagggctgagaagaaaggggcactggtccagccccaggtttggtctgagacaggtacacagcagataccatcccaccttcctctctaaagaacaggccagccacacatataaccctttccctactttactaatgtatcccttatgtggtaccagcaatggaggacaggcagacttaccccctgccatctagagagaatgttgttattacccgtaaaacttgaccacccccatatcccactcctttttgtaaaaacaaatgcttaaacctgtgagcctgccgttcctttctatgtgttaatcagtttccttccatttgagctgtgtgggagggaagggcattgaaattgtaggttgtaatcttgtgccaaccaataaaaaccagtatttcacacaca

SEQ ID NO: 161594 - DNA, 9753 bp, Homo sapiens
  Payload ID: 11550
  Gene Symbol: NUDT4
  Gene Name: nudix (nucleoside diphosphate linked moiety X)-type motif 4
  Uniprot ID: Q9NZJ9
  ENST ID: ENST00000337179
  CDS Start-End: 441-986
gcatgtgggcttcatttaaacagagcagagggggcggcgcgcggtcgccgcggtgctgctgctcagtgggagcgggtcttcgcaactgtctccgcgtggcgcgcgcctctagccgcccttcccctggcggctacggccggagggagcggaggcgagcgggagtcgggctccatggagagcggcggacaactgggcagaggcggagctttcatctcggcaccctggttccagtgacccgcgctagcgtcccgtcccgcccgcgtcggagcggccgccggccccgggactgaccggcctcgccgcacctcccgcaccgactagcgctcccgggcgctcctgcgcccgactcgccctcgcccccactccccggcggggtggcggcggccgggcccccacggcggcggccggagcagcagcagcagcagcaggagcccgcctctatgatgaagttcaagcccaaccagacgcggacctacgaccgcgagggcttcaagaagcgggcggcgtgcctgtgcttccggagcgagcaggaggacgaggtgctgctggtgagtagcagccggtacccagaccagtggattgtcccaggaggaggaatggaacccgaggaggaacctggcggtgctgccgtgagggaagtttatgaggaggctggagtcaaaggaaaactaggcagacttctgggcatatttgagcagaaccaagaccgaaagcacagaacatatgtttatgttctaacagtcactgaaatattagaagattgggaagattctgttaatattggaaggaagagagagtggttcaaagtagaagatgctatcaaagttctccagtgtcataaacctgtacatgcagagtatctggaaaagctaaagctgggttgttccccagccaatggaaattctacagtcccttcccttccggataataatgccttgtttgtaaccgctgcacagacctctgggttgccatctagtgtaagatagagagaactgggtaggcctctcccaccatgtgcagtctcatggggagaggcttctttcgtttcctcgtcaaacatctgattgacgcttgcaaactgtctgaatttgccatgcaaggttttcaaacaatttgcatgtttttcagatgctttcaaatctttttttaaaaaaatagtgtaaaatattttaataagccaaagccatgtggaatttttgtttagatgccttaactgtgccacaccccacaaccccctatattattttggttgtctatttctcacagcatattttcagttttttgtccatttgacatcagtctgtggtttattttgtcatcagattacttgtgggtatacctaccccaaaattgttttctcattcacagcattagcatattcagcaaatccatctgtggtgggaattaaaaatattattggtattaaagaaatccattcaccccaaaacttgttttacaggattacaattttaattcaaaatttccagatttgggctatttctgtatgatccaataacttattttgtcacagggcttaatttgccatttttggggatttgtcgactcattttgtctgaattttcacaactggtattatgtcactagctacctgatacggctatttcccttataactcaatagtaccttaacacaaagtataactctgtagagttggtgaatattttagggaaatattagcaaaatgcatgtagtaaagacatcttatgaaaactgtattcatggaatttgatttagcatgctcagttgccagttcccattatcgatactctttctttgcagaataccttagaaccgttatttccctcagtgtagattgctcttaaaatgtattcagttatttagtggcccccacaggagtggagtcttgaaatctaattctaaatgccagtcagtgatgatcgcatcacagttgagtgaaatggccttcctgttcagctgttagagactgaagattgttagggcaccttagaatgtctcatcttttctaggttgtcaacaggtactatttgtcacataactaactttcgaggcactggaacatacctgaactaagaattaaatcttttactttatactcacttaaaatcaagaatcccatctaaaacacataggtaccttatctgaaactcttgcacttccccaaccagggcagaaatgaggtgggagaagtttgactaaaatgagggatgggggaaagtaaaagatgtttttttttttttgagactcgctttgtcacccaggctggagtgcaatggcacaatctcaactcaccgcaacctccgcctcccgggttcaagcgattctcctgcctcagcctcccgagtagttgggattacaggcgcctgcctccatgcctggctaattttgtatttttagtagagacagggtttcttcatgttggtcaggctggtctcaaactcctaacctcgtgatccgcctgcctcgacctcccaaagtgctgggattacaggcatgagccaccatgcccagccaaagatcatttttttatatagacttcagccctttgtaaatattgtaactggggagtatagagtagaaaaaaagtatagttaaaacatttgttctacaaattaacctttaaaaatataattactgctaaaaatagagtgctgttacacttaaggaaaattagtgccattttggaaatgagatcttgtgccataaatacagctgaactgaatataaatgttcacaaattaatgctgtcaaaggaatgagtaaagcagaaaaacttttaaccagcaacatttcaagtacgtagtgtgatcaaacatgatcatccagaatttttatatttttttctttgtacagaggttacatattctgggtgttcttttataaaggaaacattttaaatcccacaaattgacactttctatcttcaatggactaagatttttttggtcagtaatctctgaaatttccttaaattatatacttaacatagcagagaaactggattgtttttgtatataagactgcttccacctgaaatgctgtcataagtactgggggggtgggggagtgcccatcttgtacatgatattcttagaggtaataaggtaatgatgcatgaatttattttataaactcttggactatgtatttgacatgtaaaatatgtacagtattaacgtcaaccatctctttaaagttagcctataaatattgttgtataattttctttggtcagaaacacttggactgaatagtgacactcggtaaggattttcagtgccatttagcaaaacgtctttagtctatgcaactagcaaaaatctgcataatgcaacaacacagttttcacacttcaaattttacatgaggggttcttcacgattctcctggaacccagtctagcaaaatgagaggaaaggccctagggagatttatttctgttaaatagttaactctgctgagtatgacaaatagtgtctactatctcaaccctccaaaatttgcagagtgttgggactgtcatttgtgattttttttttttttttttggtggggtagttgaataaaattgggcagctaaatttttcagttccatgtgcctcccaaataaaaaacagaaaataagtagtttttgtgaattgacttgcagacaaagtagaaactgtgctgcatgatgttattttgtaaacagatgacattttctgaccaggcacatgccatccaattttctgtcaatcacactgttgtataaagcagcagaactgaaggggaaaaatgattgttgtatacactgaattgctttgcatggtctcatttgagataattgatgtaagaatcctgacttttttatatttggaaacatcaaataaaaatggaaaaaatgatcatggctttaaaaaaaaaacaaaaacacacacacatgaactcagatttgcaaaccaggtttctgaaactttgggtaaggtgtatgcttttaactttgaaatgtataaacacccagcggaaacgtatacctttcagtgcatagtgcattgtgtgcttaccctgggttgtttaaacttgtgttcaaatattccccctccaagtgaaagcctgtcgggaattccacagtaacacctttactgttctcccattgatgatcatatacgttacctcttcctagcggtacatttgtatgatccttactactggaattaccgggttaaaaggaaatgcttaccactaagatgtcagtattctcctcatggatattttcagtctcaatgttgccagtctaatagtatagtatgtggttgctttactgctgttctccccacccccgtggagttgtgtcattattttaatgaatgtgagctcttgacttactctagaattctaatacagatactttctgcactagtatcacttttattattgcagttccatttaaaagcataactggctaagtcaccgccccacccgccgcattacatttcctaaaacatactgctgccaaagaccaactgtagaatccttaagtcctgttcaagtgtcacttcattttttattaggggtttcttagttggagggcatgagaaacttggccctttccaatgttgtcttcacattggagtataagaattctctataggactctttaatttttttttttttttggtagagatggggtcttgctgtgttgcccaggctggtctcaaactcctaggcttaagcagtcctccagcctcagccttctcaaagtgctaggatgattggcatgagccacctcgtctggcctgcaggtctttttaagcatttgctgttcaataataagcatcttctttatgcctagtatttgtgataagagcacaaaacaattttctaatctcaaagagcttatattctagtggggtagagataagtgatttatcttggtgtagttttggcttttttgtttgtttttttgagacagcatctcacactgtcgcccaggctggagtgcagtggtgcaatctcagcttactgtaacctccgcctgccaggttcaagcgattctcctgcctcatcctcccgaggagctgggatcacaggcgcctgccaccacgcccggctaatttttttgtatttttagtagagacggggtttcaccatattggccaggctggtctcaaactcctgacctcgtgatccgcctgcctcggcctccctaagtgctgggattatgggcgtgaaccaccgcacctggcctatcttggtgtttttacatccttcagtatttttcaaggttttacagcttttttatctatagacttataccatcttcaaaagcaatacaattttatttgtagacgtgatttcccccaccaaatgcacattttatggagctctaggacaaaagtcaggatgaaaagtaatctatcgctggtgctactttaataccttcctgactggtgccactggctaaattctagcagtacgatgagagggccattaaggcctatcttagcaagcaagacattatagcaaagacctaaacactcaaaggttcaacgtcttctagccagggaactattctctaattcttccaccttgatatgatttcagcaaattctgataacccggtattactcttaatgcatttttgtaacatttgacaaacatctcccaatatgtagactcccactctcctgatgctaatcagtatcagacaatggaagtaaattttcctgcttttctcaacttttcctcaaattcatgttagtgaagtactttcatttggccatcattatttatcaaccttaagaaacatgcctattgacgaagtaaatatactaggaattcaacgtatctacgggaatgtggacaaagacatataccaagacaaggcactagagtgaaaagccattaaaataaaatgctcagcagcaaaggatttgtaatggttaacttgcaatatatccatatggtgtaatattacagtcattagaaatgacatttgcgtaaggatctgagtggaaactgatacagcctgtcggagagctactgagtagtattttatcacagctgcatacataccctttcacccaacagttccactcctgggagtctagtcaacaaatggacaagttgcacaaccaagctatggtcaaatatgtgtgttgtaggatttatgaaactggtaccaatttaatattcaaatgtgattaagtcatggcaatctatttactggatactttgtggttaccaaagagctatgtgctgccacagggagtcctttcaatagtgattgaaaaaggcagaacactactagacagaactacctgttttatgcatgtattggcatacactgaaaaagcttagtcacttaaaatgaggttgtacagattgtagattttgtttttaaacgcctgtatggtttaaaaaatgttttgggaaatagacatgagcagggcagagaactacaacctacaggccaaaccccaccccactgcctgtttgtacggccaacaagtttaaaatttttttaatgttttaggtttttttttttttaaaaaaaatactatgcccatttgtttacaaatcgtctgtgggtgctttctcactacaatggcagaattcagtagttgagacagacctatggtccacaaaggccgaaatatttactgttttaggagaaaaaaacaacatgaattgtaataacttggacttacttggttgctcagtcctgatgtgtcctgttaaaacctaagagaaacagcaccaagttcaatctagtgcaatcagcctatcacatctaagctgcttttgccagatctgatatctactcccgaccttaagccaggagactttgtaaacttactaggttataataaaacttaagaactatcgatatttactaatctacatcatggaactatttcaaaagcagtcatatggtaagatggatcaggagtctttaaaaataaaactgagaaagaaaaatcatgtgatcaattcagtagtagagacagaggttggtatcaagtctatgttcatacacttaccagtgccacccagcagggccatacaagacacatgaaatgagatcagctcaagggtgacaagatgaaactgggagagggccggggagacccgaactcttaatattggattccacacaagaggaaaaattttagtccagctcccagcatggcagctaatggcaagttagtaccataaagccaactcttggaatatacctgacttccacgataaaatggagatgagtgcaggggtgagtgtatagttaagaaaacaaacaatatattactagtccaggtggtagatgacagatttttattatttacacttctctcaaattattacattcagcatgttttgctttttatgttatttaaagtataaaccctcatataattccctaagatgggtggcatgccaagtagctaaatgaaatatcatcccagcccaaaagtacttattcgaatgaaatattacatttttcttaaataaagcaataaattaggtaccctattatcatggtattttcttttttggccagcttttctagataaggttgtattgctactgcaactaacaaaaaagatgtggcagggctgggcacggtggctcacgcctgtaatcccagcactttgggaggccgaggcgggcagatcacgaggtcaggagatggagaccatcctggcccaacatggtgaaaccccgtctctactaaaaatacaaaaaattagccaggtgtggtggcaggtgtctgtagtcccagctcctcaggaggctgaggcaggagaatcgcttgaacgcgggaggcagaacctgcagtgagccaagatcatgccacagcactccagcctaaactacagagctagaaagtggctagagcagccaaaaaaaaaaaaaaaaaaaaaaaaaaaaaaggttcctgaaccattcaacagaaaaatgaggcctattcctatcatttcctcgatccaatttagttccacttaggtcactgtgtttataatgtcttttaggacagatttccttccccattctccatcaaacaaccatagcacctgtgacttttatctgttggtttgtatttaatcttatttttaagtgcttctttgaaattgttttacaagtacattcttggtctagagtaaggttctatatagttggccctccatatccatgggttccacttccgtggattcaaacaaccagacaaaatattccaaaaaacattgtgtctgtagtcaacatgtatatttttgtcattattccttaaacaatagtgtaactatttacatagcacttacattataataggtattataagtaatctaaatattaacataagcgggaggatttgtgtagattgtatgcatatacaacatcattttattccagagacttgagcatctgcgaatttggatatccaaaggaagtcctagaaccagttcccgacaaataccaagagatgactttactttagacctaagatcttgctagacagcctttgagaggatgaaggataactagagcagaagcaaatcgcagcgaagtagactacaacaatcaagtcaaaaaacataaagctcctatcaacacctcaagattttagaaaagcctcttaacgggcaattttcttttaaataaagactgggtcccactatgttagccaggctggtcacaaactcctggactcaagtgatcctcctgccttggcctcctaaagtgctgggattacaggcatgagccactgtgcccggcctgggcagtcgattttcaggaagccacttaatgttcagattcttttcttctctcccaggactttgcagatgctgctgttccctctgcctggagatgttcatctggcctgaatccaaaagtctgtccaagttacttctcttttccatgacagagttacaactatttgtctgtcccccttccccattagagtatatggtccccaaaggaaagccccatgccattcactcaccacctaatcatccccaacaactagtgggcaaacatgaaacacttttgttgaataatgtgtttcctttagcccagggattacaaagtcaaaggcttacaagggggaaggactagcaggtgtgctcggaggggactctagccaactggagagtaactggtgagaagacaatgacatgctcttagggtgtctgctactcagatcctctcagttaagtcccgtgcacaaaggtgggtcaggtctactgttgccagatcttcagatcattcaaaagttacccgaattctggattttcatgcaaatctcccaatttttaaaaatgttggcatcaaattcagaatgttttaaccagccacactgtgtgggccagggaaaacaggcccaaaggccaggtgaagctgcagttttcaactgctgccttggcctctcccagagccccttaagtcctaagaaggctcagtcaacacactggcactcgtttcatcccactggttgagaaagcaagtcttagcaaagtaatgggggagtcttaccaaaactgcaaaggaaaaaaatatgataccatgaaattagaaattcactgcatttgaaatgaaaatgacttatttctgtacttctataactcacaaatttagcagacatcatttagacatttttgtagtgcaacagatttaaatctggaatttcatggtttgtaaatcactatgtgatactagctataaccatgagcaatattacgggcagtaaatgttgatttctatttcgtttcttgaa

SEQ ID NO: 161595 - DNA, 4839 bp, Homo sapiens
  Payload ID: 11550
  Gene Symbol: NUDT4
  Gene Name: nudix (nucleoside diphosphate linked moiety X)-type motif 4
  Uniprot ID: Q9NZJ9
  ENST ID: ENST00000415493
  CDS Start-End: 428-970
atttaaacagagcagagggggcggcgcgcggtcgccgcggtgctgctgctcagtgggagcgggtcttcgcaactgtctccgcgtggcgcgcgcctctagccgcccttcccctggcggctacggccggagggagcggaggcgagcgggagtcgggctccatggagagcggcggacaactgggcagaggcggagctttcatctcggcaccctggttccagtgacccgcgctagcgtcccgtcccgcccgcgtcggagcggccgccggccccgggactgaccggcctcgccgcacctcccgcaccgactagcgctcccgggcgctcctgcgcccgactcgccctcgcccccactccccggcggggtggcggcggccgggcccccacggcggcggccggagcagcagcagcagcagcaggagcccgcctctatgatgaagttcaagcccaaccagacgcggacctacgaccgcgagggcttcaagaagcgggcggcgtgcctgtgcttccggagcgagcaggaggacgaggtgctgctggtgagtagcagccggtacccagaccagtggattgtcccaggaggaggaatggaacccgaggaggaacctggcggtgctgccgtgagggaagtttatgaggaggctggagtcaaaggaaaactaggcagacttctgggcatatttgagaaccaagaccgaaagcacagaacatatgtttatgttctaacagtcactgaaatattagaagattgggaagattctgttaatattggaaggaagagagagtggttcaaagtagaagatgctatcaaagttctccagtgtcataaacctgtacatgcagagtatctggaaaagctaaagctgggttgttccccagccaatggaaattctacagtcccttcccttccggataataatgccttgtttgtaaccgctgcacagacctctgggttgccatctagtgtaagatagagagaactgggtaggcctctcccaccatgtgcagtctcatggggagaggcttctttcgtttcctcgtcaaacatctgattgacgcttgcaaactgtctgaatttgccatgcaaggttttcaaacaatttgcatgtttttcagatgctttcaaatctttttttaaaaaaatagtgtaaaatattttaataagccaaagccatgtggaatttttgtttagatgccttaactgtgccacaccccacaaccccctatattattttggttgtctatttctcacagcatattttcagttttttgtccatttgacatcagtctgtggtttattttgtcatcagattacttgtgggtatacctaccccaaaattgttttctcattcacagcattagcatattcagcaaatccatctgtggtgggaattaaaaatattattggtattaaagaaatccattcaccccaaaacttgttttacaggattacaattttaattcaaaatttccagatttgggctatttctgtatgatccaataacttattttgtcacagggcttaatttgccatttttggggatttgtcgactcattttgtctgaattttcacaactggtattatgtcactagctacctgatacggctatttcccttataactcaatagtaccttaacacaaagtataactctgtagagttggtgaatattttagggaaatattagcaaaatgcatgtagtaaagacatcttatgaaaactgtattcatggaatttgatttagcatgctcagttgccagttcccattatcgatactctttctttgcagaataccttagaaccgttatttccctcagtgtagattgctcttaaaatgtattcagttatttagtggcccccacaggagtggagtcttgaaatctaattctaaatgccagtcagtgatgatcgcatcacagttgagtgaaatggccttcctgttcagctgttagagactgaagattgttagggcaccttagaatgtctcatcttttctaggttgtcaacaggtactatttgtcacataactaactttcgaggcactggaacatacctgaactaagaattaaatcttttactttatactcacttaaaatcaagaatcccatctaaaacacataggtaccttatctgaaactcttgcacttccccaaccagggcagaaatgaggtgggagaagtttgactaaaatgagggatgggggaaagtaaaagatgtttttttttttttgagactcgctttgtcacccaggctggagtgcaatggcacaatctcaactcaccgcaacctccgcctcccgggttcaagcgattctcctgcctcagcctcccgagtagttgggattacaggcgcctgcctccatgcctggctaattttgtatttttagtagagacagggtttcttcatgttggtcaggctggtctcaaactcctaacctcgtgatccgcctgcctcgacctcccaaagtgctgggattacaggcatgagccaccatgcccagccaaagatcatttttttatatagacttcagccctttgtaaatattgtaactggggagtatagagtagaaaaaaagtatagttaaaacatttgttctacaaattaacctttaaaaatataattactgctaaaaatagagtgctgttacacttaaggaaaattagtgccattttggaaatgagatcttgtgccataaatacagctgaactgaatataaatgttcacaaattaatgctgtcaaaggaatgagtaaagcagaaaaacttttaaccagcaacatttcaagtacgtagtgtgatcaaacatgatcatccagaatttttatatttttttctttgtacagaggttacatattctgggtgttcttttataaaggaaacattttaaatcccacaaattgacactttctatcttcaatggactaagatttttttggtcagtaatctctgaaatttccttaaattatatacttaacatagcagagaaactggattgtttttgtatataagactgcttccacctgaaatgctgtcataagtactgggggggtgggggagtgcccatcttgtacatgatattcttagaggtaataaggtaatgatgcatgaatttattttataaactcttggactatgtatttgacatgtaaaatatgtacagtattaacgtcaaccatctctttaaagttagcctataaatattgttgtataattttctttggtcagaaacacttggactgaatagtgacactcggtaaggattttcagtgccatttagcaaaacgtctttagtctatgcaactagcaaaaatctgcataatgcaacaacacagttttcacacttcaaattttacatgaggggttcttcacgattctcctggaacccagtctagcaaaatgagaggaaaggccctagggagatttatttctgttaaatagttaactctgctgagtatgacaaatagtgtctactatctcaaccctccaaaatttgcagagtgttgggactgtcatttgtgattttttttttttttttttggtggggtagttgaataaaattgggcagctaaatttttcagttccatgtgcctcccaaataaaaaacagaaaataagtagtttttgtgaattgacttgcagacaaagtagaaactgtgctgcatgatgttattttgtaaacagatgacattttctgaccaggcacatgccatccaattttctgtcaatcacactgttgtataaagcagcagaactgaaggggaaaaatgattgttgtatacactgaattgctttgcatggtctcatttgagataattgatgtaagaatcctgacttttttatatttggaaacatcaaataaaaatggaaaaaatgatcatggctttaaaaaaaaaacaaaaacacacacacatgaactcagatttgcaaaccaggtttctgaaactttgggtaaggtgtatgcttttaactttgaaatgtataaacacccagcggaaacgtatacctttcagtgcatagtgcattgtgtgcttaccctgggttgtttaaacttgtgttcaaatattccccctccaagtgaaagcctgtcgggaattccacagtaacacctttactgttctcccattgatgatcatatacgttacctcttcctagcggtacatttgtatgatccttactactggaattaccgggttaaaaggaaatgcttaccactaagatgtcagtattctcctcatggatattttcagtctcaatgttgccagtctaatagtatagtatgtggttgctttactgctgttctccccacccccgtggagttgtgtcattattttaatgaatgtgagctcttgacttactctagaattctaatacagatactttctgcactagtatcacttttattattgcagttccatttaaaagcataactggctaagtcaccgccccacccgccgcattacatttcctaaaacatactgctgccaaagaccaactgtagaatccttaagtcctgttcaagtgtcacttcattttttattaggggtttcttagttggagggcatgagaaacttggccctttccaatgttgtcttcacattggagtataagaattctctataggactctttaatttttttttttttttggtagagatggggtcttgctgtgttgcccaggctggtctcaaactcctaggcttaagcagtcctccagcctcagccttctcaaagtgctaggatgattggcatgagccacctcgtctggcctgcaggtctttttaagcatttgctgttcaataataagcatcttctttatgcctagtatttgtgataagagcacaaaacaa

SEQ ID NO: 161596 - DNA, 1419 bp, Homo sapiens
  Payload ID: 11550
  Gene Symbol: NUDT4
  Gene Name: nudix (nucleoside diphosphate linked moiety X)-type motif 4
  Uniprot ID: Q9NZJ9
  ENST ID: ENST00000547014
  CDS Start-End: 271-660
acttcttccttcctttctctgggctgatagatgagacaaagggggctcgcccagccccagtttctccatctgggcactcgagaaggcgcctggtccccgggaaggtcccgggccgcgtaagtctcgcctagcgggagtcaccatcttaacgtgcgaattgagttgaaagccggataaacctcgagtgctcagcgagaggagggtggaaatggcgtgctgctggtgagtagcagccggtacccagaccagtggattgtcccaggaggaggaatggaacccgaggaggaacctggcggtgctgccgtgagggaagtttatgaggaggctggagtcaaaggaaaactaggcagacttctgggcatatttgagcagaaccaagaccgaaagcacagaacatatgtttatgttctaacagtcactgaaatattagaagattgggaagattctgttaatattggaaggaagagagagtggttcaaagtagaagatgctatcaaagttctccagtgtcataaacctgtacatgcagagtatctggaaaagctaaagctgggttgttccccagccaatggaaattctacagtcccttcccttccggataataatgccttgtttgtaaccgctgcacagacctctgggttgccatctagtgtaagatagagagaactgggtaggcctctcccaccatgtgcagtctcatggggagaggcttctttcgtttcctcgtcaaacatctgattgacgcttgcaaactgtctgaatttgccatgcaaggttttcaaacaatttgcatgtttttcagatgctttcaaatctttttttaaaaaaatagtgtaaaatattttaataagccaaagccatgtggaatttttgtttagatgccttaactgtgccacaccccacaaccccctatattattttggttgtctatttctcacagcatattttcagttttttgtccatttgacatcagtctgtggtttattttgtcatcagattacttgtgggtatacctaccccaaaattgttttctcattcacagcattagcatattcagcaaatccatctgtggtgggaattaaaaatattattggtattaaagaaatccattcaccccaaaacttgttttacaggattacaattttaattcaaaatttccagatttgggctatttctgtatgatccaataacttattttgtcacagggcttaatttgccatttttggggatttgtcgactcattttgtctgaattttcacaactggtattatgtcactagctacctgatacggctatttcccttataactcaatagtaccttaacacaaagtataactctgtagagttggtgaatattttagggaaatattagcaaaatgcatgtagtaaagacatcttatgaaaactgtattcatggaa

SEQ ID NO: 161597 - DNA, 531 bp, Homo sapiens
  Payload ID: 11550
  Gene Symbol: NUDT4
  Gene Name: nudix (nucleoside diphosphate linked moiety X)-type motif 4
  ENST ID: ENST00000550056
  CDS Start-End: 246-531
ctttcctccctcactcctttcctccctcacttcttccttcctttctctgggctgatagatgagacaaagggggctcgcccagccccagtttctccatctgggcactcgagaaggcgcctggtccccgggaaggtcccgggccgcctacgtggcgctcccatctggctgttcctgtactgaagttctcagtgctgctggtgagtagcagccggtacccagaccagtggattgtcccaggaggaggaatggaacccgaggaggaacctggcggtgctgccgtgagggaagtttatgaggaggctggagtcaaaggaaaactaggcagacttctgggcatatttgagaaccaagaccgaaagcacagaacatatgtttatgttctaacagtcactgaaatattagaagattgggaagattctgttaatattggaaggaagagagagtggttcaaagtagaagatgctatcaaagttctccagtgtcataaacctgtacatgcagagtatctggaaaagctaaagctgggttgtt

SEQ ID NO: 161598 - DNA, 569 bp, Homo sapiens
  Payload ID: 11550
  Gene Symbol: NUDT4
  Gene Name: nudix (nucleoside diphosphate linked moiety X)-type motif 4
  ENST ID: ENST00000546925
  CDS Start-End: 233-569
ctcgagaaggcgcctggtccccgggaaggtcccgggccgcgtaagtctcgcctagcgggagtcaccatcttaacgtgcgaattgagttgaaagccggataaacctcgagtgctcagcgagaggagggtggaaatggtatctaggaaaagacaaaataactcttcagcagtgccaggtgctgctggtgagtagcagccggtacccagaccagtggattgtcccaggaggaggaatggaacccgaggaggaacctggcggtgctgccgtgagggaagtttatgaggaggctggagtcaaaggaaaactaggcagacttctgggcatatttgagaaccaagaccgaaagcacagaacatatgtttatgttctaacagtcactgaaatattagaagattgggaagattctgttaatattggaaggaagagagagtggttcaaagtagaagatgctatcaaagttctccagtgtcataaacctgtacatgcagagtatctggaaaagctaaagctgggttgttccccagccaatggaaattctacagtcccttcccttccggataataatgcct

SEQ ID NO: 161599 - DNA, 3607 bp, Homo sapiens
  Payload ID: 11550
  Gene Symbol: NUDT4
  Gene Name: nudix (nucleoside diphosphate linked moiety X)-type motif 4
  ENST ID: ENST00000549992
  CDS Start-End: 299-685
ctttcctccctcactcctttcctccctcacttcttccttcctttctctgggctgatagatgagacaaagggggctcgcccagccccagtttctccatctgggcactcgagaaggcgcctggtccccgggaaggtcccgggccgcgtaagtctcgcctagcgggagtcaccatcttaacgtgcgaattgagttgaaagccggataaacctcgagtgctcagcgagaggagggtggaaatggcgtgctgctggtgagtagcagccggtacccagaccagtggattgtcccaggaggaggaatggaacccgaggaggaacctggcggtgctgccgtgagggaagtttatgaggaggctggagtcaaaggaaaactaggcagacttctgggcatatttgagaaccaagaccgaaagcacagaacatatgtttatgttctaacagtcactgaaatattagaagattgggaagattctgttaatattggaaggaagagagagtggttcaaagtagaagatgctatcaaagttctccagtgtcataaacctgtacatgcagagtatctggaaaagctaaagctgggttgttccccagccaatggaaattctacagtcccttcccttccggataataatgccttgtttgtaaccgctgcacagacctctgggttgccatctagtgtaagatagagagaactgggtaggcctctcccaccatgtgcagtctcatggggagaggcttctttcgtttcctcgtcaaacatctgattgacgcttgcaaactgtctgaatttgccatgcaaggttttcaaacaatttgcatgtttttcagatgctttcaaatctttttttaaaaaaatagtgtaaaatattttaataagccaaagccatgtggaatttttgtttagatgccttaactgtgccacaccccacaaccccctatattattttggttgtctatttctcacagcatattttcagttttttgtccatttgacatcagtctgtggtttattttgtcatcagattacttgtgggtatacctaccccaaaattgttttctcattcacagcattagcatattcagcaaatccatctgtggtgggaattaaaaatattattggtattaaagaaatccattcaccccaaaacttgttttacaggattacaattttaattcaaaatttccagatttgggctatttctgtatgatccaataacttattttgtcacagggcttaatttgccatttttggggatttgtcgactcattttgtctgaattttcacaactggtattatgtcactagctacctgatacggctatttcccttataactcaatagtaccttaacacaaagtataactctgtagagttggtgaatattttagggaaatattagcaaaatgcatgtagtaaagacatcttatgaaaactgtattcatggaatttgatttagcatgctcagttgccagttcccattatcgatactctttctttgcagaataccttagaaccgttatttccctcagtgtagattgctcttaaaatgtattcagttatttagtggcccccacaggagtggagtcttgaaatctaattctaaatgccagtcagtgatgatcgcatcacagttgagtgaaatggccttcctgttcagctgttagagactgaagattgttagggcaccttagaatgtctcatcttttctaggttgtcaacaggtactatttgtcacataactaactttcgaggcactggaacatacctgaactaagaattaaatcttttactttatactcacttaaaatcaagaatcccatctaaaacacataggtaccttatctgaaactcttgcacttccccaaccagggcagaaatgaggtgggagaagtttgactaaaatgagggatgggggaaagtaaaagatgtttttttttttttgagactcgctttgtcacccaggctggagtgcaatggcacaatctcaactcaccgcaacctccgcctcccgggttcaagcgattctcctgcctcagcctcccgagtagttgggattacaggcgcctgcctccatgcctggctaattttgtatttttagtagagacagggtttcttcatgttggtcaggctggtctcaaactcctaacctcgtgatccgcctgcctcgacctcccaaagtgctgggattacaggcatgagccaccatgcccagccaaagatcatttttttatatagacttcagccctttgtaaatattgtaactggggagtatagagtagaaaaaaagtatagttaaaacatttgttctacaaattaacctttaaaaatataattactgctaaaaatagagtgctgttacacttaaggaaaattagtgccattttggaaatgagatcttgtgccataaatacagctgaactgaatataaatgttcacaaattaatgctgtcaaaggaatgagtaaagcagaaaaacttttaaccagcaacatttcaagtacgtagtgtgatcaaacatgatcatccagaatttttatatttttttctttgtacagaggttacatattctgggtgttcttttataaaggaaacattttaaatcccacaaattgacactttctatcttcaatggactaagatttttttggtcagtaatctctgaaatttccttaaattatatacttaacatagcagagaaactggattgtttttgtatataagactgcttccacctgaaatgctgtcataagtactgggggggtgggggagtgcccatcttgtacatgatattcttagaggtaataaggtaatgatgcatgaatttattttataaactcttggactatgtatttgacatgtaaaatatgtacagtattaacgtcaaccatctctttaaagttagcctataaatattgttgtataattttctttggtcagaaacacttggactgaatagtgacactcggtaaggattttcagtgccatttagcaaaacgtctttagtctatgcaactagcaaaaatctgcataatgcaacaacacagttttcacacttcaaattttacatgaggggttcttcacgattctcctggaacccagtctagcaaaatgagaggaaaggccctagggagatttatttctgttaaatagttaactctgctgagtatgacaaatagtgtctactatctcaaccctccaaaatttgcagagtgttgggactgtcatttgtgattttttttttttttttttggtggggtagttgaataaaattgggcagctaaatttttcagttccatgtgcctcccaaataaaaaacagaaaataagtagtttttgtgaattgacttgcagacaaagtagaaactgtgctgcatgatgttattttgtaaacagatgacattttctgaccaggcacatgccatccaattttctgtcaatcacactgttgtataaagcagcagaactgaaggggaaaaatgattgttgtatacactgaattgctttgcatggtctcatttgagataattgatgtaagaatcctgacttttttatatttggaaacatcaaataaaaatggaaaaaatgatcatggctttaaaaaaaaaacaaaa

SEQ ID NO: 161600 - DNA, 765 bp, Homo sapiens
  Payload ID: 11550
  Gene Symbol: NUDT4
  Gene Name: nudix (nucleoside diphosphate linked moiety X)-type motif 4
  ENST ID: ENST00000548662
  CDS Start-End: 174-560
acttcttccttcctttctctgggctgatagatgagacaaagggggctcgcccagccccagtttctccatctgggcactcgagaaggcgcctggtccccgggaaggtcccgggccgcgtgctgctggtgagtagcagccggtacccagaccagtggattgtcccaggaggaggaatggaacccgaggaggaacctggcggtgctgccgtgagggaagtttatgaggaggctggagtcaaaggaaaactaggcagacttctgggcatatttgagaaccaagaccgaaagcacagaacatatgtttatgttctaacagtcactgaaatattagaagattgggaagattctgttaatattggaaggaagagagagtggttcaaagtagaagatgctatcaaagttctccagtgtcataaacctgtacatgcagagtatctggaaaagctaaagctgggttgttccccagccaatggaaattctacagtcccttcccttccggataataatgccttgtttgtaaccgctgcacagacctctgggttgccatctagtgtaagatagagagaactgggtaggcctctcccaccatgtgcagtctcatggggagaggcttctttcgtttcctcgtcaaacatctgattgacgcttgcaaactgtctgaatttgccatgcaaggttttcaaacaatttgcatgtttttcagatgctttcaaatctttttttaaaaaaatagtgtaaaatattttaataagccaaagccatgtgg

SEQ ID NO: 161601 - DNA, 1258 bp, Homo sapiens
  Payload ID: 11551
  Gene Symbol: NUDT5
  Gene Name: nudix (nucleoside diphosphate linked moiety X)-type motif 5
  ENST ID: ENST00000378927
  CDS Start-End: 95-637
tgcctccagctagttatttcgtcctcttccgttcttcacccctacaccttggaggtgaacttctcacctgagggctgtaaagactcgtttgaaaatggagagccaagaaccaacggaatcttctcagaatggcaaacagtatatcatttcagaggagttaatttcagaaggaaaatgggtcaagcttgaaaaaacaacgtacatggatcctactggtaaaactagaacttgggaatcagtgaaacgtacaaccaggaaagagcagactgcggatggtgtcgcggtcatccccgtgctgcagagaacacttcactatgagtgtatcgttctggtgaaacagttccgaccaccaatggggggctactgcatagagttccctgcaggtctcatagatgatggtgaaaccccagaagcagctgctctccgggagcttgaagaagaaactggctacaaaggggacattgccgaatgttctccagcggtctgtatggacccaggcttgtcaaactgtactatacacatcgtgacagtcaccattaacggagatgatgccgaaaacgcaaggccgaagccaaagccaggggatggaggtatgttctgcaactcctggtggccgagcgtgtatgacttagtgtagtggtgatggctgcagacattttgggttgttttggtaggctcttgacgttagctttgttttcacttgcactttgtctgtttagagtttgtggaagtcatttctttacccaagaatgacctgctgcagagacttgatggtaagcattctccagaccgccacccagtttctccagttctccccgtccccatcccagcaaactgggtactaaatataactccatttctttatcttttttgtatcactaaagtcaaatgcctagcaacttgtaaaactgcaggtgaccactactaattttcctttctgggtggcacagagtttgaaaataagagcaaagcattctgggtcaagtgcaaacttttggtagaggctttttctcctacagaatggcccagatgacattcctgctgagtagccaaaacgattctacactttaaaccttcagtccatagcaatgcaaaggtgtgggtagataagctgttagcttttcctcaagtatgctagtatgagggatggtcctttgtggaggctgtatgttcaaggagaaattgatgatgctccttcaacaaatacttgaggtatttcctgtatactccgtgtgatatgcttttcacataataaacc

SEQ ID NO: 161602 - DNA, 919 bp, Homo sapiens
  Payload ID: 11551
  Gene Symbol: NUDT5
  Gene Name: nudix (nucleoside diphosphate linked moiety X)-type motif 5
  ENST ID: ENST00000378937
  CDS Start-End: 95-793
tgcctccagctagttatttcgtcctcttccgttcttcacccctacaccttggaggtgaacttctcacctgagggctgtaaagactcgtttgaaaatggagagccaagaaccaacggaatcttctcagaatggcaaacagtatatcatttcagaggagttaatttcagaaggaaaatgggtcaagcttgaaaaaacaacgtacatggatcctactggtaaaactagaagaaataaagagaaaacaacaacattgctaattttgagaacttgggaatcagtgaaacgtacaaccaggaaagagcagactgcggatggtgtcgcggtcatccccgtgctgcagagaacacttcactatgagtgtatcgttctggtgaaacagttccgaccaccaatggggggctactgcatagagttccctgcaggtctcatagatgatggtgaaaccccagaagcagctgctctccgggagcttgaagaagaaactggctacaaaggggacattgccgaatgttctccagcggtctgtatggacccaggcttgtcaaactgtactatacacatcgtgacagtcaccattaacggagatgatgccgaaaacgcaaggccgaagccaaagccaggggatggagagtttgtggaagtcatttctttacccaagaatgacctgctgcagagacttgatgctctggtagctgaagaacatctcacagtggacgccagggtctattcctacgctctagcactgaaacatgcaaatgcaaagccatttgaagtgcccttcttgaaattttaagcccaaatatgacactggccatttttgtaaacgagaccaccaggccttcttcactaagactttgtattcaacttagtttaatgtagatttgccattagctttttcgtaaaataaaagcacagaaca

SEQ ID NO: 161603 - DNA, 1126 bp, Homo sapiens
  Payload ID: 11551
  Gene Symbol: NUDT5
  Gene Name: nudix (nucleoside diphosphate linked moiety X)-type motif 5
  ENST ID: ENST00000378940
  CDS Start-End: 142-702
gaggcgccggtgtttcgagccgtggcaccggcatcggctgacactgctgcctccagctagttatttcgtcctcttccgttcttcacccctacaccttggaggtgaacttctcacctgagggctgtaaagactcgtttgaaaatggagagccaagaaccaacggaatcttctcagaatggcaaacagtatatcatttcagaggagttaatttcagaaggaaaatgggtcaagcttgaaaaaacaacgtacatggatcctactggtaaaactagaacttgggaatcagtgaaacgtacaaccaggaaagagcagactgcggatggtgtcgcggtcatccccgtgctgcagagaacacttcactatgagtgtatcgttctggtgaaacagttccgaccaccaatggggggctactgcatagagttccctgcaggtctcatagatgatggtgaaaccccagaagcagctgctctccgggagcttgaagaagaaactggctacaaaggggacattgccgaatgttctccagcggtctgtatggacccaggcttgtcaaactgtactatacacatcgtgacagtcaccattaacggagatgatgccgaaaacgcaaggccgaagccaaagccaggggatggagagtttgtggaagtcatttctttacccaagaatgacctgctgcagagacttgatgagactttgtaaacagtaagcttatggggagaaaagtcctttgataaaaccacgagaggagatactgtatggagacatgaggagatactgtgtggagacgaggagatactgtatggagacataccatgggcccttcaaggagcacctctgtatgggctggcaaatccctttcactcatctagaaagaagcagacacttgtcatcatgggaatattttattgggtataagtgttttaggtaattgataactgatttttctactgtttttaagtgattacttcaaatgtgatttgaagcattgtttggcctgaagctttaagaccagtttcttaagcttttccctgagtttcagcagcttacggtttcagtgaataagcagagcgcctggttttgaattgtctgttgtttgtttgaaaatctgaatgtgtctttcaaa

SEQ ID NO: 161604 - DNA, 410 bp, Homo sapiens
  Payload ID: 11551
  Gene Symbol: NUDT5
  Gene Name: nudix (nucleoside diphosphate linked moiety X)-type motif 5
  ENST ID: ENST00000444732
  CDS Start-End: 118-410
gcaccggcatcggctgacactgctgcctccagctagttatttcgtcctcttccgttcttcacccctacaccttggaggtgaacttctcacctgagggctgtaaagactcgtttgaaaatggagagccaagaaccaacggaatcttctcagaatggcaaacagtatatcatttcagaggagttaatttcagaaggaaaatgggtcaagcttgaaaaaacaacgtacatggatcctactggtaaaactagaacttgggaatcagtgaaacgtacaaccaggaaagagcagactgcggatggtaggagtgcaaacctattccaaccctttagaaaggaagttagcacttgtgatcgtgtcgcggtcatccccgtgctgcagagaacacttcactatgagtgtatcgttctggt

SEQ ID NO: 161605 - DNA, 3433 bp, Homo sapiens
  Payload ID: 11551
  Gene Symbol: NUDT5
  Gene Name: nudix (nucleoside diphosphate linked moiety X)-type motif 5
  Uniprot ID: Q9UKK9
  ENST ID: ENST00000491614
  CDS Start-End: 397-1056
gcaagaaggaagaccgagaaaaggaagcggaggagaatcccggggcatacgcttgacacacacgcatacaaaaagagctttagtctcgaaagaggaattaccgaagtgtcgagagaggaattttaagaagtttacaactccgtcttcgccctaaacgcacgctgacccggaaagtaatctcctgaagctaggtcaaaggcgggggttctacggatgccggaaggagggtgcgcgcccatccttttagcaccgcgagaggcgccggtgtttcgagccgtggcaccggcatcggctgacactgctgcctccagctagttatttcgtcctcttccgttcttcacccctacaccttggaggtgaacttctcacctgagggctgtaaagactcgtttgaaaatggagagccaagaaccaacggaatcttctcagaatggcaaacagtatatcatttcagaggagttaatttcagaaggaaaatgggtcaagcttgaaaaaacaacgtacatggatcctactggtaaaactagaacttgggaatcagtgaaacgtacaaccaggaaagagcagactgcggatggtgtcgcggtcatccccgtgctgcagagaacacttcactatgagtgtatcgttctggtgaaacagttccgaccaccaatggggggctactgcatagagttccctgcaggtctcatagatgatggtgaaaccccagaagcagctgctctccgggagcttgaagaagaaactggctacaaaggggacattgccgaatgttctccagcggtctgtatggacccaggcttgtcaaactgtactatacacatcgtgacagtcaccattaacggagatgatgccgaaaacgcaaggccgaagccaaagccaggggatggagagtttgtggaagtcatttctttacccaagaatgacctgctgcagagacttgatgctctggtagctgaagaacatctcacagtggacgccagggtctattcctacgctctagcactgaaacatgcaaatgcaaagccatttgaagtgcccttcttgaaattttaagcccaaatatgacactggccatttttgtaaacgagaccaccaggccttcttcactaagactttgtattcaacttagtttaatgtagatttgccattagctttttcgtaaaataaaagcacagaacagatgtggtggtggtatggaattgtaattacaggtaggttgtgaccttcctttaaatttgttataactccagctaaaattaacaaagaatataaatgcaagtatgtttactccaatttttttaaagctcaacagcagttaactacagctcagttacttttctagtccagtctggtagacaggggtatttgtatagagaaatagacctgagttctcaattaggtcatttccactctcaacccccaatataaaattctaagctgggtatgcaaataaccatgtactccgttagtgtttaaaacagcgttaaaaagaaaaaaaaggctttttggcctcttctaattgaatttttactatgcaaaatttatctagggtagttgaatccaactagggtagggttcgatagaatcctctactagttttcagttcatctatttactgaggctgaaccagcttttaagtaaggaaaacggttgactccattcactacaccaaggctaggagactaatgaaaattcaggtccatcccgcaagcatctgcacgtgcttgaggatctcttttcctattcttacctcaaagagtacttgaagtttctgaaaacaaatctgtaagactgacatgtttggggcagtaatatcttgatgttaaaccatgaacagaaccagcaagatcagccagtacctgaaacccaatacagagtagttcacagcaagaagtacagattgatctggttcccatgcctgaaaccctgtcatctagcagttctaccagtgttcctgggccattttcttagcttcttgagtgagtttagctctttttgtgttgacttttagggcctccagcagctccatgattttccaggactttccagtctggcccccacggaattctcaggatgattctcatccagccctaagtcatgtttctagcctggctccagcgggtaagccaggccctgagaaccatatgaaagggctctccagataaaatcagagtgctaatgccagaatgctgcagtagcctccgtttgtccacaggctcactgtctgagcccaggatatttttatgagtgaaactgtaagatctttacactggacttcctaaagataaaacaattatggaaatacagaactttacagatgaagctgtctagccctatacatgtgaaaattaagatccaactacttcctgtaatggtagccttcccctatgcctctaacccttttttaaatcctgatttcaatcacaggcattgtgattctccaaagctctaactcttccttaggtctgaaagccacatgctatcaatcattgaaatcaagagagaaggcatccgtagacgggcgcagcccagtctttccacatagcccagttcctccccagccactccccatgggaatgacctctgcagctgacctaagcttatcctctccttcttcctaagagtgcaacttagaagtcagagccaaatcctagaatgtatccctaaatgccatttctattttttataaacatgaaaaggttgtgctttggaaattcagtctgtttgagaactggcagtctggctggcactgtttaaaaatgtttatttgccctgcatttaaaaactgaaggtttcctatgtattaaaagccatatttccaccttcttaagggaaaaaaaaatcggacgtcataacactgggtggatgtttttatggtaacagtggtctgaggcccttggcggatgctcaccgagccactgtcactatcctgcctgcctttatctgccttgccctgcgattatttggctttgtaagcataagctacgtaagacataccacacctaagaaactaaacagcaatgaaaacccatacttctgaaaagggtgtcttttaaaaattaagtttgatcttttgggaaataaagcacatagttttcaaaatgatttaccaagatctatgctctttcaaatggagactgggatattgttgttttgagaccactgttttcctgtttcctcccaaatgttagtcacatatatgattacccttaagttggtcactatctatctatctgtcaataatttaggattaaagtttgaagtgtaattacatttgacttttacaggcatctcagggtggacttcttatgaatacactgaacctatacaaatgatcttagaaaacgtttaatatcagatttctttattttttccaacacaactgaatcagttttcttaaataaaagtttattgtctactgtttacactc

SEQ ID NO: 161606 - DNA, 622 bp, Homo sapiens
  Payload ID: 11551
  Gene Symbol: NUDT5
  Gene Name: nudix (nucleoside diphosphate linked moiety X)-type motif 5
  ENST ID: ENST00000476462
  CDS Start-End: 1-412
aacttgggaatcagtgaaacgtacaaccaggaaagagcagactgcggatggtgtcgcggtcatccccgtgctgcagagaacacttcactatgagtgtatcgttctggtgaaacagttccgaccaccaatggggggctactgcatagagttccctgcaggtctcatagatgatggtgaaaccccagaagcagctgctctccgggagcttgaagaagaaactggctacaaaggggacattgccgaatgttctccagcggtctgtatggacccaggcttgtcaaactgtactatacacatcgtgacagtcaccattaacggagatgatgccgaaaacgcaaggccgaagccaaagccaggggatggaggtatgttctgcaactcctggtggccgagcgtgtatgacttagtgtagtggtgatggctgcagacattttgggttgttttggtaggctcttgacgttagctttgttttcacttgcactttgtctgtttagagtttgtggaagtcatttctttacccaagaatgacctgctgcagagacttgatgctctggtagctgaagaacatctcacagtggacgccagggtctattcctacgctctagcactgaaacatgcaaat

SEQ ID NO: 161607 - DNA, 1201 bp, Homo sapiens
  Payload ID: 11551
  Gene Symbol: NUDT5
  Gene Name: nudix (nucleoside diphosphate linked moiety X)-type motif 5
  Uniprot ID: Q9UKK9
  ENST ID: ENST00000537776
  CDS Start-End: 417-1076
ggactcttccggtccctaaagcaagaaggaagaccgagaaaaggaagcggaggagaatcccggggcatacgcttgacacacacgcatacaaaaagagctttagtctcgaaagaggaattaccgaagtgtcgagagaggaattttaagaagtttacaactccgtcttcgccctaaacgcacgctgacccggaaagtaatctcctgaagctaggtcaaaggcgggggttctacggatgccggaaggagggtgcgcgcccatccttttagcaccgcgagaggcgccggtgtttcgagccgtggcaccggcatcggctgacactgctgcctccagctagttatttcgtcctcttccgttcttcacccctacaccttggaggtgaacttctcacctgagggctgtaaagactcgtttgaaaatggagagccaagaaccaacggaatcttctcagaatggcaaacagtatatcatttcagaggagttaatttcagaaggaaaatgggtcaagcttgaaaaaacaacgtacatggatcctactggtaaaactagaacttgggaatcagtgaaacgtacaaccaggaaagagcagactgcggatggtgtcgcggtcatccccgtgctgcagagaacacttcactatgagtgtatcgttctggtgaaacagttccgaccaccaatggggggctactgcatagagttccctgcaggtctcatagatgatggtgaaaccccagaagcagctgctctccgggagcttgaagaagaaactggctacaaaggggacattgccgaatgttctccagcggtctgtatggacccaggcttgtcaaactgtactatacacatcgtgacagtcaccattaacggagatgatgccgaaaacgcaaggccgaagccaaagccaggggatggagagtttgtggaagtcatttctttacccaagaatgacctgctgcagagacttgatgctctggtagctgaagaacatctcacagtggacgccagggtctattcctacgctctagcactgaaacatgcaaatgcaaagccatttgaagtgcccttcttgaaattttaagcccaaatatgacactggccatttttgtaaacgagaccaccaggccttcttcactaagactttgtattcaacttagtttaatgtagatttgccattagctttttcgtaaaataaaagcacagaac

SEQ ID NO: 161608 - DNA, 1169 bp, Homo sapiens
  Payload ID: 11552
  Gene Symbol: NUDT6
  Gene Name: nudix (nucleoside diphosphate linked moiety X)-type motif 6
  Uniprot ID: P53370
  ENST ID: ENST00000304430
  CDS Start-End: 35-985
catttgggcaacggacgaattaagcggcgtggagatgcggcagccactgagctggggccgctggcgcgcgatgcttgcccgaacctacggccccgggccttcggcgggttaccgctgggcctcgggcgcacagggttacgtgcggaatccgccagttggagcgtgcgatctgcagggcgagctggacagattcgggggcatctcggtgcgcctggcgcggctcgatgcgctggaccgcctggacgctgccgccttccagaagggcttgcaggctgcagtacagcaatggcgatcagaaggtagaacagctgtatggctgcacattcccatcctccaaagccgatttattgcccctgctgcttccctgggcttctgctttcaccacgcagaatcggattcatcaacgttgactctgtggctgagagaagggcccagcagattaccaggatatgcttcacatcaagtaggagttgcaggagctgtatttgatgaaagtactagaaaaatactggttgtacaagatcgaaataaattgaaaaatatgtggaagtttccaggaggcctgtcagagcctgaagaagatattggagacacagcggttcgagaagtttttgaagagactggtataaaatcagaattcaggtccgtcctgagtattcggcaacagcacacaaatcctggagcttttgggaagtcagatatgtatatcatctgccgcctaaagccatattcattcaccataaatttttgccaggaagaatgcttaagatgtgagtggatggatctcaatgacctggcgaagactgaaaatacaactcccatcaccagcagagttgctaggctgctgctgtatgggtacagagaagggtttgacaaaattgacctgactgtggaagaacttccagcagtttacacaggactgttttataaactctatcataaggaactgccagagaattataaaactatgaaaggaattgattaaattcacatttatatgtttagaaacatgtagactaacgaatgacataagaaatagtggacattttggattgattaaacatctgactgtgattttctaatgtatatgatttccatgaagaaattttgtttctaaacatgcacattttaaaagcctcttttcgaataaagcaaatgcgtgaaaaaga

SEQ ID NO: 161609 - DNA, 1065 bp, Homo sapiens
  Payload ID: 11552
  Gene Symbol: NUDT6
  Gene Name: nudix (nucleoside diphosphate linked moiety X)-type motif 6
  Uniprot ID: P53370
  ENST ID: ENST00000339154
  CDS Start-End: 438-881
agcagtctttgaaacagctgtaacggcatctgtgaaagaagataggttccaggaacggaactgccacttagattgtaaattcctgaaaaacaggacgtttttgcatctcctcccggcttccccatccctaaaccaacgtctgttgaattaaactaccaaacaaaataactgcagtacagcaatggcgatcagaaggtagaacagctgtatggctgcacattcccatcctccaaagccgatttattgcccctgctgcttccctgggcttctgctttcaccacgcagaatcggattcatcaacgttgactctgtggctgagagaagggcccagcagattaccaggatatgcttcacatcaagtaggagttgcaggagctgtatttgatgaaagtactagaaaaatactggttgtacaagatcgaaataaattgaaaaatatgtggaagtttccaggaggcctgtcagagcctgaagaagatattggagacacagcggttcgagaagtttttgaagagactggtataaaatcagaattcaggtccgtcctgagtattcggcaacagcacacaaatcctggagcttttgggaagtcagatatgtatatcatctgccgcctaaagccatattcattcaccataaatttttgccaggaagaatgcttaagatgtgagtggatggatctcaatgacctggcgaagactgaaaatacaactcccatcaccagcagagttgctaggctgctgctgtatgggtacagagaagggtttgacaaaattgacctgactgtggaagaacttccagcagtttacacaggactgttttataaactctatcataaggaactgccagagaattataaaactatgaaaggaattgattaaattcacatttatatgtttagaaacatgtagactaacgaatgacataagaaatagtggacattttggattgattaaacatctgactgtgattttctaatgtatatgatttccatgaagaaattttgtttctaaacatgcacattttaaaagcctcttttcgaataaagcaaatgcgtgaaaaaga

SEQ ID NO: 161610 - DNA, 1620 bp, Homo sapiens
  Payload ID: 11552
  Gene Symbol: NUDT6
  Gene Name: nudix (nucleoside diphosphate linked moiety X)-type motif 6
  ENST ID: ENST00000512116
  CDS Start-End: 11-325
cggcgtggagatgcggcagccactgagctggggccgctggcgcgcgatgcttgcccgaacctacggccccgggccttcggcgggttaccgctgggcctcgggcgcacagggttacgtgcggaatccgccagttggagcgtgcgatctgcagggcgagctggacagattcgggggcatctcggtgcgcctggcgcggctcgatgcgctggaccgcctggacgctgccgccttccagaagggcttgcagggcaagtgcgcctgggacgaagggctcccggggctccagagcttttctaatgaaataaccgcggcccccactccctagtcgctctgtgcaccactgtcgagcccagagggaaagggagaaggcacgcgtgacctggacctgttttctggagcattcgtgcttagaccttttgctgggaggtctctaaggcggttgggtgaaatggtgaagatcccggactttgggatctgcaaccctggttgctggtccactttctactgtgcgacattcggaaattgccgtaaaccaccatttcctcttccacagaccccggtgataagaactcctggaattactgagagttaatttggataatgcacataaagtgcacagcacagtgcctgccacgtatttaaagctcagtagatctgcagtacagcaatggcgatcagaaggtagaacagctgtatggctgcacattcccatcctccaaagccgatttattgcccctgctgcttccctgggcttctgctttcaccacgcagaatcggattcatcaacgttgactctgtggctgagagaagggcccagcagattaccaggatatgcttcacatcaagtaggagttgcaggagctgtatttgatgaaagtactagaaaaatactggttgtacaagatcgaaataaattgaaaaatatgtggaagtttccaggaggcctgtcagagcctgaagaagatattggagacacagcggttcgagaagtttttgaagagactggtataaaatcagaattcaggtccgtcctgagtattcggcaacagcacacaaatcctggagcttttgggaagtcagatatgtatatcatctgccgcctaaagccatattcattcaccataaatttttgccaggaagaatgcttaagatgtgagtggatggatctcaatgacctggcgaagactgaaaatacaactcccatcaccagcagagttgctaggctgctgctgtatgggtacagagaagggtttgacaaaattgacctgactgtggaagaacttccagcagtttacacaggactgttttataaactctatcataaggaactgccagagaattataaaactatgaaaggaattgattaaattcacatttatatgtttagaaacatgtagactaacgaatgacataagaaatagtggacattttggattgattaaacatctgactgtgattttctaatgtatatgatttccatgaagaaattttgtttctaaacatgcacattttaaaagcctcttttcgaataaagcaaatgcgtgaaaaagatcattgctctaggtaagcttcactgggtaacagcagatgcaatataaaagggagaatatacattttaca

SEQ ID NO: 161611 - DNA, 1391 bp, Homo sapiens
  Payload ID: 11552
  Gene Symbol: NUDT6
  Gene Name: nudix (nucleoside diphosphate linked moiety X)-type motif 6
  ENST ID: ENST00000503370
  CDS Start-End: 3-317
agatgcggcagccactgagctggggccgctggcgcgcgatgcttgcccgaacctacggccccgggccttcggcgggttaccgctgggcctcgggcgcacagggttacgtgcggaatccgccagttggagcgtgcgatctgcagggcgagctggacagattcgggggcatctcggtgcgcctggcgcggctcgatgcgctggaccgcctggacgctgccgccttccagaagggcttgcagggcaagtgcgcctgggacgaagggctcccggggctccagagcttttctaatgaaataaccgcggcccccactccctagtcgctctgtgcaccactgtcgagcccagagggaaagggagaaggcacgcgtgacctggacctgttttctggagcattcgtgcttagaccttttgctgggaggtctctaaggcggttgggtgaaatggtgaagatcccggactttgggatctgcaaccctggttgctggtccactttctactgtgcgacattcggaaattgccgtaaaccaccatttcctcttccacagaccccgctgcagtacagcaatggcgatcagaaggtagaacagctgtatggctgcacattcccatcctccaaagccgatttattgcccctgctgcttccctgggcttctgctttcaccacgcagaatcggattcatcaacgttgactctgtggctgagagaagggcccagcagattaccaggatatgcttcacatcaagtaggagttgcaggagctgtatttgatgaaagtactagaaaaatactggttgtacaagatcgaaataaagagacacagcggttcgagaagtttttgaagagactggtataaaatcagaattcaggtccgtcctgagtattcggcaacagcacacaaatcctggagcttttgggaagtcagatatgtatatcatctgccgcctaaagccatattcattcaccataaatttttgccaggaagaatgcttaagatgtgagtggatggatctcaatgacctggcgaagactgaaaatacaactcccatcaccagcagagttgctaggctgctgctgtatgggtacagagaagggtttgacaaaattgacctgactgtggaagaacttccagcagtttacacaggactgttttataaactctatcataaggaactgccagagaattataaaactatgaaaggaattgattaaattcacatttatatgtttagaaacatgtagactaacgaatgacataagaaatagtggacattttggattgattaaacatctgactgtgattttctaatgtatatgatttccatgaagaaattttgtttctaaacatgcacattttaaaagcctcttttcgaataaagcaaatgcgtgaaaaa

SEQ ID NO: 161612 - DNA, 739 bp, Homo sapiens
  Payload ID: 11552
  Gene Symbol: NUDT6
  Gene Name: nudix (nucleoside diphosphate linked moiety X)-type motif 6
  ENST ID: ENST00000510735
  CDS Start-End: 1-152
gcgatctgcagggcgagctggacagattcgggggcatctcggtgcgcctggcgcggctcgatgcgctggaccgcctggacgctgccgccttccagaagggcttgcaggttgaaaaatatgtggaagtttccaggaggcctgtcagagcctgaagaagatattggagacacagcggttcgagaagtttttgaagagactggtataaaatcagaattcaggtccgtcctgagtattcggcaacagcacacaaatcctggagcttttgggaagtcagatatgtatatcatctgccgcctaaagccatattcattcaccataaatttttgccaggaagaatgcttaagatgtgagtggatggatctcaatgacctggcgaagactgaaaatacaactcccatcaccagcagagttgctaggctgctgctgtatgggtacagagaagggtttgacaaaattgacctgactgtggaagaacttccagcagtttacacaggactgttttataaactctatcataaggaactgccagagaattataaaactatgaaaggaattgattaaattcacatttatatgtttagaaacatgtagactaacgaatgacataagaaatagtggacattttggattgattaaacatctgactgtgattttctaatgtatatgatttccatgaagaaattttgtttctaaacatgcacattttaaaagcctcttttcgaataaagcaaatgcgtga

SEQ ID NO: 161613 - DNA, 678 bp, Homo sapiens
  Payload ID: 11552
  Gene Symbol: NUDT6
  Gene Name: nudix (nucleoside diphosphate linked moiety X)-type motif 6
  Uniprot ID: P53370
  ENST ID: ENST00000502270
  CDS Start-End: 148-591
ggcatcgtctgtaaagaatgagcccttattagacactgaatctgccagcaccttgatcttggacttcctagcttctagaactgagctgtatttgatgaaagtactagaaaaatactggttgtacaagatcgaaataaattgaaaaatatgtggaagtttccaggaggcctgtcagagcctgaagaagatattggagacacagcggttcgagaagtttttgaagagactggtataaaatcagaattcaggtccgtcctgagtattcggcaacagcacacaaatcctggagcttttgggaagtcagatatgtatatcatctgccgcctaaagccatattcattcaccataaatttttgccaggaagaatgcttaagatgtgagtggatggatctcaatgacctggcgaagactgaaaatacaactcccatcaccagcagagttgctaggctgctgctgtatgggtacagagaagggtttgacaaaattgacctgactgtggaagaacttccagcagtttacacaggactgttttataaactctatcataaggaactgccagagaattataaaactatgaaaggaattgattaaattcacatttatatgtttagaaacatgtagactaacgaatgacataagaaatagtggacattttggattgattaaacatctgactgt

SEQ ID NO: 161614 - DNA, 1096 bp, Homo sapiens
  Payload ID: 11553
  Gene Symbol: NUDT7
  Gene Name: nudix (nucleoside diphosphate linked moiety X)-type motif 7
  Uniprot ID: P0C024
  ENST ID: ENST00000268533
  CDS Start-End: 70-786
gctctgcgcaagcgcgaccgaccgagcagctccgaggagtccgcccggaaacaaacattccccagggcaatgtcacgacttggtcttcccgaggagccagtcagaaacagtttgctagatgatgctaaggcccgcttaagaaagtatgatattggaggcaaatattctcacttgccatataacaaatactccgtccttttgccattggtggctaaagaaggaaaactccatttgttgttcaccgtccggtcagagaagctaagaagggcccctggagaagtttgcttccctggaggtaagcgtgaccctacagacatggatgatgcagccacagctctccgggaagcccaggaggaagtgggtctccgtcctcaccaagtggaagttgtctgctgcctggtgccatgtcttattgatacagatacattgataactccatttgtgggtttaatagaccacaacttccaggcccagccgaatcctgctgaagttaaggatgtattcctggtgcctctggcctatttcctgcatccacaggtccatgaccagcattacgtcacacgtcttggtcaccgttttattaatcatatctttgagtacacaaaccctgaagacggtgtcacttaccagatcaagggaatgacggcaaaccttgcagtgttggtggcctttatcattttggaaaaaaaacccacctttgaggttcaatttaatcttaatgatgtattagcatcctctgaagagttattcctgaaggttcataaaaaagctacaagcaggttatgatttactagagcaagagacaaagaactattcacgaggattctgtgtgtgcttattcgtagaacaacaacaatgccagctgttggaatttgacaggtgtgaatattttttctgcagtatgtagttagaatccttgcctcttttccagttgccttctattgtctgaaaaagtaaaagccattcaaaaatgaaaactatgttcatagtgttgcatattttcacccacaatatgttaataatatttttcttacacatataataaagaatatctggcacatactaggcccttaataaagattttttgaatatataa

SEQ ID NO: 161615 - DNA, 930 bp, Homo sapiens
  Payload ID: 11553
  Gene Symbol: NUDT7
  Gene Name: nudix (nucleoside diphosphate linked moiety X)-type motif 7
  Uniprot ID: P0C024
  ENST ID: ENST00000437314
  CDS Start-End: 65-622
gcgcaagcgcgaccgaccgagcagctccgaggagtccgcccggaaacaaacattccccagggcaatgtcacgacttggtcttcccgaggagccagtcagaaacagtttgctagatgatgctaaggcccgcttaagaaagtatgatattggaggcaaatattctcacttgccatataacaaatactccgtccttttgccattggtggctaaagaaggaaaactccatttgttgttcaccgtccggtcagagaagacagatacattgataactccatttgtgggtttaatagaccacaacttccaggcccagccgaatcctgctgaagttaaggatgtattcctggtgcctctggcctatttcctgcatccacaggtccatgaccagcattacgtcacacgtcttggtcaccgttttattaatcatatctttgagtacacaaaccctgaagacggtgtcacttaccagatcaagggaatgacggcaaaccttgcagtgttggtggcctttatcattttggaaaaaaaacccacctttgaggttcaatttaatcttaatgatgtattagcatcctctgaagagttattcctgaaggttcataaaaaagctacaagcaggttatgatttactagagcaagagacaaagaactattcacgaggattctgtgtgtgcttattcgtagaacaacaacaatgccagctgttggaatttgacaggtgtgaatattttttctgcagtatgtagttagaatccttgcctcttttccagttgccttctattgtctgaaaaagtaaaagccattcaaaaatgaaaactatgttcatagtgttgcatattttcacccacaatatgttaataatatttttcttacacatataataaagaatatctggcacatactaggcccttaataaagattttttgaatatat

SEQ ID NO: 161616 - DNA, 316 bp, Homo sapiens
  Payload ID: 11553
  Gene Symbol: NUDT7
  Gene Name: nudix (nucleoside diphosphate linked moiety X)-type motif 7
  ENST ID: ENST00000563839
  CDS Start-End: 39-86
ccgaggagtccgcccggaaacaaacattccccagggcaatgtcacgacttggtcttcccgaggagccagtcagacagatacattgataactccatttgtgggtttaatagaccacaacttccaggcccagccgaatcctgctgaagttaaggatgtattcctggtgcctctggcctatttcctgcatccacaggtccatgaccagcattacgtcacacgtcttggtcaccgttttattaatcatatctttgagtacacaaaccctgaagacggtgtcacttaccagatcaagggaatgacggcaaaccttgcagtg

SEQ ID NO: 161617 - DNA, 678 bp, Homo sapiens
  Payload ID: 11553
  Gene Symbol: NUDT7
  Gene Name: nudix (nucleoside diphosphate linked moiety X)-type motif 7
  ENST ID: ENST00000568787
  CDS Start-End: 68-430
tctgcgcaagcgcgaccgaccgagcagctccgaggagtccgcccggaaacaaacattccccagggcaatgtcacgacttggtcttcccgaggagccagtcagaaacagtttgctagatgatgctaaggcccgcttaagaaagtatgatattggaggcaaatattctcacttgccatataacaaatactccgtccttttgccattggtggctaaagaaggaaaactccatttgttgttcaccgtccggtcagagaagctaagaagggcccctggagaagtttgcttccctggaggtaagcgtgaccctacagacatggatgatgcagccacagctctccgggaagcccaggaggaagtgggtctccgtcctcaccaagtggaagttgtctgctgcctggtgccatgtcttattgatgtaagggtttcctgagacactcatgagcaccgtccccacccccaggtggatctactgttctcaggattccacattttccaaacataaccccaaagagtactgtacataaagtcaagagaacaggttctcctacagacattgcccctcatgagtcaagtggctatgggcaaccccttttgcctctccggacccctctttccccatccagaaataaaagggttgaactcccatcagtggatttcaaactggatgccatagaaccc

SEQ ID NO: 161618 - DNA, 899 bp, Homo sapiens
  Payload ID: 11553
  Gene Symbol: NUDT7
  Gene Name: nudix (nucleoside diphosphate linked moiety X)-type motif 7
  Uniprot ID: P0C024
  ENST ID: ENST00000564085
  CDS Start-End: 70-582
gctctgcgcaagcgcgaccgaccgagcagctccgaggagtccgcccggaaacaaacattccccagggcaatgtcacgacttggtcttcccgaggagccagtcagaaacagtttgctagatgatgctaaggcccgcttaagaaagtatgatattggaggcaaatattctcacttgccatataacaaatactccgtccttttgccattggtggctaaagaaggaaaactccatttgttgttcaccgtccggtcagagaagctaagaagggcccctggagaagtttgcttccctggaggtaagcgtgaccctacagacatggatgatgcagccacagctctccgggaagcccaggaggaagtgggtctccgtcctcaccaagtggaagttgtctgctgcctggtgccatgtcttattgatagatgggggtctcgctatgttgatgaggctggtctcgagctcctggcctcaagtgatcctcccacctcagcctcccaaagtgctgggattacagacagatacattgataactccatttgtgggtttaatagaccacaacttccaggcccagccgaatcctgctgaagttaaggatgtattcctggtgcctctggcctatttcctgcatccacaggtccatgaccagcattacgtcacacgtcttggtcaccgttttattaatcatatctttgagtacacaaaccctgaagacggtgtcacttaccagatcaagggaatgacggcaaaccttgcagtgttggtggcctttatcattttggaaaaaaaacccacctttgaggttcaatttaatcttaatgatgtattagcatcctctgaagagttattcctgaaggttcataaaaaagctacaagcaggttatgatttactagagcaagagaca

SEQ ID NO: 161619 - DNA, 1073 bp, Homo sapiens
  Payload ID: 11553
  Gene Symbol: NUDT7
  Gene Name: nudix (nucleoside diphosphate linked moiety X)-type motif 7
  ENST ID: ENST00000613075
  CDS Start-End: 92-763
ggccgctcccaagcccagagctgctctgcgcaagcgcgaccgaccgagcagctccgaggagtccgcccggaaacaaacattccccagggcaatgtcacgacttggtcttcccgaggagccagtcagaaacagtttgctagatgatgctaaggcccgcttaagaaagtatgatattggaggcaaatattctcacttgccatataacaaatactccgtccttttgccattggtggctaaagaaggaaaactccatttgttgttcaccgtccggtcagagaagccatgtgaagtgcttgctcctcctttaccttccgccatgattgtaagtttcctgaggtctccccagaagccaagcagacgccagcatcatgctccctgtacggcctgcgagactacagatacattgataactccatttgtgggtttaatagaccacaacttccaggcccagccgaatcctgctgaagttaaggatgtattcctggtgcctctggcctatttcctgcatccacaggtccatgaccagcattacgtcacacgtcttggtcaccgttttattaatcatatctttgagtacacaaaccctgaagacggtgtcacttaccagatcaagggaatgacggcaaaccttgcagtgttggtggcctttatcattttggaaaaaaaacccacctttgaggttcaatttaatcttaatgatgtattagcatcctctgaagagttattcctgaaggttcataaaaaagctacaagcaggttatgatttactagagcaagagacaaagaactattcacgaggattctgtgtgtgcttattcgtagaacaacaacaatgccagctgttggaatttgacaggtgtgaatattttttctgcagtatgtagttagaatccttgcctcttttccagttgccttctattgtctgaaaaagtaaaagccattcaaaaatgaaaactatgttcatagtgttgcatattttcacccacaatatgttaataatatttttcttacacatataataaagaatatctggcacatactaggcccttaataaagattttttgaatatataa

SEQ ID NO: 161620 - DNA, 809 bp, Homo sapiens
  Payload ID: 11554
  Gene Symbol: NUDT8
  Gene Name: nudix (nucleoside diphosphate linked moiety X)-type motif 8
  Uniprot ID: Q8WV74
  ENST ID: ENST00000301490
  CDS Start-End: 20-442
cggccgcgcaggacttgacatgctgcccgactgcctgtcggccgagggcgagctgcgctgccgccggctgctggcaggggccacggcccggctccgcgcgcggcccgcgtcggccgcggtgctcgtgccgctctgctcagtgcgtggggtcccggcgctgctgtacacgctgcggtccagccgcctgaccgggaggcacaagggcgacgtcagtttcccaggcggcaagtgcgacccggctgaccaagatgtggtgcacacggccctgcgggaaacccgggaggagctgggcctggcagtgcccgaggagcacgtgtggggcctgctgcggcctgtgtatgatccgcaaaaggccaccgtggtgccagtgcttgctggtgtaggcccactggatccccagagcctcaggcccaactcggaggaggtgagctgggggatatgagggggttgggctgttccagtcctctgtctaccctctctgcctcctgcctgcaggtagatgaggtgtttgcactgccgctggcccacctgctgcagacgcagaatcagggctatacccacttctgccggggtggccacttccgctacacactacccgtcttcctgcatggaccacaccgggtctggggcctcacagctgtcatcactgagtttgccctgcagctgctggcacctggtacctaccagccccgcctggccggcctgacctgctcaggggctgagggtctggcccgccctaagcagcccctggcttcaccctgtcaggccagctccactccaggactgaataaaggtctttgacagctcta

SEQ ID NO: 161621 - DNA, 728 bp, Homo sapiens
  Payload ID: 11554
  Gene Symbol: NUDT8
  Gene Name: nudix (nucleoside diphosphate linked moiety X)-type motif 8
  Uniprot ID: Q8WV74
  ENST ID: ENST00000376693
  CDS Start-End: 11-721
aggacttgacatgctgcccgactgcctgtcggccgagggcgagctgcgctgccgccggctgctggcaggggccacggcccggctccgcgcgcggcccgcgtcggccgcggtgctcgtgccgctctgctcagtgcgtggggtcccggcgctgctgtacacgctgcggtccagccgcctgaccgggaggcacaagggcgacgtcagtttcccaggcggcaagtgcgacccggctgaccaagatgtggtgcacacggccctgcgggaaacccgggaggagctgggcctggcagtgcccgaggagcacgtgtggggcctgctgcggcctgtgtatgatccgcaaaaggccaccgtggtgccagtgcttgctggtgtaggcccactggatccccagagcctcaggcccaactcggaggaggtagatgaggtgtttgcactgccgctggcccacctgctgcagacgcagaatcagggctatacccacttctgccggggtggccacttccgctacacactacccgtcttcctgcatggaccacaccgggtctggggcctcacagctgtcatcactgagtttgccctgcagctgctggcacctggtacctaccagccccgcctggccggcctgacctgctcaggggctgagggtctggcccgccctaagcagcccctggcttcaccctgtcaggccagctccactccaggactgaataaaggtctttgacagctct

SEQ ID NO: 161622 - DNA, 1701 bp, Homo sapiens
  Payload ID: 11555
  Gene Symbol: NUDT9
  Gene Name: nudix (nucleoside diphosphate linked moiety X)-type motif 9
  Uniprot ID: Q9BW91
  ENST ID: ENST00000302174
  CDS Start-End: 325-1377
ccgtaaagcgccattacgcagagagaaagttacgaggttcgtggccgcggtttccccaggcagctggcgctggaggcttcggcgtcacgtgctggtctggatttttctcgatgcactggggaaagcggtggactcttatcgtgggagggctcttgatctgtgatttatagataggcacagctactcccgttcgggaacccaacggcagacaggtcctagtgcccatcagatacccgcggccgggactcggagctgtggggtgtggggaggcggaggcaccaactaagagcgacctagcatcgcaaagccgccctcggggcgctcatggcgggacgcctcctgggaaaggctttagccgcggtgtctctctctctggccttggcctctgtgactatcaggtcctcgcgctgccgcggcatccaggcgttcagaaactcgttttcatcttcttggtttcatcttaataccaacgtcatgtctggttctaatggttccaaagaaaattctcacaataaggctcggacgtctccttacccaggttcaaaagttgaacgaagccaggttcctaatgagaaagtgggctggcttgttgagtggcaagactataagcctgtggaatacactgcagtctctgtcttggctggacccaggtgggcagatcctcagatcagtgaaagtaatttttctcccaagtttaacgaaaaggatgggcatgttgagagaaagagcaagaatggcctgtatgagattgaaaatggaagaccgagaaatcctgcaggacggactggactggtgggccgggggcttttggggcgatggggcccaaatcacgctgcagatcccattataaccagatggaaaagggatagcagtggaaataaaatcatgcatcctgtttctgggaagcatatcttacaatttgttgcaataaaaaggaaagactgtggagaatgggcaatcccaggggggatggtggatccaggagagaagattagtgccacactgaaaagagaatttggtgaggaagctctcaactccttacagaaaaccagtgctgagaagagagaaatagaggaaaagttgcacaaactcttcagccaagaccacctagtgatatataagggatatgttgatgatcctcgaaacactgataatgcatggatggagacagaagctgtgaactaccatgacgaaacaggtgagataatggataatcttatgctagaagctggagatgatgctggaaaagtgaaatgggtggacatcaatgataaactgaagctttatgccagtcactctcaattcatcaaacttgtggctgagaaacgagatgcacactggagcgaggactctgaagctgactgccatgcgttgtagctgatggtctccgtgtaagccaaaggcccacagaggagcatatactgaaaagaaggcagtatcacagaatttatactataaaaagggcagggtaggccacttggcctatttactttcaaaacaatttgcatttagagtgtttcgcatcagaataacatgagtaagatgaactggaacacaaaattttcagctctttggtcaaaaggaatataagtaatcatattttgtatgtattcgatttaagcatggcttaaattaaatttaaacaactaatgctctttgaagaatcataatcagaataaagataaattcttgatcagctat

SEQ ID NO: 161623 - DNA, 951 bp, Homo sapiens
  Payload ID: 11555
  Gene Symbol: NUDT9
  Gene Name: nudix (nucleoside diphosphate linked moiety X)-type motif 9
  ENST ID: ENST00000440591
  CDS Start-End: 98-951
agatacccgcggccgggactcggagctgtggggtgtggggaggcggaggcaccaactaagagcgacctagcatcgcaaagccgccctcggggcgctcatggcgggacgcctcctgggaaaggctttagccgcggtgtctctctctctggccttggcctctgtgactatcaggtcctcgcgctgccgcggcatccaggcgttcagaaactcgttttcatcttcttggtttcatcttaataccaacgtcatgtctggttctaatggttccaaagaaaattctcacaataaggctcggacgtctccttacccaggttcaaaagttgaacgaagccaggttcctaatgagaaagtgggctggcttgttgagtggcaagactataagcctgtggaatacactgcagtctctgtcttggctggacccaggtgggcagatcctcagatcagaaatcctgcaggacggactggactggtgggccgggggcttttggggcgatggggcccaaatcacgctgcagatcccattataaccagatggaaaagggatagcagtggaaataaaatcatgcatcctgtttctgggaagcatatcttacaatttgttgcaataaaaaggaaagactgtggagaatgggcaatcccaggggggatggtggatccaggagagaagattagtgccacactgaaaagagaatttggtgaggaagctctcaactccttacagaaaaccagtgctgagaagagagaaatagaggaaaagttgcacaaactcttcagccaagaccacctagtgatatataagggatatgttgatgatcctcgaaacactgataatgcatggatggagacagaagctgtgaactaccatgacgaaacaggtgagataatggataatcttatgctagaagctggagatgatgctggaaaagtgaaatgggtggacatcaatgataa

SEQ ID NO: 161624 - DNA, 2458 bp, Homo sapiens
  Payload ID: 11555
  Gene Symbol: NUDT9
  Gene Name: nudix (nucleoside diphosphate linked moiety X)-type motif 9
  Uniprot ID: Q9BW91
  ENST ID: ENST00000473942
  CDS Start-End: 123-1025
acgcagagagaaagttacgaggttcgtggccgcggtttccccaggcagctggcgctggaggcttcggcgtcacgtgctgaaactcgttttcatcttcttggtttcatcttaataccaacgtcatgtctggttctaatggttccaaagaaaattctcacaataaggctcggacgtctccttacccaggttcaaaagttgaacgaagccaggttcctaatgagaaagtgggctggcttgttgagtggcaagactataagcctgtggaatacactgcagtctctgtcttggctggacccaggtgggcagatcctcagatcagtgaaagtaatttttctcccaagtttaacgaaaaggatgggcatgttgagagaaagagcaagaatggcctgtatgagattgaaaatggaagaccgagaaatcctgcaggacggactggactggtgggccgggggcttttggggcgatggggcccaaatcacgctgcagatcccattataaccagatggaaaagggatagcagtggaaataaaatcatgcatcctgtttctgggaagcatatcttacaatttgttgcaataaaaaggaaagactgtggagaatgggcaatcccaggggggatggtggatccaggagagaagattagtgccacactgaaaagagaatttggtgaggaagctctcaactccttacagaaaaccagtgctgagaagagagaaatagaggaaaagttgcacaaactcttcagccaagaccacctagtgatatataagggatatgttgatgatcctcgaaacactgataatgcatggatggagacagaagctgtgaactaccatgacgaaacaggtgagataatggataatcttatgctagaagctggagatgatgctggaaaagtgaaatgggtggacatcaatgataaactgaagctttatgccagtcactctcaattcatcaaacttgtggctgagaaacgagatgcacactggagcgaggactctgaagctgactgccatgcgttgtagctgatggtctccgtgtaagccaaaggcccacagaggagcatatactgaaaagaaggcagtatcacagaatttatactataaaaagggcagggtaggccacttggcctatttactttcaaaacaatttgcatttagagtgtttcgcatcagaataacatgagtaagatgaactggaacacaaaattttcagctctttggtcaaaaggaatataagtaatcatattttgtatgtattcgatttaagcatggcttaaattaaatttaaacaactaatgctctttgaagaatcataatcagaataaagataaattcttgatcagctataacttctgtttcatctagttcttgtttgtcaatgccttccctcccgctccccatcttctgaggcctgaaggatgttcctgccacatcaaactcctttaggcagagtaccgccactggatgtatagtttaatgtttcatctgatttttctttaaattatttccttcacattttgcttcacatgatcttgttgaagctaattttgaaaatggaaactatgttttcttgactttagaagcattagttttaagaggaaatttcagccactagtcaatagagatcaaaatcagtgaacaagagctgatactctcattttcaaaaattctgaattaaaaaaagtccaggaagttagtaatttaaatcagtatgttcatttcactctagtgaaactactatatgttgtaaattagttaaaaatggatgttcagaaaagaattgaaatcaggacaaaaaattacagatgctagtgaggttgtagagaaaaaggaatgcttatacgctgttagtgggagtgtaaattggtccaaccattgtggaagagagtgtagagagtcctcaaatatttaaagatatttgacccagtaatcccattactaggtatatacccgaaggaatataaattgttctattataaacacatactcacgtgtatgttcattgctgcactattcacaatagcgaagacatgaaatcaacctaaatgttcatcagtgatagactggataaagacaatgtggtatatgtacaccatggaatactatgcagccgtaaaaaagaataagatcatgtcctctgaaaagacatgggtggagctggaggccattatccttagcaaactaatgcaagaacagaaaaccaaacactgcatgttctcttataagtgagagctaaatggtgagaacacatggacatgggaacaacacattctggggtctattggagggtgggaggagggagaggatcaggaaaaataactaatgagtactaggcttaataccttggtgatgaaattatctgtacaacaaaccctcatgacacaagtttacctatgtaacaaacctgcacatgtacccctgtacttaacaacaaaataaacacaaaggaaaatgtt

SEQ ID NO: 161625 - DNA, 440 bp, Homo sapiens
  Payload ID: 11555
  Gene Symbol: NUDT9
  Gene Name: nudix (nucleoside diphosphate linked moiety X)-type motif 9
  ENST ID: ENST00000502933
  CDS Start-End: 25-258
cgcaaagccgccctcggggcgctcatggcgggacgcctcctgggaaaggctttagccgcggtgtctctctctctggccttggcctctgtgactatcaggtcctcgcgctgccgcggcatccaggcgttcagaaatcctgcaggacggactggactggtgggccgggggcttttggggcgatggggcccaaatcacgctgcagatcccattataaccaggggatggtggatccaggagagaagattagtgccacactgaaaagagaatttggtgaggaagctctcaactccttacagaaaaccagtgctgagaagagagaaatagaggaaaagttgcacaaactcttcagccaagaccacctagtgatatataagggatatgttgatgatcctcgaaacactgataatgcatggatggagacagaagctgtgaactaccat

SEQ ID NO: 161626 - DNA, 690 bp, Homo sapiens
  Payload ID: 11555
  Gene Symbol: NUDT9
  Gene Name: nudix (nucleoside diphosphate linked moiety X)-type motif 9
  ENST ID: ENST00000512216
  CDS Start-End: 73-690
gcgccattacgcagagagaaagttacgagaaactcgttttcatcttcttggtttcatcttaataccaacgtcatgtctggttctaatggttccaaagaaaattctcacaataaggctcggacgtctccttacccaggttcaaaagttgaacgaagccaggttcctaatgagaaagtgggctggcttgttgagtggcaagactataagcctgtggaatacactgcagtctctgtcttggctggacccaggtgggcagatcctcagatcagtgaaagtaatttttctcccaagtttaacgaaaaggatgggcatgttgagagaaagagcaagaatggcctgtatgagattgaaaatggaagaccgagaaatcctgcaggacggactggactggtgggccgggggcttttggggcgatggggcccaaatcacgctgcagatcccattataaccagatggaaaagggatagcagtggaaataaaatcatgcatcctgtttctgggaagcatatcttacaatttgttgcaataaaaaggaaagactgtggagaatgggcaatcccaggggggatggtggatccaggagagaagattagtgccacactgaaaagagaatttggtgaggaagctctcaactccttacagaaaaccagtgctgagaagagagaaatagaggaaaagttgcacaaactc

SEQ ID NO: 161627 - DNA, 1969 bp, Homo sapiens
  Payload ID: 11556
  Gene Symbol: NUF2
  Gene Name: NUF2, NDC80 kinetochore complex component
  Uniprot ID: Q9BZD4
  ENST ID: ENST00000271452
  CDS Start-End: 280-1674
agtaggaggcggcaagtttgaaaagtgatgacggttgacgtttgctgatttttgactttgcttgtagctgctccccgaactcgccgtcttcctgtcggcggccggcactgtaggtgagcgcgagaggacggaggaaggaagcctgcagacagacgccttctccatcccaaggcgcgggcaggtgccgggacgctgggcctggcggtgttttcgtcgtgctcagcggtgggaggaggcggaagaaaccagagcctgggagattaacaggaaacttccaagatggaaactttgtctttccccagatataatgtagctgagattgtgattcatattcgcaataagatcttaacaggagctgatggtaaaaacctcaccaagaatgatctttatccaaatccaaagcctgaagtcttgcacatgatctacatgagagccttacaaatagtatatggaattcgactggaacatttttacatgatgccagtgaactctgaagtcatgtatccacatttaatggaaggcttcttaccattcagcaatttagttactcatctggactcatttttgcctatctgccgggtgaatgactttgagactgctgatattctatgtccaaaagcaaaacggacaagtcggtttttaagtggcattatcaactttattcacttcagagaagcatgccgtgaaacgtatatggaatttctttggcaatataaatcctctgcggacaaaatgcaacagttaaacgccgcacaccaggaggcattaatgaaactggagagacttgattctgttccagttgaagagcaagaagagttcaagcagctttcagatggaattcaggagctacaacaatcactaaatcaggattttcatcaaaaaacgatagtgctgcaagagggaaattcccaaaagaagtcaaatatttcagagaaaaccaagcgtttgaatgaactaaaattgtcggtggtttctttgaaagaaatacaagagagtttgaaaacaaaaattgtggattctccagagaagttaaagaattataaagaaaaaatgaaagatacggtccagaagcttaaaaatgccagacaagaagtggtggagaaatatgaaatctatggagactcagttgactgcctgccttcatgtcagttggaagtgcagttatatcaaaagaaaatacaggacctttcagataatagggaaaaattagccagtatcttaaaggagagcctgaacttggaggaccaaattgagagtgatgagtcagaactgaagaaattgaagactgaagaaaattcgttcaaaagactgatgattgtgaagaaggaaaaacttgccacagcacaattcaaaataaataagaagcatgaagatgttaagcaatacaaacgcacagtaattgaggattgcaataaagttcaagaaaaaagaggtgctgtctatgaacgagtaaccacaattaatcaagaaatccaaaaaattaaacttggaattcaacaactaaaagatgctgctgaaagggagaaactgaagtcccaggaaatatttctaaacttgaaaactgctttggagaaataccacgacggtattgaaaaggcagcagaggactcctatgctaagatagatgagaagacagctgaactgaagaggaagatgttcaaaatgtcaacctgattaacaaaattacatgtctttttgtaaatggcttgccatcttttaattttctatttagaaagaaaagttgaagcgaatggaagtatcagaagtaccaaataatgttggcttcatcagtttttatacactctcataagtagttaataagatgaatttaatgtaggcttttattaatttataattaaaataacttgtgcagctattcatgtctctactctgccccttgttgtaaatagtttgagtaaaacaaaactagttacctttgaaatatatatatttttttctgttactatca

SEQ ID NO: 161628 - DNA, 1842 bp, Homo sapiens
  Payload ID: 11556
  Gene Symbol: NUF2
  Gene Name: NUF2, NDC80 kinetochore complex component
  Uniprot ID: Q9BZD4
  ENST ID: ENST00000367900
  CDS Start-End: 153-1547
ggaatggggcgggacttccagtaggaggcggcaagtttgaaaagtgatgacggttgacgtttgctgatttttgactttgcttgtagctgctccccgaactcgccgtcttcctgtcggcggccggcactgtagattaacaggaaacttccaagatggaaactttgtctttccccagatataatgtagctgagattgtgattcatattcgcaataagatcttaacaggagctgatggtaaaaacctcaccaagaatgatctttatccaaatccaaagcctgaagtcttgcacatgatctacatgagagccttacaaatagtatatggaattcgactggaacatttttacatgatgccagtgaactctgaagtcatgtatccacatttaatggaaggcttcttaccattcagcaatttagttactcatctggactcatttttgcctatctgccgggtgaatgactttgagactgctgatattctatgtccaaaagcaaaacggacaagtcggtttttaagtggcattatcaactttattcacttcagagaagcatgccgtgaaacgtatatggaatttctttggcaatataaatcctctgcggacaaaatgcaacagttaaacgccgcacaccaggaggcattaatgaaactggagagacttgattctgttccagttgaagagcaagaagagttcaagcagctttcagatggaattcaggagctacaacaatcactaaatcaggattttcatcaaaaaacgatagtgctgcaagagggaaattcccaaaagaagtcaaatatttcagagaaaaccaagcgtttgaatgaactaaaattgtcggtggtttctttgaaagaaatacaagagagtttgaaaacaaaaattgtggattctccagagaagttaaagaattataaagaaaaaatgaaagatacggtccagaagcttaaaaatgccagacaagaagtggtggagaaatatgaaatctatggagactcagttgactgcctgccttcatgtcagttggaagtgcagttatatcaaaagaaaatacaggacctttcagataatagggaaaaattagccagtatcttaaaggagagcctgaacttggaggaccaaattgagagtgatgagtcagaactgaagaaattgaagactgaagaaaattcgttcaaaagactgatgattgtgaagaaggaaaaacttgccacagcacaattcaaaataaataagaagcatgaagatgttaagcaatacaaacgcacagtaattgaggattgcaataaagttcaagaaaaaagaggtgctgtctatgaacgagtaaccacaattaatcaagaaatccaaaaaattaaacttggaattcaacaactaaaagatgctgctgaaagggagaaactgaagtcccaggaaatatttctaaacttgaaaactgctttggagaaataccacgacggtattgaaaaggcagcagaggactcctatgctaagatagatgagaagacagctgaactgaagaggaagatgttcaaaatgtcaacctgattaacaaaattacatgtctttttgtaaatggcttgccatcttttaattttctatttagaaagaaaagttgaagcgaatggaagtatcagaagtaccaaataatgttggcttcatcagtttttatacactctcataagtagttaataagatgaatttaatgtaggcttttattaatttataattaaaataacttgtgcagctattcatgtctctactctgccccttgttgtaaatagtttgagtaaaacaaaactagttacctttgaaatatatatatttttttctgttactatca

SEQ ID NO: 161629 - DNA, 1133 bp, Homo sapiens
  Payload ID: 11556
  Gene Symbol: NUF2
  Gene Name: NUF2, NDC80 kinetochore complex component
  ENST ID: ENST00000442820
  CDS Start-End: 528-1133
ggaatggggcgggacttccagtaggaggcggcaagtttgaaaagtgatgacggttgacgtttgctgatttttgactttgcttgtagctgctccccgaactcgccgtcttcctgtcggcggccggcactgtaggtgagcgcgagaggacggaggaaggaagcctgcagacagacgccttctccatcccaaggcgcgggcaggtgccgggacgctgggcctggcggtgttttcgtcgtgctcagcggtgggaggaggcggaagaaaccagagcctgggaggagctcaaactatgtagttggaaagtgtcttcatctctcgttaatgaataaattgtaactgaaattgtacttcgaaagaatgatagaatttggatattggaggaggttccaaaaggaaatactggaagtttgggaaagttaggagactaacttggagcagaaatttcattcaattattaaagggtttagaagcctagcagaaaaatttgaatttgatgtggtgggtaagattaacaggaaacttccaagatggaaactttgtctttccccagatataatgtagctgagattgtgattcatattcgcaataagatcttaacaggagctgatggtaaaaacctcaccaagaatgatctttatccaaatccaaagcctgaagtcttgcacatgatctacatgagagccttacaaatagtatatggaattcgactggaacatttttacatgatgccagtgaactctgaagtcatgtatccacatttaatggaaggcttcttaccattcagcaatttagttactcatctggactcatttttgcctatctgccgggtgaatgactttgagactgctgatattctatgtccaaaagcaaaacggacaagtcggtttttaagtggcattatcaactttattcacttcagagaagcatgccgtgaaacgtatatggaatttctttggcaatataaatcctctgcggacaaaatgcaacagttaaacgccgcacaccaggaggcattaatgaaactggagagacttgattctgttccagttgaagagcaagaagagttcaagcagctttcagatggaattcaggagctacaacaatcactaaatcaggattttcatcaaaaaacg

SEQ ID NO: 161630 - DNA, 861 bp, Homo sapiens
  Payload ID: 11556
  Gene Symbol: NUF2
  Gene Name: NUF2, NDC80 kinetochore complex component
  ENST ID: ENST00000450453
  CDS Start-End: 427-861
tcttgagcccaaccggcatccgtcgcggttggacgtgggcttggcggaatggggcgggacttccagtaggaggcggcaagtttgaaaagtgatgacggttgacgtttgctgatttttgactttgcttgtagctgctccccgaactcgccgtcttcctgtcggcggccggcactgtaggagctcaaactatgtagttggaaagtgtcttcatctctcgttaatgaataaattgtaactgaaattgtacttcgaaagaatgatagaatttggatattggaggaggttccaaaaggaaatactggaagtttgggaaagttaggagactaacttggagcagaaatttcattcaattattaaagggtttagaagcctagcagaaaaatttgaatttgatgtggtgggtaagattaacaggaaacttccaagatggaaactttgtctttccccagatataatgtagctgagattgtgattcatattcgcaataagatcttaacaggagctgatggtaaaaacctcaccaagaatgatctttatccaaatccaaagcctgaagtcttgcacatgatctacatgagagccttacaaatagtatatggaattcgactggaacatttttacatgatgccagtgaactctgaagtcatgtatccacatttaatggaaggcttcttaccattcagcaatttagttactcatctggactcatttttgcctatctgccgggtgaatgactttgagactgctgatattctatgtccaaaagcaaaacggacaagtcggtttttaagtggcattatcaactttattcacttcagagaagcatgccgtgaaacgtatatggaatttctttggcaatat

SEQ ID NO: 161631 - DNA, 567 bp, Homo sapiens
  Payload ID: 11556
  Gene Symbol: NUF2
  Gene Name: NUF2, NDC80 kinetochore complex component
  ENST ID: ENST00000534289
  CDS Start-End: 195-567
aatgcttattcattcttcaagattcagctcaaaattcacttttctctgtgaattcgtatgtcactccatctaccacacagcctctctcagcttcctcagaaaacagccatatgaaagccaagaagagagtcctcaccaggcaccttgaacttgcacttcccagactccagaaatattaacaggaaacttccaagatggaaactttgtctttccccagatataatgtagctgagattgtgattcatattcgcaataagatcttaacaggagctgatggtaaaaacctcaccaagaatgatctttatccaaatccaaagcctgaagtcttgcacatgatctacatgagagccttacaaatagtatatggaattcgactggaacatttttacatgatgccagtgaactctgaagtcatgtatccacatttaatggaaggcttcttaccattcagcaatttagttactcatctggactcatttttgcctatctgccgggtgaatgactttgagactgctgatattctatgtccaaaagcaaaacggacaagtcggtttttaagtggcatta

SEQ ID NO: 161632 - DNA, 885 bp, Homo sapiens
  Payload ID: 11556
  Gene Symbol: NUF2
  Gene Name: NUF2, NDC80 kinetochore complex component
  ENST ID: ENST00000497990
  CDS Start-End: 42-707
tgtcggcggccggcactgtagattaacaggaaacttccaagatggaaactttgtctttccccagatataatgtagctgagattgtgattcatattcgcaataagatcttaacaggagctgatggtaaaaacctcaccaagaatgatctttatccaaatccaaagcctgaagtcttgcacatgatctacatgagagccttacaaatagtatatggaattcgactggaacatttttacatgatgccagtgaactctgaagtcatgtatccacatttaatggaaggcttcttaccattcagcaatttagttactcatctggactcatttttgcctatctgccgggtgaatgactttgagactgctgatattctatgtccaaaagcaaaacggacaagtcggtttttaagtggcattatcaactttattcacttcagagaagcatgccgtgaaacgtatatggaatttctttggcaatataaatcctctgcggacaaaatgcaacagttaaacgccgcacaccaggaggcattaatgaaactggagagacttgattctgttccagttgaagagcaagaagagttcaagcagctttcagatggaattcaggagctacaacaatcactaaatcaggattttcatcaaaaaacgtgctgcaagagggaaattcccaaaagaagtcaaatatttcagagaaaaccaagcgtttgaatgaactaaaattgtcggtggtttctttgaaagaaatacaagagagtttgaaaacaaaaattgtggattctccagagaagttaaagaattataaagaaaaaatgaaagatacggtccagaagcttaaaaatgccagacaagaagtggtggagaaatatgaaatctatggagactcagt

SEQ ID NO: 161633 - DNA, 1845 bp, Homo sapiens
  Payload ID: 11556
  Gene Symbol: NUF2
  Gene Name: NUF2, NDC80 kinetochore complex component
  ENST ID: ENST00000524800
  CDS Start-End: 334-1587
aaccggcatccgtcgcggttggacgtgggcttggcggaatggggcgggacttccagtaggaggcggcaagtttgaaaagtgatgacggttgacgtttgctgatttttgactttgcttgtagctgctccccgaactcgccgtcttcctgtcggcggccggcactgtaggtgagcgcgagaggacggaggaaggaagcctgcagacagacgccttctccatcccaaggcgcgggcaggtgccgggacgctgggcctggcggtgttttcgtcgtgctcagcggtgggaggaggcggaagaaaccagagcctgggagattaacaggaaacttccaagatggaaactttgtctttccccagatataatgtagctgagattgtgattcatattcgcaataagatcttaacaggagctgatggtaaaaacctcaccaagaatgatctttatccaaatccaaagcctgaagtcttgcacatgatctacatgagagccttacaaatagtatatggaattcgactggaacatttttacatgatgccagtgaactctgaagtcatgtatccacatttaatggaaggcttcttaccattcagcaatttagttactcatctggactcatttttgcctatctgccgggtgaatgactttgagactgctgatattctatgtccaaaagcaaaacggacaagtcggtttttaagtggcattatcaactttattcacttcagagaagcatgccgtgaaacgtatatggaatttctttggcaatataaatcctctgcggacaaaatgcaacagttaaacgccgcacaccaggaggcattaatgaaactggagagacttgattctgttccagttgaagagcaagaagagttcaagcagctttcagatggaattcaggagctacaacaatcactaaatcaggattttcatcaaaaaacgatagtgctgcaagagggaaattcccaaaagaagtcaaatatttcagagaaaaccaagcgtttgaatgaactaaaattgtcggtggtttctttgaaagaaatacaagagagtttgaaaacaaaaattgtggattctccagagaagttaaagaattataaagaaaaaatgaaagatacggtccagaagcttaaaaatgccagaagcctgaacttggaggaccaaattgagagtgatgagtcagaactgaagaaattgaagactgaagaaaattcgttcaaaagactgatgattgtgaagaaggaaaaacttgccacagcacaattcaaaataaataagaagcatgaagatgttaagcaatacaaacgcacagtaattgaggattgcaataaagttcaagaaaaaagaggtgctgtctatgaacgagtaaccacaattaatcaagaaatccaaaaaattaaacttggaattcaacaactaaaagatgctgctgaaagggagaaactgaagtcccaggaaatatttctaaacttgaaaactgctttggagaaataccacgacggtattgaaaaggcagcagaggactcctatgctaagatagatgagaagacagctgaactgaagaggaagatgttcaaaatgtcaacctgattaacaaaattacatgtctttttgtaaatggcttgccatcttttaattttctatttagaaagaaaagttgaagcgaatggaagtatcagaagtaccaaataatgttggcttcatcagtttttatacactctcataagtagttaataagatgaatttaatgtaggcttttattaatttataattaaaataacttgtgcagctattcatgtctctactctgccccttgttgtaaatagtttgagtaaaacaaaactagtt

SEQ ID NO: 161634 - DNA, 3342 bp, Homo sapiens
  Payload ID: 11557
  Gene Symbol: NUMB
  Gene Name: numb homolog (Drosophila)
  Uniprot ID: P49757
  ENST ID: ENST00000355058
  CDS Start-End: 19-1974
caggctgtaaaaattaaaatgaacaaattacggcaaagttttaggagaaagaaggatgtttatgttccagaggccagtcgtccacatcagtggcagacagatgaagaaggcgttcgcaccggaaaatgtagcttcccggttaagtaccttggccatgtagaagttgatgaatcaagaggaatgcacatctgtgaagatgctgtaaaaagattgaaagctgaaaggaagttcttcaaaggcttctttggaaaaactggaaagaaagcagttaaagcagttctgtgggtctcagcagatggactcagagttgtggatgaaaaaactaaggacctcatagttgaccagacgatagagaaagtttctttctgtgccccagacaggaactttgatagagccttttcttacatatgccgtgatggcaccactcgtcgctggatctgtcactgcttcatggctgtcaaggacacaggtgaaaggttgagccatgcagtaggctgtgcttttgcagcctgtttagagcgcaagcagaagcgggagaaggaatgtggagtgactgctacttttgatgctagtcggaccacttttacaagagaaggatcattccgtgtcacaacagccactgaacaagcagaaagagaggagatcatgaaacaaatgcaagatgccaagaaagctgaaacagataagatagtcgttggttcatcagttgcccctggcaacactgccccatccccatcctctcccacctctcctacttctgatgccacgacctctctggagatgaacaatcctcatgccatcccacgccggcatgctccaattgaacagcttgctcgccaaggctctttccgaggttttcctgctcttagccagaagatgtcaccctttaaacgccaactatccctacgcatcaatgagttgccttccactatgcagaggaagactgatttccccattaaaaatgcagtgccagaagtagaaggggaggcagagagcatcagctccctgtgctcacagatcaccaatgccttcagcacacctgaggaccccttctcatctgctccgatgaccaaaccagtgacagtggtggcaccacaatctcctaccttccaagctaatggcactgactcagccttccatgtgcttgctaagccagcccatactgctctagcacccgtagcaatgcctgtgcgtgaaaccaacccttgggcccatgcccctgatgctgctaacaaggaaattgcagccacatgttcggggaccgagtggggtcaatcttctggtgctgcctctccaggtctcttccaggccggtcatagacgtactccctctgaggccgaccgatggttagaagaggtgtctaagagcgtccgggctcagcagccccaggcctcagctgctcctctgcagccagttctccagcctcctccacccactgccatctcccagccagcatcacctttccaagggaatgcattcctcacctctcagcctgtgccagtgggtgtggtcccagccctgcaaccagcctttgtccctgcccagtcctatcctgtggccaatggaatgccctatccagcccctaatgtgcctgtggtgggcatcactccctcccagatggtggccaacgtatttggcactgcaggccaccctcaggctgcccatccccatcagtcacccagcctggtcaggcagcagacattccctcactacgaggcaagcagtgctaccaccagtcccttctttaagcctcctgctcagcacctcaacggttctgcagctttcaatggtgtagatgatggcaggttggcctcagcagacaggcatacagaggttcctacaggcacctgcccagtggatccttttgaagcccagtgggctgcattagaaaataagtccaagcagcgtactaatccctcccctaccaaccctttctccagtgacttacagaagacgtttgaaattgaactttaagcaatcattatggctatgtatcttgtccataccagacagggagcagggggtagcggtcaaaggagcaaaacagactttgtctcctgattagtactcttttcactaatcccaaaggtcccaaggaacaagtccaggcccagagtactgtgaggggtgattttgaaagacatgggaaaaagcattcctagagaaaagctgccttgcaattaggctaaagaagtcaaggaaatgttgctttctgtactccctcttcccttacccccttacaaatctctggcaacagagaggcaaagtatctgaacaagaatctatattccaagcacatttactgaaatgtaaaacacaacaggaagcaaagcaatctccctttgtttttcaggccattcacctgcctcctgtcagtagtggcctgtattagagatcaagaagagtggtttgtgctcaggctggggaacagagaggcacgctatgctgccagaattcccaggagggcatatcagcaactgcccagcagagctatattttgggggagaagttgagcttccattttgagtaacagaataaatattatatatatcaaaagccaaaatctttatttttatgcatttagaatattttaaatagttctcagatattaagaagttgtatgagttgtaagtaatcttgccaaaggtaaaggggctagttgtaagaaattgtacataagattgatttatcattgatgcctactgaaataaaaagaggaaaggctggaagctgcagacaggatccctagcttgttttctgtcagtcattcattgtaagtagcacattgcaacaacaatcatgcttatgaccaatacagtcactaggttgtagttttttttaaataaaggaaaagcagtattgtcctggttttaaacctatgatggaattctaatgtcattattttaatggaatcaatcgaaatatgctctatagagaatatatcttttatatattgctgcagtttccttatgttaatcctttaacactaaggtaacatgacataatcataccatagaagggaacacaggttaccatattggtttgtaatatgggtcttggtgggttttgttttatcctttaaattttgttcccatgagttttgtggggatggggattctggttttattagctttgtgtgtgtcctcttcccccaaacccccttttggtgagaacatccccttgacagttgcagcctcttgacctcggataacaataagagagctcatctcatttttacttttgaacgttggccttacaatcaaatgtaagttatatatatttgtactgatgaaaatttataatctgctttaacaaaaataaatgttcatggtagaagctttt

SEQ ID NO: 161635 - DNA, 3453 bp, Homo sapiens
  Payload ID: 11557
  Gene Symbol: NUMB
  Gene Name: numb homolog (Drosophila)
  Uniprot ID: P49757
  ENST ID: ENST00000356296
  CDS Start-End: 280-2091
gcttgagttggtcgggggcagcggcagctgagctgggatgggagacccaactggcctggccgctccggctctgaggatccctaagggaccaggaaagaagtcctcgaggagtggctcgcgtttgagaccgggatttgaggcttaagcaacttcttccggggaagagtgccagtgcagccactgttacaattcaagatcttgatctatatccatagattggaatattggtgggccagcaatcctcagacgcctcacttaggacaagctgtaaaaattaaaatgaacaaattacggcaaagttttaggagaaagaaggatgtttatgttccagaggccagtcgtccacatcagtggcagacagatgaagaaggcgttcgcaccggaaaatgtagcttcccggttaagtaccttggccatgtagaagttgatgaatcaagaggaatgcacatctgtgaagatgctgtaaaaagattgaaagctgaaaggaagttcttcaaaggcttctttggaaaaactggaaagaaagcagttaaagcagttctgtgggtctcagcagatggactcagagttgtggatgaaaaaactaaggacctcatagttgaccagacgatagagaaagtttctttctgtgccccagacaggaactttgatagagccttttcttacatatgccgtgatggcaccactcgtcgctggatctgtcactgcttcatggctgtcaaggacacaggtgaaaggttgagccatgcagtaggctgtgcttttgcagcctgtttagagcgcaagcagaagcgggagaaggaatgtggagtgactgctacttttgatgctagtcggaccacttttacaagagaaggatcattccgtgtcacaacagccactgaacaagcagaaagagaggagatcatgaaacaaatgcaagatgccaagaaagctgaaacagataagatagtcgttggttcatcagttgcccctggcaacactgccccatccccatcctctcccacctctcctacttctgatgccacgacctctctggagatgaacaatcctcatgccatcccacgccggcatgctccaattgaacagcttgctcgccaaggctctttccgaggttttcctgctcttagccagaagatgtcaccctttaaacgccaactatccctacgcatcaatgagttgccttccactatgcagaggaagactgatttccccattaaaaatgcagtgccagaagtagaaggggaggcagagagcatcagctccctgtgctcacagatcaccaatgccttcagcacacctgaggaccccttctcatctgctccgatgaccaaaccagtgacagtggtggcaccacaatctcctaccttccaagggaccgagtggggtcaatcttctggtgctgcctctccaggtctcttccaggccggtcatagacgtactccctctgaggccgaccgatggttagaagaggtgtctaagagcgtccgggctcagcagccccaggcctcagctgctcctctgcagccagttctccagcctcctccacccactgccatctcccagccagcatcacctttccaagggaatgcattcctcacctctcagcctgtgccagtgggtgtggtcccagccctgcaaccagcctttgtccctgcccagtcctatcctgtggccaatggaatgccctatccagcccctaatgtgcctgtggtgggcatcactccctcccagatggtggccaacgtatttggcactgcaggccaccctcaggctgcccatccccatcagtcacccagcctggtcaggcagcagacattccctcactacgaggcaagcagtgctaccaccagtcccttctttaagcctcctgctcagcacctcaacggttctgcagctttcaatggtgtagatgatggcaggttggcctcagcagacaggcatacagaggttcctacaggcacctgcccagtggatccttttgaagcccagtgggctgcattagaaaataagtccaagcagcgtactaatccctcccctaccaaccctttctccagtgacttacagaagacgtttgaaattgaactttaagcaatcattatggctatgtatcttgtccataccagacagggagcagggggtagcggtcaaaggagcaaaacagactttgtctcctgattagtactcttttcactaatcccaaaggtcccaaggaacaagtccaggcccagagtactgtgaggggtgattttgaaagacatgggaaaaagcattcctagagaaaagctgccttgcaattaggctaaagaagtcaaggaaatgttgctttctgtactccctcttcccttacccccttacaaatctctggcaacagagaggcaaagtatctgaacaagaatctatattccaagcacatttactgaaatgtaaaacacaacaggaagcaaagcaatctccctttgtttttcaggccattcacctgcctcctgtcagtagtggcctgtattagagatcaagaagagtggtttgtgctcaggctggggaacagagaggcacgctatgctgccagaattcccaggagggcatatcagcaactgcccagcagagctatattttgggggagaagttgagcttccattttgagtaacagaataaatattatatatatcaaaagccaaaatctttatttttatgcatttagaatattttaaatagttctcagatattaagaagttgtatgagttgtaagtaatcttgccaaaggtaaaggggctagttgtaagaaattgtacataagattgatttatcattgatgcctactgaaataaaaagaggaaaggctggaagctgcagacaggatccctagcttgttttctgtcagtcattcattgtaagtagcacattgcaacaacaatcatgcttatgaccaatacagtcactaggttgtagttttttttaaataaaggaaaagcagtattgtcctggttttaaacctatgatggaattctaatgtcattattttaatggaatcaatcgaaatatgctctatagagaatatatcttttatatattgctgcagtttccttatgttaatcctttaacactaaggtaacatgacataatcataccatagaagggaacacaggttaccatattggtttgtaatatgggtcttggtgggttttgttttatcctttaaattttgttcccatgagttttgtggggatggggattctggttttattagctttgtgtgtgtcctcttcccccaaacccccttttggtgagaacatccccttgacagttgcagcctcttgacctcggataacaataagagagctcatctcatttttacttttgaacgttggccttacaatcaaatgtaagttatatatatttgtactgatgaaaatttataatctgctttaacaaaaataaatgttcatggtagaa

SEQ ID NO: 161636 - DNA, 3309 bp, Homo sapiens
  Payload ID: 11557
  Gene Symbol: NUMB
  Gene Name: numb homolog (Drosophila)
  Uniprot ID: P49757
  ENST ID: ENST00000359560
  CDS Start-End: 19-1941
caggctgtaaaaattaaaatgaacaaattacggcaaagttttaggagaaagaaggatgtttatgttccagaggccagtcgtccacatcagtggcagacagatgaagaaggcgttcgcaccggaaaatgtagcttcccggttaagtaccttggccatgtagaagttgatgaatcaagaggaatgcacatctgtgaagatgctgtaaaaagattgaaagctactggaaagaaagcagttaaagcagttctgtgggtctcagcagatggactcagagttgtggatgaaaaaactaaggacctcatagttgaccagacgatagagaaagtttctttctgtgccccagacaggaactttgatagagccttttcttacatatgccgtgatggcaccactcgtcgctggatctgtcactgcttcatggctgtcaaggacacaggtgaaaggttgagccatgcagtaggctgtgcttttgcagcctgtttagagcgcaagcagaagcgggagaaggaatgtggagtgactgctacttttgatgctagtcggaccacttttacaagagaaggatcattccgtgtcacaacagccactgaacaagcagaaagagaggagatcatgaaacaaatgcaagatgccaagaaagctgaaacagataagatagtcgttggttcatcagttgcccctggcaacactgccccatccccatcctctcccacctctcctacttctgatgccacgacctctctggagatgaacaatcctcatgccatcccacgccggcatgctccaattgaacagcttgctcgccaaggctctttccgaggttttcctgctcttagccagaagatgtcaccctttaaacgccaactatccctacgcatcaatgagttgccttccactatgcagaggaagactgatttccccattaaaaatgcagtgccagaagtagaaggggaggcagagagcatcagctccctgtgctcacagatcaccaatgccttcagcacacctgaggaccccttctcatctgctccgatgaccaaaccagtgacagtggtggcaccacaatctcctaccttccaagctaatggcactgactcagccttccatgtgcttgctaagccagcccatactgctctagcacccgtagcaatgcctgtgcgtgaaaccaacccttgggcccatgcccctgatgctgctaacaaggaaattgcagccacatgttcggggaccgagtggggtcaatcttctggtgctgcctctccaggtctcttccaggccggtcatagacgtactccctctgaggccgaccgatggttagaagaggtgtctaagagcgtccgggctcagcagccccaggcctcagctgctcctctgcagccagttctccagcctcctccacccactgccatctcccagccagcatcacctttccaagggaatgcattcctcacctctcagcctgtgccagtgggtgtggtcccagccctgcaaccagcctttgtccctgcccagtcctatcctgtggccaatggaatgccctatccagcccctaatgtgcctgtggtgggcatcactccctcccagatggtggccaacgtatttggcactgcaggccaccctcaggctgcccatccccatcagtcacccagcctggtcaggcagcagacattccctcactacgaggcaagcagtgctaccaccagtcccttctttaagcctcctgctcagcacctcaacggttctgcagctttcaatggtgtagatgatggcaggttggcctcagcagacaggcatacagaggttcctacaggcacctgcccagtggatccttttgaagcccagtgggctgcattagaaaataagtccaagcagcgtactaatccctcccctaccaaccctttctccagtgacttacagaagacgtttgaaattgaactttaagcaatcattatggctatgtatcttgtccataccagacagggagcagggggtagcggtcaaaggagcaaaacagactttgtctcctgattagtactcttttcactaatcccaaaggtcccaaggaacaagtccaggcccagagtactgtgaggggtgattttgaaagacatgggaaaaagcattcctagagaaaagctgccttgcaattaggctaaagaagtcaaggaaatgttgctttctgtactccctcttcccttacccccttacaaatctctggcaacagagaggcaaagtatctgaacaagaatctatattccaagcacatttactgaaatgtaaaacacaacaggaagcaaagcaatctccctttgtttttcaggccattcacctgcctcctgtcagtagtggcctgtattagagatcaagaagagtggtttgtgctcaggctggggaacagagaggcacgctatgctgccagaattcccaggagggcatatcagcaactgcccagcagagctatattttgggggagaagttgagcttccattttgagtaacagaataaatattatatatatcaaaagccaaaatctttatttttatgcatttagaatattttaaatagttctcagatattaagaagttgtatgagttgtaagtaatcttgccaaaggtaaaggggctagttgtaagaaattgtacataagattgatttatcattgatgcctactgaaataaaaagaggaaaggctggaagctgcagacaggatccctagcttgttttctgtcagtcattcattgtaagtagcacattgcaacaacaatcatgcttatgaccaatacagtcactaggttgtagttttttttaaataaaggaaaagcagtattgtcctggttttaaacctatgatggaattctaatgtcattattttaatggaatcaatcgaaatatgctctatagagaatatatcttttatatattgctgcagtttccttatgttaatcctttaacactaaggtaacatgacataatcataccatagaagggaacacaggttaccatattggtttgtaatatgggtcttggtgggttttgttttatcctttaaattttgttcccatgagttttgtggggatggggattctggttttattagctttgtgtgtgtcctcttcccccaaacccccttttggtgagaacatccccttgacagttgcagcctcttgacctcggataacaataagagagctcatctcatttttacttttgaacgttggccttacaatcaaatgtaagttatatatatttgtactgatgaaaatttataatctgctttaacaaaaataaatgttcatggtagaagctttt

SEQ ID NO: 161637 - DNA, 3198 bp, Homo sapiens
  Payload ID: 11557
  Gene Symbol: NUMB
  Gene Name: numb homolog (Drosophila)
  Uniprot ID: P49757
  ENST ID: ENST00000535282
  CDS Start-End: 19-1830
caggctgtaaaaattaaaatgaacaaattacggcaaagttttaggagaaagaaggatgtttatgttccagaggccagtcgtccacatcagtggcagacagatgaagaaggcgttcgcaccggaaaatgtagcttcccggttaagtaccttggccatgtagaagttgatgaatcaagaggaatgcacatctgtgaagatgctgtaaaaagattgaaagctgaaaggaagttcttcaaaggcttctttggaaaaactggaaagaaagcagttaaagcagttctgtgggtctcagcagatggactcagagttgtggatgaaaaaactaaggacctcatagttgaccagacgatagagaaagtttctttctgtgccccagacaggaactttgatagagccttttcttacatatgccgtgatggcaccactcgtcgctggatctgtcactgcttcatggctgtcaaggacacaggtgaaaggttgagccatgcagtaggctgtgcttttgcagcctgtttagagcgcaagcagaagcgggagaaggaatgtggagtgactgctacttttgatgctagtcggaccacttttacaagagaaggatcattccgtgtcacaacagccactgaacaagcagaaagagaggagatcatgaaacaaatgcaagatgccaagaaagctgaaacagataagatagtcgttggttcatcagttgcccctggcaacactgccccatccccatcctctcccacctctcctacttctgatgccacgacctctctggagatgaacaatcctcatgccatcccacgccggcatgctccaattgaacagcttgctcgccaaggctctttccgaggttttcctgctcttagccagaagatgtcaccctttaaacgccaactatccctacgcatcaatgagttgccttccactatgcagaggaagactgatttccccattaaaaatgcagtgccagaagtagaaggggaggcagagagcatcagctccctgtgctcacagatcaccaatgccttcagcacacctgaggaccccttctcatctgctccgatgaccaaaccagtgacagtggtggcaccacaatctcctaccttccaagggaccgagtggggtcaatcttctggtgctgcctctccaggtctcttccaggccggtcatagacgtactccctctgaggccgaccgatggttagaagaggtgtctaagagcgtccgggctcagcagccccaggcctcagctgctcctctgcagccagttctccagcctcctccacccactgccatctcccagccagcatcacctttccaagggaatgcattcctcacctctcagcctgtgccagtgggtgtggtcccagccctgcaaccagcctttgtccctgcccagtcctatcctgtggccaatggaatgccctatccagcccctaatgtgcctgtggtgggcatcactccctcccagatggtggccaacgtatttggcactgcaggccaccctcaggctgcccatccccatcagtcacccagcctggtcaggcagcagacattccctcactacgaggcaagcagtgctaccaccagtcccttctttaagcctcctgctcagcacctcaacggttctgcagctttcaatggtgtagatgatggcaggttggcctcagcagacaggcatacagaggttcctacaggcacctgcccagtggatccttttgaagcccagtgggctgcattagaaaataagtccaagcagcgtactaatccctcccctaccaaccctttctccagtgacttacagaagacgtttgaaattgaactttaagcaatcattatggctatgtatcttgtccataccagacagggagcagggggtagcggtcaaaggagcaaaacagactttgtctcctgattagtactcttttcactaatcccaaaggtcccaaggaacaagtccaggcccagagtactgtgaggggtgattttgaaagacatgggaaaaagcattcctagagaaaagctgccttgcaattaggctaaagaagtcaaggaaatgttgctttctgtactccctcttcccttacccccttacaaatctctggcaacagagaggcaaagtatctgaacaagaatctatattccaagcacatttactgaaatgtaaaacacaacaggaagcaaagcaatctccctttgtttttcaggccattcacctgcctcctgtcagtagtggcctgtattagagatcaagaagagtggtttgtgctcaggctggggaacagagaggcacgctatgctgccagaattcccaggagggcatatcagcaactgcccagcagagctatattttgggggagaagttgagcttccattttgagtaacagaataaatattatatatatcaaaagccaaaatctttatttttatgcatttagaatattttaaatagttctcagatattaagaagttgtatgagttgtaagtaatcttgccaaaggtaaaggggctagttgtaagaaattgtacataagattgatttatcattgatgcctactgaaataaaaagaggaaaggctggaagctgcagacaggatccctagcttgttttctgtcagtcattcattgtaagtagcacattgcaacaacaatcatgcttatgaccaatacagtcactaggttgtagttttttttaaataaaggaaaagcagtattgtcctggttttaaacctatgatggaattctaatgtcattattttaatggaatcaatcgaaatatgctctatagagaatatatcttttatatattgctgcagtttccttatgttaatcctttaacactaaggtaacatgacataatcataccatagaagggaacacaggttaccatattggtttgtaatatgggtcttggtgggttttgttttatcctttaaattttgttcccatgagttttgtggggatggggattctggttttattagctttgtgtgtgtcctcttcccccaaacccccttttggtgagaacatccccttgacagttgcagcctcttgacctcggataacaataagagagctcatctcatttttacttttgaacgttggccttacaatcaaatgtaagttatatatatttgtactgatgaaaatttataatctgctttaacaaaaataaatgttcatggtagaagctttt

SEQ ID NO: 161638 - DNA, 2757 bp, Homo sapiens
  Payload ID: 11557
  Gene Symbol: NUMB
  Gene Name: numb homolog (Drosophila)
  Uniprot ID: P49757
  ENST ID: ENST00000544991
  CDS Start-End: 19-1389
caggctgtaaaaattaaaatgaacaaattacggcaaagttttaggagaaagaaggatgtttatgttccagaggccagtcgtccacatcagtggcagacagatgaagaaggcgttcgcaccggaaaatgtagcttcccggttaagtaccttggccatgtagaagttgatgaatcaagaggaatgcacatctgtgaagatgctgtaaaaagattgaaagctgaaaggaagttcttcaaaggcttctttggaaaaactggaaagaaagcagttaaagcagttctgtgggtctcagcagatggactcagagttgtggatgaaaaaactaaggacctcatagttgaccagacgatagagaaagtttctttctgtgccccagacaggaactttgatagagccttttcttacatatgccgtgatggcaccactcgtcgctggatctgtcactgcttcatggctgtcaaggacacaggtgaaaggttgagccatgcagtaggctgtgcttttgcagcctgtttagagcgcaagcagaagcgggagaaggaatgtggagtgactgctacttttgatgctagtcggaccacttttacaagagaaggatcattccgtgtcacaacagccactgaacaagcagaaagagaggagatcatgaaacaaatgcaagatgccaagaaagggaccgagtggggtcaatcttctggtgctgcctctccaggtctcttccaggccggtcatagacgtactccctctgaggccgaccgatggttagaagaggtgtctaagagcgtccgggctcagcagccccaggcctcagctgctcctctgcagccagttctccagcctcctccacccactgccatctcccagccagcatcacctttccaagggaatgcattcctcacctctcagcctgtgccagtgggtgtggtcccagccctgcaaccagcctttgtccctgcccagtcctatcctgtggccaatggaatgccctatccagcccctaatgtgcctgtggtgggcatcactccctcccagatggtggccaacgtatttggcactgcaggccaccctcaggctgcccatccccatcagtcacccagcctggtcaggcagcagacattccctcactacgaggcaagcagtgctaccaccagtcccttctttaagcctcctgctcagcacctcaacggttctgcagctttcaatggtgtagatgatggcaggttggcctcagcagacaggcatacagaggttcctacaggcacctgcccagtggatccttttgaagcccagtgggctgcattagaaaataagtccaagcagcgtactaatccctcccctaccaaccctttctccagtgacttacagaagacgtttgaaattgaactttaagcaatcattatggctatgtatcttgtccataccagacagggagcagggggtagcggtcaaaggagcaaaacagactttgtctcctgattagtactcttttcactaatcccaaaggtcccaaggaacaagtccaggcccagagtactgtgaggggtgattttgaaagacatgggaaaaagcattcctagagaaaagctgccttgcaattaggctaaagaagtcaaggaaatgttgctttctgtactccctcttcccttacccccttacaaatctctggcaacagagaggcaaagtatctgaacaagaatctatattccaagcacatttactgaaatgtaaaacacaacaggaagcaaagcaatctccctttgtttttcaggccattcacctgcctcctgtcagtagtggcctgtattagagatcaagaagagtggtttgtgctcaggctggggaacagagaggcacgctatgctgccagaattcccaggagggcatatcagcaactgcccagcagagctatattttgggggagaagttgagcttccattttgagtaacagaataaatattatatatatcaaaagccaaaatctttatttttatgcatttagaatattttaaatagttctcagatattaagaagttgtatgagttgtaagtaatcttgccaaaggtaaaggggctagttgtaagaaattgtacataagattgatttatcattgatgcctactgaaataaaaagaggaaaggctggaagctgcagacaggatccctagcttgttttctgtcagtcattcattgtaagtagcacattgcaacaacaatcatgcttatgaccaatacagtcactaggttgtagttttttttaaataaaggaaaagcagtattgtcctggttttaaacctatgatggaattctaatgtcattattttaatggaatcaatcgaaatatgctctatagagaatatatcttttatatattgctgcagtttccttatgttaatcctttaacactaaggtaacatgacataatcataccatagaagggaacacaggttaccatattggtttgtaatatgggtcttggtgggttttgttttatcctttaaattttgttcccatgagttttgtggggatggggattctggttttattagctttgtgtgtgtcctcttcccccaaacccccttttggtgagaacatccccttgacagttgcagcctcttgacctcggataacaataagagagctcatctcatttttacttttgaacgttggccttacaatcaaatgtaagttatatatatttgtactgatgaaaatttataatctgctttaacaaaaataaatgttcatggtagaagctttt

SEQ ID NO: 161639 - DNA, 1406 bp, Homo sapiens
  Payload ID: 11557
  Gene Symbol: NUMB
  Gene Name: numb homolog (Drosophila)
  Uniprot ID: P49757
  ENST ID: ENST00000554521
  CDS Start-End: 40-1377
ggcacagccaagattcagagccaggctgtaaaaattaaaatgaacaaattacggcaaagttttaggagaaagaaggatgtttatgttccagaggccagtcgtccacatcagtggcagacagatgaagaaggcgttcgcaccggaaaatgtagcttcccggttaagtaccttggccatgtagaagttgatgaatcaagaggaatgcacatctgtgaagatgctgtaaaaagattgaaagctactggaaagaaagcagttaaagcagttctgtgggtctcagcagatggactcagagttgtggatgaaaaaactaaggacctcatagttgaccagacgatagagaaagtttctttctgtgccccagacaggaactttgatagagccttttcttacatatgccgtgatggcaccactcgtcgctggatctgtcactgcttcatggctgtcaaggacacaggtgaaaggttgagccatgcagtaggctgtgcttttgcagcctgtttagagcgcaagcagaagcgggagaaggaatgtggagtgactgctacttttgatgctagtcggaccacttttacaagagaaggatcattccgtgtcacaacagccactgaacaagcagaaagagaggagatcatgaaacaaatgcaagatgccaagaaagggaccgagtggggtcaatcttctggtgctgcctctccaggtctcttccaggccggtcatagacgtactccctctgaggccgaccgatggttagaagaggtgtctaagagcgtccgggctcagcagccccaggcctcagctgctcctctgcagccagttctccagcctcctccacccactgccatctcccagccagcatcacctttccaagggaatgcattcctcacctctcagcctgtgccagtgggtgtggtcccagccctgcaaccagcctttgtccctgcccagtcctatcctgtggccaatggaatgccctatccagcccctaatgtgcctgtggtgggcatcactccctcccagatggtggccaacgtatttggcactgcaggccaccctcaggctgcccatccccatcagtcacccagcctggtcaggcagcagacattccctcactacgaggcaagcagtgctaccaccagtcccttctttaagcctcctgctcagcacctcaacggttctgcagctttcaatggtgtagatgatggcaggttggcctcagcagacaggcatacagaggttcctacaggcacctgcccagtggatccttttgaagcccagtgggctgcattagaaaataagtccaagcagcgtactaatccctcccctaccaaccctttctccagtgacttacagaagacgtttgaaattgaactttaagcaatcattatggctatgtatcttgtcca

SEQ ID NO: 161640 - DNA, 3547 bp, Homo sapiens
  Payload ID: 11557
  Gene Symbol: NUMB
  Gene Name: numb homolog (Drosophila)
  Uniprot ID: P49757
  ENST ID: ENST00000557597
  CDS Start-End: 263-2185
ggcgcttgagttggtcgggggcagcggcagatttgaggcttaagcaacttcttccggggaagagtgccagtgcagccactgttacaattcaagatcttgatctatatccatagattggaatattggtgggccagcaatcctcagacgcctcacttaggacaaatgaggaaactgaggcttggtgaagttacgaaacttgtccaaaatcacacaacttgtaaagggcacagccaagattcagagccaggctgtaaaaattaaaatgaacaaattacggcaaagttttaggagaaagaaggatgtttatgttccagaggccagtcgtccacatcagtggcagacagatgaagaaggcgttcgcaccggaaaatgtagcttcccggttaagtaccttggccatgtagaagttgatgaatcaagaggaatgcacatctgtgaagatgctgtaaaaagattgaaagctactggaaagaaagcagttaaagcagttctgtgggtctcagcagatggactcagagttgtggatgaaaaaactaaggacctcatagttgaccagacgatagagaaagtttctttctgtgccccagacaggaactttgatagagccttttcttacatatgccgtgatggcaccactcgtcgctggatctgtcactgcttcatggctgtcaaggacacaggtgaaaggttgagccatgcagtaggctgtgcttttgcagcctgtttagagcgcaagcagaagcgggagaaggaatgtggagtgactgctacttttgatgctagtcggaccacttttacaagagaaggatcattccgtgtcacaacagccactgaacaagcagaaagagaggagatcatgaaacaaatgcaagatgccaagaaagctgaaacagataagatagtcgttggttcatcagttgcccctggcaacactgccccatccccatcctctcccacctctcctacttctgatgccacgacctctctggagatgaacaatcctcatgccatcccacgccggcatgctccaattgaacagcttgctcgccaaggctctttccgaggttttcctgctcttagccagaagatgtcaccctttaaacgccaactatccctacgcatcaatgagttgccttccactatgcagaggaagactgatttccccattaaaaatgcagtgccagaagtagaaggggaggcagagagcatcagctccctgtgctcacagatcaccaatgccttcagcacacctgaggaccccttctcatctgctccgatgaccaaaccagtgacagtggtggcaccacaatctcctaccttccaagctaatggcactgactcagccttccatgtgcttgctaagccagcccatactgctctagcacccgtagcaatgcctgtgcgtgaaaccaacccttgggcccatgcccctgatgctgctaacaaggaaattgcagccacatgttcggggaccgagtggggtcaatcttctggtgctgcctctccaggtctcttccaggccggtcatagacgtactccctctgaggccgaccgatggttagaagaggtgtctaagagcgtccgggctcagcagccccaggcctcagctgctcctctgcagccagttctccagcctcctccacccactgccatctcccagccagcatcacctttccaagggaatgcattcctcacctctcagcctgtgccagtgggtgtggtcccagccctgcaaccagcctttgtccctgcccagtcctatcctgtggccaatggaatgccctatccagcccctaatgtgcctgtggtgggcatcactccctcccagatggtggccaacgtatttggcactgcaggccaccctcaggctgcccatccccatcagtcacccagcctggtcaggcagcagacattccctcactacgaggcaagcagtgctaccaccagtcccttctttaagcctcctgctcagcacctcaacggttctgcagctttcaatggtgtagatgatggcaggttggcctcagcagacaggcatacagaggttcctacaggcacctgcccagtggatccttttgaagcccagtgggctgcattagaaaataagtccaagcagcgtactaatccctcccctaccaaccctttctccagtgacttacagaagacgtttgaaattgaactttaagcaatcattatggctatgtatcttgtccataccagacagggagcagggggtagcggtcaaaggagcaaaacagactttgtctcctgattagtactcttttcactaatcccaaaggtcccaaggaacaagtccaggcccagagtactgtgaggggtgattttgaaagacatgggaaaaagcattcctagagaaaagctgccttgcaattaggctaaagaagtcaaggaaatgttgctttctgtactccctcttcccttacccccttacaaatctctggcaacagagaggcaaagtatctgaacaagaatctatattccaagcacatttactgaaatgtaaaacacaacaggaagcaaagcaatctccctttgtttttcaggccattcacctgcctcctgtcagtagtggcctgtattagagatcaagaagagtggtttgtgctcaggctggggaacagagaggcacgctatgctgccagaattcccaggagggcatatcagcaactgcccagcagagctatattttgggggagaagttgagcttccattttgagtaacagaataaatattatatatatcaaaagccaaaatctttatttttatgcatttagaatattttaaatagttctcagatattaagaagttgtatgagttgtaagtaatcttgccaaaggtaaaggggctagttgtaagaaattgtacataagattgatttatcattgatgcctactgaaataaaaagaggaaaggctggaagctgcagacaggatccctagcttgttttctgtcagtcattcattgtaagtagcacattgcaacaacaatcatgcttatgaccaatacagtcactaggttgtagttttttttaaataaaggaaaagcagtattgtcctggttttaaacctatgatggaattctaatgtcattattttaatggaatcaatcgaaatatgctctatagagaatatatcttttatatattgctgcagtttccttatgttaatcctttaacactaaggtaacatgacataatcataccatagaagggaacacaggttaccatattggtttgtaatatgggtcttggtgggttttgttttatcctttaaattttgttcccatgagttttgtggggatggggattctggttttattagctttgtgtgtgtcctcttcccccaaacccccttttggtgagaacatccccttgacagttgcagcctcttgacctcggataacaataagagagctcatctcatttttacttttgaacgttggccttacaatcaaatgtaagttatatatatttgtactgatgaaaatttataatctgctttaacaaaaataaatgttcatggtagaa

SEQ ID NO: 161641 - DNA, 3588 bp, Homo sapiens
  Payload ID: 11557
  Gene Symbol: NUMB
  Gene Name: numb homolog (Drosophila)
  Uniprot ID: P49757
  ENST ID: ENST00000555238
  CDS Start-End: 271-2226
gaggcagtggcgcttgagttggtcgggggcagcggcagatttgaggcttaagcaacttcttccggggaagagtgccagtgcagccactgttacaattcaagatcttgatctatatccatagattggaatattggtgggccagcaatcctcagacgcctcacttaggacaaatgaggaaactgaggcttggtgaagttacgaaacttgtccaaaatcacacaacttgtaaagggcacagccaagattcagagccaggctgtaaaaattaaaatgaacaaattacggcaaagttttaggagaaagaaggatgtttatgttccagaggccagtcgtccacatcagtggcagacagatgaagaaggcgttcgcaccggaaaatgtagcttcccggttaagtaccttggccatgtagaagttgatgaatcaagaggaatgcacatctgtgaagatgctgtaaaaagattgaaagctgaaaggaagttcttcaaaggcttctttggaaaaactggaaagaaagcagttaaagcagttctgtgggtctcagcagatggactcagagttgtggatgaaaaaactaaggacctcatagttgaccagacgatagagaaagtttctttctgtgccccagacaggaactttgatagagccttttcttacatatgccgtgatggcaccactcgtcgctggatctgtcactgcttcatggctgtcaaggacacaggtgaaaggttgagccatgcagtaggctgtgcttttgcagcctgtttagagcgcaagcagaagcgggagaaggaatgtggagtgactgctacttttgatgctagtcggaccacttttacaagagaaggatcattccgtgtcacaacagccactgaacaagcagaaagagaggagatcatgaaacaaatgcaagatgccaagaaagctgaaacagataagatagtcgttggttcatcagttgcccctggcaacactgccccatccccatcctctcccacctctcctacttctgatgccacgacctctctggagatgaacaatcctcatgccatcccacgccggcatgctccaattgaacagcttgctcgccaaggctctttccgaggttttcctgctcttagccagaagatgtcaccctttaaacgccaactatccctacgcatcaatgagttgccttccactatgcagaggaagactgatttccccattaaaaatgcagtgccagaagtagaaggggaggcagagagcatcagctccctgtgctcacagatcaccaatgccttcagcacacctgaggaccccttctcatctgctccgatgaccaaaccagtgacagtggtggcaccacaatctcctaccttccaagctaatggcactgactcagccttccatgtgcttgctaagccagcccatactgctctagcacccgtagcaatgcctgtgcgtgaaaccaacccttgggcccatgcccctgatgctgctaacaaggaaattgcagccacatgttcggggaccgagtggggtcaatcttctggtgctgcctctccaggtctcttccaggccggtcatagacgtactccctctgaggccgaccgatggttagaagaggtgtctaagagcgtccgggctcagcagccccaggcctcagctgctcctctgcagccagttctccagcctcctccacccactgccatctcccagccagcatcacctttccaagggaatgcattcctcacctctcagcctgtgccagtgggtgtggtcccagccctgcaaccagcctttgtccctgcccagtcctatcctgtggccaatggaatgccctatccagcccctaatgtgcctgtggtgggcatcactccctcccagatggtggccaacgtatttggcactgcaggccaccctcaggctgcccatccccatcagtcacccagcctggtcaggcagcagacattccctcactacgaggcaagcagtgctaccaccagtcccttctttaagcctcctgctcagcacctcaacggttctgcagctttcaatggtgtagatgatggcaggttggcctcagcagacaggcatacagaggttcctacaggcacctgcccagtggatccttttgaagcccagtgggctgcattagaaaataagtccaagcagcgtactaatccctcccctaccaaccctttctccagtgacttacagaagacgtttgaaattgaactttaagcaatcattatggctatgtatcttgtccataccagacagggagcagggggtagcggtcaaaggagcaaaacagactttgtctcctgattagtactcttttcactaatcccaaaggtcccaaggaacaagtccaggcccagagtactgtgaggggtgattttgaaagacatgggaaaaagcattcctagagaaaagctgccttgcaattaggctaaagaagtcaaggaaatgttgctttctgtactccctcttcccttacccccttacaaatctctggcaacagagaggcaaagtatctgaacaagaatctatattccaagcacatttactgaaatgtaaaacacaacaggaagcaaagcaatctccctttgtttttcaggccattcacctgcctcctgtcagtagtggcctgtattagagatcaagaagagtggtttgtgctcaggctggggaacagagaggcacgctatgctgccagaattcccaggagggcatatcagcaactgcccagcagagctatattttgggggagaagttgagcttccattttgagtaacagaataaatattatatatatcaaaagccaaaatctttatttttatgcatttagaatattttaaatagttctcagatattaagaagttgtatgagttgtaagtaatcttgccaaaggtaaaggggctagttgtaagaaattgtacataagattgatttatcattgatgcctactgaaataaaaagaggaaaggctggaagctgcagacaggatccctagcttgttttctgtcagtcattcattgtaagtagcacattgcaacaacaatcatgcttatgaccaatacagtcactaggttgtagttttttttaaataaaggaaaagcagtattgtcctggttttaaacctatgatggaattctaatgtcattattttaatggaatcaatcgaaatatgctctatagagaatatatcttttatatattgctgcagtttccttatgttaatcctttaacactaaggtaacatgacataatcataccatagaagggaacacaggttaccatattggtttgtaatatgggtcttggtgggttttgttttatcctttaaattttgttcccatgagttttgtggggatggggattctggttttattagctttgtgtgtgtcctcttcccccaaacccccttttggtgagaacatccccttgacagttgcagcctcttgacctcggataacaataagagagctcatctcatttttacttttgaacgttggccttacaatcaaatgtaagttatatatatttgtactgatgaaaatttataatctgctttaacaaaaataaatgttcatggtagaa

SEQ ID NO: 161642 - DNA, 906 bp, Homo sapiens
  Payload ID: 11557
  Gene Symbol: NUMB
  Gene Name: numb homolog (Drosophila)
  ENST ID: ENST00000555859
  CDS Start-End: 236-906
cagatttgaggcttaagcaacttcttccggggaagagtgccagtgcagccactgttacaattcaagatcttgatctatatccatagattggaatattggtgggccagcaatcctcagacgcctcacttaggacaaatgaggaaactgaggcttggtgaagttacgaaacttgtccaaaatcacacaacttgtaaagggcacagccaagattcagagccaggctgtaaaaattaaaatgaacaaattacggcaaagttttaggagaaagaaggatgtttatgttccagaggccagtcgtccacatcagtggcagacagatgaagaaggcgttcgcaccggaaaatgtagcttcccggttaagactggaaagaaagcagttaaagcagttctgtgggtctcagcagatggactcagagttgtggatgaaaaaactaaggacctcatagttgaccagacgatagagaaagtttctttctgtgccccagacaggaactttgatagagccttttcttacatatgccgtgatggcaccactcgtcgctggatctgtcactgcttcatggctgtcaaggacacaggtgaaaggttgagccatgcagtaggctgtgcttttgcagcctgtttagagcgcaagcagaagcgggagaaggaatgtggagtgactgctacttttgatgctagtcggaccacttttacaagagaaggatcattccgtgtcacaacagccactgaacaagcagaaagagaggagatcatgaaacaaatgcaagatgccaagaaagctgaaacagataagatagtcgttggttcatcagttgcccctggcaacactgccccatccccatcctctcccacctctcctacttctgatgccacgacctctctggagatgaacaatcctcatgc

SEQ ID NO: 161643 - DNA, 954 bp, Homo sapiens
  Payload ID: 11557
  Gene Symbol: NUMB
  Gene Name: numb homolog (Drosophila)
  ENST ID: ENST00000554394
  CDS Start-End: 179-954
tggcgcttgagttggtcgggggcagcggcagatttgaggcttaagcaacttcttccggggaagagtgccagtgcagccactgttacaattcaagatcttgatctatatccatagattggaatattggtgggccagcaatcctcagacgcctcacttaggacaagctgtaaaaattaaaatgaacaaattacggcaaagttttaggagaaagaaggatgtttatgttccagaggccagtcgtccacatcagtggcagacagatgaagaaggcgttcgcaccggaaaatgtagcttcccggttaagtaccttggccatgtagaagttgatgaatcaagaggaatgcacatctgtgaagatgctgtaaaaagattgaaagctgaaaggaagttcttcaaaggcttctttggaaaaactggaaagaaagcagttaaagcagttctgtgggtctcagcagatggactcagagttgtggatgaaaaaactaaggacctcatagttgaccagacgatagagaaagtttctttctgtgccccagacaggaactttgatagagccttttcttacatatgccgtgatggcaccactcgtcgctggatctgtcactgcttcatggctgtcaaggacacaggtgaaaggttgagccatgcagtaggctgtgcttttgcagcctgtttagagcgcaagcagaagcgggagaaggaatgtggagtgactgctacttttgatgctagtcggaccacttttacaagagaaggatcattccgtgtcacaacagccactgaacaagcagaaagagaggagatcatgaaacaaatgcaagatgccaagaaagctgaaacagataagatagtcgttggttcatcagttgcccctggcaacactgccccatccccatcctctcccacctctcctacttctgatgccacgacctctctggagatgaacaatcctca

SEQ ID NO: 161644 - DNA, 5172 bp, Homo sapiens
  Payload ID: 11557
  Gene Symbol: NUMB
  Gene Name: numb homolog (Drosophila)
  ENST ID: ENST00000556772
  CDS Start-End: 2289-3812
gaagcatacccatactaccaaggctaatctccttaacctaaattcaattcattgtaataatatttacagagtagcttctaatttgcccatagaatcaagatcaaagtccttatcaggaatagaaggccttctgtgattaggcctttcctactctatctcccattacgcctttcccattgccaagtctacttaccaagccatactgaaatatttatagagccccagacttgccatgttgtttgcttccatgtcctgtactgctgtttcttctgcctggcatgtccagtacctctgttacttccctgtctccctacccctacctaagcatcaagaaaaattattccagcacccagttcagtcttctcctttgtataaccttccccaattccacaaagagatttgattataccttttttctgacatcattgtaccttgttctcagctctactgtagcatttacctacggtattctttattttttgtctgattgttgcctttcagtaaccttccaggtatttccactggctggcatattataggcactcatcaaatttatggtggtggtggagatgatgaggccgagtggatcacaggttatttcagtaaggccatgtcctcatatcaagttttcctgggcttggatcacttatagaggagaatggtagttctaaaagtctcccttgtcgcttctagaggctgctgcgccaaccttagcaccagattccttttgatctatactttttatgataatctgatacctattctcagccttcatattgcttttgttttattttgctgtatccttgaggcagttaaaaagaaaggacactgttaaattactattacattccatcacaggaggaattatgcatcagcttgttctcatgtgattctcatgtgccaaaaagtattttctgagccaataaaaagaaaattattttttcagtagtttttaaatcttcctgtgtccccaaaatgtctccatgaatttaatgtcaaattaaaaaccaagccaaggctgggtacagtggtgcacacttgtagtcctggctacacgtggggctgggacaaggggatcacttgagcccaggagttcaaggctgtaatgctttatgatcatacctgtgaatagccactgcactccagcctgggcaacacagtgagacctcgtctctaaaattattagaggctgggcacagtggctcacacctgtaatcccagcactttgggaggctgaggcaggcggatcacttgaggtcaggagttccagaccagcctggccaacatggtgaaactccgtctctactagaaatacaaaaattagccgggcatggtggcaggtgcctgtaatcccagctagtcgggaggctgaggcaggagaatcacttaaacccgggatggggaggttgcagtgagccaatatcgcatcactgctctccagcctgggcgacagagtgagactctgtctcaagaaaaaaaaaaaattattaggaaaaatgtctgtgttaactctgagagaacaaataatggctttttaaagactgttaatagaataatgaagacttactgtgtttttaacgtgaaaattttaggtgaccaagggtcctgctataacatactgggggtcataggatagtagaatggtcaacatctcaatttagacatgttacttcctgctctaaatacacttgtggacgctacttgtggtgtaactccttatgtatttaataattatctgactctggttttcttggttgatttttttaaatgggtgaagaatctagttatgaattctttgccctttatggaatgtgatatcttggtttttattccatctgttacttcccttttacttaattttatcttattgttttgcgttgtgtttctaaaataatggctttggcttgttttttcctgaatgtttctgcagtttggtttgagtatctgggtttgggcaccactcctgaacttggactccatctgtacttgtgacttttggaaggcagagtcagtgttttctgtggaagatgacatttttttaatattatatatgtgtatctccccctcccctttttggtttctcttaaaagactggaaagaaagcagttaaagcagttctgtgggtctcagcagatggactcagagttgtggatgaaaaaactaaggacctcatagttgaccagacgatagagaaagtttctttctgtgccccagacaggaactttgatagagccttttcttacatatgccgtgatggcaccactcgtcgctggatctgtcactgcttcatggctgtcaaggacacaggtgaaaggttgagccatgcagtaggctgtgcttttgcagcctgtttagagcgcaagcagaagcgggagaaggaatgtggagtgactgctacttttgatgctagtcggaccacttttacaagagaaggatcattccgtgtcacaacagccactgaacaagcagaaagagaggagatcatgaaacaaatgcaagatgccaagaaagctgaaacagataagatagtcgttggttcatcagttgcccctggcaacactgccccatccccatcctctcccacctctcctacttctgatgccacgacctctctggagatgaacaatcctcatgccatcccacgccggcatgctccaattgaacagcttgctcgccaaggctctttccgaggttttcctgctcttagccagaagatgtcaccctttaaacgccaactatccctacgcatcaatgagttgccttccactatgcagaggaagactgatttccccattaaaaatgcagtgccagaagtagaaggggaggcagagagcatcagctccctgtgctcacagatcaccaatgccttcagcacacctgaggaccccttctcatctgctccgatgaccaaaccagtgacagtggtggcaccacaatctcctaccttccaagctaatggcactgactcagccttccatgtgcttgctaagccagcccatactgctctagcacccgtagcaatgcctgtgcgtgaaaccaacccttgggcccatgcccctgatgctgctaacaaggaaattgcagccacatgttcggggaccgagtggggtcaatcttctggtgctgcctctccaggtctcttccaggccggtcatagacgtactccctctgaggccgaccgatggttagaagaggtgtctaagagcgtccgggctcagcagccccaggcctcagctgctcctctgcagccagttctccagcctcctccacccactgccatctcccagccagcatcacctttccaagggaatgcattcctcacctctcagcctgtgccagtgggtgtggtcccagccctgcaaccagcctttgtccctgcccagtcctatcctgtggccaatggaatgccctatccagcccctaatgtgcctgtggtgggcatcactccctcccagatggtggccaacgtatttggcactgcaggccaccctcaggctgcccatccccatcagtcacccagcctggtcaggcagcagacattccctcactacgaggcaagcagtgctaccaccagtcccttctttaagcctcctgctcagcacctcaacggttctgcagctttcaatggtgtagatgatggcaggttggcctcagcagacaggcatacagaggttcctacaggcacctgcccagtggatccttttgaagcccagtgggctgcattagaaaataagtccaagcagcgtactaatccctcccctaccaaccctttctccagtgacttacagaagacgtttgaaattgaactttaagcaatcattatggctatgtatcttgtccataccagacagggagcagggggtagcggtcaaaggagcaaaacagactttgtctcctgattagtactcttttcactaatcccaaaggtcccaaggaacaagtccaggcccagagtactgtgaggggtgattttgaaagacatgggaaaaagcattcctagagaaaagctgccttgcaattaggctaaagaagtcaaggaaatgttgctttctgtactccctcttcccttacccccttacaaatctctggcaacagagaggcaaagtatctgaacaagaatctatattccaagcacatttactgaaatgtaaaacacaacaggaagcaaagcaatctccctttgtttttcaggccattcacctgcctcctgtcagtagtggcctgtattagagatcaagaagagtggtttgtgctcaggctggggaacagagaggcacgctatgctgccagaattcccaggagggcatatcagcaactgcccagcagagctatattttgggggagaagttgagcttccattttgagtaacagaataaatattatatatatcaaaagccaaaatctttatttttatgcatttagaatattttaaatagttctcagatattaagaagttgtatgagttgtaagtaatcttgccaaaggtaaaggggctagttgtaagaaattgtacataagattgatttatcattgatgcctactgaaataaaaagaggaaaggctggaagctgcagacaggatccctagcttgttttctgtcagtcattcattgtaagtagcacattgcaacaacaatcatgcttatgaccaatacagtcactaggttgtagttttttttaaataaaggaaaagcagtattgtcctggttttaaacctatgatggaattctaatgtcattattttaatggaatcaatcgaaatatgctctatagagaatatatcttttatatattgctgcagtttccttatgttaatcctttaacactaaggtaacatgacataatcataccatagaagggaacacaggttaccatattggtttgtaatatgggtcttggtgggttttgttttatcctttaaattttgttcccatgagttttgtggggatggggattctggttttattagctttgtgtgtgtcctcttcccccaaacccccttttggtgagaacatccccttgacagttgcagcctcttgacctcggataacaataagagagctcatctcatttttacttttgaacgttggccttacaatcaaatgtaagttatatatatttgtactgatgaaaatttataatctgctttaacaaaaataaatgttcatggtag

SEQ ID NO: 161645 - DNA, 557 bp, Homo sapiens
  Payload ID: 11557
  Gene Symbol: NUMB
  Gene Name: numb homolog (Drosophila)
  ENST ID: ENST00000555987
  CDS Start-End: 318-557
gtcatgggggaggtggtggcgcttggtggccactggcggccgaggtagaggcagtggcgcttgagttggtcgggggcagcggcagatttgaggcttaagcaacttcttccggggaagagtgccagtgcagccactgttacaattcaagatcttgatctatatccatagattggaatattggtgggccagcaatcctcagacgcctcacttaggacaaatgaggaaactgaggcttggtgaagttacgaaacttgtccaaaatcacacaacttgtaaagggcacagccaagattcagagccaggctgtaaaaattaaaatgaacaaattacggcaaagttttaggagaaagaaggatgtttatgttccagaggccagtcgtccacatcagtggcagacagatgaagaaggcgttcgcaccggaaaatgtagcttcccggttaagtaccttggccatgtagaagttgatgaatcaagaggaatgcacatctgtgaagatgctgtaaaaagattgaaagctacaggaactttgatagagccttttcttacatatgccgtg

SEQ ID NO: 161646 - DNA, 3037 bp, Homo sapiens
  Payload ID: 11557
  Gene Symbol: NUMB
  Gene Name: numb homolog (Drosophila)
  Uniprot ID: P49757
  ENST ID: ENST00000555394
  CDS Start-End: 321-2132
gttgtcatgggggaggtggtggcgcttggtggccactggcggccgaggtagaggcagtggcgcttgagttggtcgggggcagcggcagatttgaggcttaagcaacttcttccggggaagagtgccagtgcagccactgttacaattcaagatcttgatctatatccatagattggaatattggtgggccagcaatcctcagacgcctcacttaggacaaatgaggaaactgaggcttggtgaagttacgaaacttgtccaaaatcacacaacttgtaaagggcacagccaagattcagagccaggctgtaaaaattaaaatgaacaaattacggcaaagttttaggagaaagaaggatgtttatgttccagaggccagtcgtccacatcagtggcagacagatgaagaaggcgttcgcaccggaaaatgtagcttcccggttaagtaccttggccatgtagaagttgatgaatcaagaggaatgcacatctgtgaagatgctgtaaaaagattgaaagctgaaaggaagttcttcaaaggcttctttggaaaaactggaaagaaagcagttaaagcagttctgtgggtctcagcagatggactcagagttgtggatgaaaaaactaaggacctcatagttgaccagacgatagagaaagtttctttctgtgccccagacaggaactttgatagagccttttcttacatatgccgtgatggcaccactcgtcgctggatctgtcactgcttcatggctgtcaaggacacaggtgaaaggttgagccatgcagtaggctgtgcttttgcagcctgtttagagcgcaagcagaagcgggagaaggaatgtggagtgactgctacttttgatgctagtcggaccacttttacaagagaaggatcattccgtgtcacaacagccactgaacaagcagaaagagaggagatcatgaaacaaatgcaagatgccaagaaagctgaaacagataagatagtcgttggttcatcagttgcccctggcaacactgccccatccccatcctctcccacctctcctacttctgatgccacgacctctctggagatgaacaatcctcatgccatcccacgccggcatgctccaattgaacagcttgctcgccaaggctctttccgaggttttcctgctcttagccagaagatgtcaccctttaaacgccaactatccctacgcatcaatgagttgccttccactatgcagaggaagactgatttccccattaaaaatgcagtgccagaagtagaaggggaggcagagagcatcagctccctgtgctcacagatcaccaatgccttcagcacacctgaggaccccttctcatctgctccgatgaccaaaccagtgacagtggtggcaccacaatctcctaccttccaagggaccgagtggggtcaatcttctggtgctgcctctccaggtctcttccaggccggtcatagacgtactccctctgaggccgaccgatggttagaagaggtgtctaagagcgtccgggctcagcagccccaggcctcagctgctcctctgcagccagttctccagcctcctccacccactgccatctcccagccagcatcacctttccaagggaatgcattcctcacctctcagcctgtgccagtgggtgtggtcccagccctgcaaccagcctttgtccctgcccagtcctatcctgtggccaatggaatgccctatccagcccctaatgtgcctgtggtgggcatcactccctcccagatggtggccaacgtatttggcactgcaggccaccctcaggctgcccatccccatcagtcacccagcctggtcaggcagcagacattccctcactacgaggcaagcagtgctaccaccagtcccttctttaagcctcctgctcagcacctcaacggttctgcagctttcaatggtgtagatgatggcaggttggcctcagcagacaggcatacagaggttcctacaggcacctgcccagtggatccttttgaagcccagtgggctgcattagaaaataagtccaagcagcgtactaatccctcccctaccaaccctttctccagtgacttacagaagacgtttgaaattgaactttaagcaatcattatggctatgtatcttgtccataccagacagggagcagggggtagcggtcaaaggagcaaaacagactttgtctcctgattagtactcttttcactaatcccaaaggtcccaaggaacaagtccaggcccagagtactgtgaggggtgattttgaaagacatgggaaaaagcattcctagagaaaagctgccttgcaattaggctaaagaagtcaaggaaatgttgctttctgtactccctcttcccttacccccttacaaatctctggcaacagagaggcaaagtatctgaacaagaatctatattccaagcacatttactgaaatgtaaaacacaacaggaagcaaagcaatctccctttgtttttcaggccattcacctgcctcctgtcagtagtggcctgtattagagatcaagaagagtggtttgtgctcaggctggggaacagagaggcacgctatgctgccagaattcccaggagggcatatcagcaactgcccagcagagctatattttgggggagaagttgagcttccattttgagtaacagaataaatattatatatatcaaaagccaaaatctttatttttatgcatttagaatattttaaatagttctcagatattaagaagttgtatgagttgtaagtaatcttgccaaaggtaaaggggctagttgtaagaaattgtacataagattgatttatcattgatgcctactgaaataaaaagaggaaaggctggaagctgcagacaggatccctagcttgttttctgtcagtcattcattgtaagtagcacattgcaacaacaatcatgcttatgaccaatacagtcactaggttgtagttttttttaaataaaggaaaagcagtattgtcctggttttaaaccta

SEQ ID NO: 161647 - DNA, 552 bp, Homo sapiens
  Payload ID: 11557
  Gene Symbol: NUMB
  Gene Name: numb homolog (Drosophila)
  ENST ID: ENST00000554818
  CDS Start-End: 352-552
gcggagttctcccgaggaaggtaggctacggccggacccgcgcgggtcaggccaggaggtcccttgggacgtccagctgctccggtctagcgcgctgaccggcggccactgtgtgaggaatttgaggcttaagcaacttcttccggggaagagtgccagtgcagccactgttacaattcaagatcttgatctatatccatagattggaatattggtgggccagcaatcctcagacgcctcacttaggacaaatgaggaaactgaggcttggtgaagttacgaaacttgtccaaaatcacacaacttgtaaagggcacagccaagattcagagccaggctgtaaaaattaaaatgaacaaattacggcaaagttttaggagaaagaaggatgtttatgttccagaggccagtcgtccacatcagtggcagacagatgaagaaggcgttcgcaccggaaaatgtagcttcccggttaagtaccttggccatgtagaagttgatgaatcaagaggaatgcacatctgtgaagatgctgtaaaaagattgaaagct

SEQ ID NO: 161648 - DNA, 1553 bp, Homo sapiens
  Payload ID: 11557
  Gene Symbol: NUMB
  Gene Name: numb homolog (Drosophila)
  Uniprot ID: P49757
  ENST ID: ENST00000555738
  CDS Start-End: 40-1524
ggcacagccaagattcagagccaggctgtaaaaattaaaatgaacaaattacggcaaagttttaggagaaagaaggatgtttatgttccagaggccagtcgtccacatcagtggcagacagatgaagaaggcgttcgcaccggaaaatgtagcttcccggttaagtaccttggccatgtagaagttgatgaatcaagaggaatgcacatctgtgaagatgctgtaaaaagattgaaagctactggaaagaaagcagttaaagcagttctgtgggtctcagcagatggactcagagttgtggatgaaaaaactaaggacctcatagttgaccagacgatagagaaagtttctttctgtgccccagacaggaactttgatagagccttttcttacatatgccgtgatggcaccactcgtcgctggatctgtcactgcttcatggctgtcaaggacacaggtgaaaggttgagccatgcagtaggctgtgcttttgcagcctgtttagagcgcaagcagaagcgggagaaggaatgtggagtgactgctacttttgatgctagtcggaccacttttacaagagaaggatcattccgtgtcacaacagccactgaacaagcagaaagagaggagatcatgaaacaaatgcaagatgccaagaaagtgccagaagtagaaggggaggcagagagcatcagctccctgtgctcacagatcaccaatgccttcagcacacctgaggaccccttctcatctgctccgatgaccaaaccagtgacagtggtggcaccacaatctcctaccttccaagggaccgagtggggtcaatcttctggtgctgcctctccaggtctcttccaggccggtcatagacgtactccctctgaggccgaccgatggttagaagaggtgtctaagagcgtccgggctcagcagccccaggcctcagctgctcctctgcagccagttctccagcctcctccacccactgccatctcccagccagcatcacctttccaagggaatgcattcctcacctctcagcctgtgccagtgggtgtggtcccagccctgcaaccagcctttgtccctgcccagtcctatcctgtggccaatggaatgccctatccagcccctaatgtgcctgtggtgggcatcactccctcccagatggtggccaacgtatttggcactgcaggccaccctcaggctgcccatccccatcagtcacccagcctggtcaggcagcagacattccctcactacgaggcaagcagtgctaccaccagtcccttctttaagcctcctgctcagcacctcaacggttctgcagctttcaatggtgtagatgatggcaggttggcctcagcagacaggcatacagaggttcctacaggcacctgcccagtggatccttttgaagcccagtgggctgcattagaaaataagtccaagcagcgtactaatccctcccctaccaaccctttctccagtgacttacagaagacgtttgaaattgaactttaagcaatcattatggctatgtatcttgtcca

SEQ ID NO: 161649 - DNA, 1039 bp, Homo sapiens
  Payload ID: 11557
  Gene Symbol: NUMB
  Gene Name: numb homolog (Drosophila)
  ENST ID: ENST00000555307
  CDS Start-End: 264-1039
gagttctcccgaggaaggtaggctacggccggacccgcgcgggtcaggccaggaggtcccttgggacgtccagctgctccggtctagcgcgctgaccggcggccactgtgtgaggaatttgaggcttaagcaacttcttccggggaagagtgccagtgcagccactgttacaattcaagatcttgatctatatccatagattggaatattggtgggccagcaatcctcagacgcctcacttaggacaagctgtaaaaattaaaatgaacaaattacggcaaagttttaggagaaagaaggatgtttatgttccagaggccagtcgtccacatcagtggcagacagatgaagaaggcgttcgcaccggaaaatgtagcttcccggttaagtaccttggccatgtagaagttgatgaatcaagaggaatgcacatctgtgaagatgctgtaaaaagattgaaagctgaaaggaagttcttcaaaggcttctttggaaaaactggaaagaaagcagttaaagcagttctgtgggtctcagcagatggactcagagttgtggatgaaaaaactaaggacctcatagttgaccagacgatagagaaagtttctttctgtgccccagacaggaactttgatagagccttttcttacatatgccgtgatggcaccactcgtcgctggatctgtcactgcttcatggctgtcaaggacacaggtgaaaggttgagccatgcagtaggctgtgcttttgcagcctgtttagagcgcaagcagaagcgggagaaggaatgtggagtgactgctacttttgatgctagtcggaccacttttacaagagaaggatcattccgtgtcacaacagccactgaacaagcagaaagagaggagatcatgaaacaaatgcaagatgccaagaaagctgaaacagataagatagtcgttggttcatcagttgcccctggcaacactgccccatccccatcctctcccacctctcctacttctgatgccacgacctctctggagatgaacaatcctca

SEQ ID NO: 161650 - DNA, 3607 bp, Homo sapiens
  Payload ID: 11557
  Gene Symbol: NUMB
  Gene Name: numb homolog (Drosophila)
  Uniprot ID: P49757
  ENST ID: ENST00000554546
  CDS Start-End: 358-2136
caatggataggttagaagtatgaaagagggtgggcctgttgtcatgggggaggtggtggcgcttggtggccactggcggccgaggtagaggcagtggcgcttgagttggtcgggggcagcggcagatttgaggcttaagcaacttcttccggggaagagtgccagtgcagccactgttacaattcaagatcttgatctatatccatagattggaatattggtgggccagcaatcctcagacgcctcacttaggacaaatgaggaaactgaggcttggtgaagttacgaaacttgtccaaaatcacacaacttgtaaagggcacagccaagattcagagccaggctgtaaaaattaaaatgaacaaattacggcaaagttttaggagaaagaaggatgtttatgttccagaggccagtcgtccacatcagtggcagacagatgaagaaggcgttcgcaccggaaaatgtagcttcccggttaagtaccttggccatgtagaagttgatgaatcaagaggaatgcacatctgtgaagatgctgtaaaaagattgaaagctactggaaagaaagcagttaaagcagttctgtgggtctcagcagatggactcagagttgtggatgaaaaaactaaggacctcatagttgaccagacgatagagaaagtttctttctgtgccccagacaggaactttgatagagccttttcttacatatgccgtgatggcaccactcgtcgctggatctgtcactgcttcatggctgtcaaggacacaggtgaaaggttgagccatgcagtaggctgtgcttttgcagcctgtttagagcgcaagcagaagcgggagaaggaatgtggagtgactgctacttttgatgctagtcggaccacttttacaagagaaggatcattccgtgtcacaacagccactgaacaagcagaaagagaggagatcatgaaacaaatgcaagatgccaagaaagctgaaacagataagatagtcgttggttcatcagttgcccctggcaacactgccccatccccatcctctcccacctctcctacttctgatgccacgacctctctggagatgaacaatcctcatgccatcccacgccggcatgctccaattgaacagcttgctcgccaaggctctttccgaggttttcctgctcttagccagaagatgtcaccctttaaacgccaactatccctacgcatcaatgagttgccttccactatgcagaggaagactgatttccccattaaaaatgcagtgccagaagtagaaggggaggcagagagcatcagctccctgtgctcacagatcaccaatgccttcagcacacctgaggaccccttctcatctgctccgatgaccaaaccagtgacagtggtggcaccacaatctcctaccttccaagggaccgagtggggtcaatcttctggtgctgcctctccaggtctcttccaggccggtcatagacgtactccctctgaggccgaccgatggttagaagaggtgtctaagagcgtccgggctcagcagccccaggcctcagctgctcctctgcagccagttctccagcctcctccacccactgccatctcccagccagcatcacctttccaagggaatgcattcctcacctctcagcctgtgccagtgggtgtggtcccagccctgcaaccagcctttgtccctgcccagtcctatcctgtggccaatggaatgccctatccagcccctaatgtgcctgtggtgggcatcactccctcccagatggtggccaacgtatttggcactgcaggccaccctcaggctgcccatccccatcagtcacccagcctggtcaggcagcagacattccctcactacgaggcaagcagtgctaccaccagtcccttctttaagcctcctgctcagcacctcaacggttctgcagctttcaatggtgtagatgatggcaggttggcctcagcagacaggcatacagaggttcctacaggcacctgcccagtggatccttttgaagcccagtgggctgcattagaaaataagtccaagcagcgtactaatccctcccctaccaaccctttctccagtgacttacagaagacgtttgaaattgaactttaagcaatcattatggctatgtatcttgtccataccagacagggagcagggggtagcggtcaaaggagcaaaacagactttgtctcctgattagtactcttttcactaatcccaaaggtcccaaggaacaagtccaggcccagagtactgtgaggggtgattttgaaagacatgggaaaaagcattcctagagaaaagctgccttgcaattaggctaaagaagtcaaggaaatgttgctttctgtactccctcttcccttacccccttacaaatctctggcaacagagaggcaaagtatctgaacaagaatctatattccaagcacatttactgaaatgtaaaacacaacaggaagcaaagcaatctccctttgtttttcaggccattcacctgcctcctgtcagtagtggcctgtattagagatcaagaagagtggtttgtgctcaggctggggaacagagaggcacgctatgctgccagaattcccaggagggcatatcagcaactgcccagcagagctatattttgggggagaagttgagcttccattttgagtaacagaataaatattatatatatcaaaagccaaaatctttatttttatgcatttagaatattttaaatagttctcagatattaagaagttgtatgagttgtaagtaatcttgccaaaggtaaaggggctagttgtaagaaattgtacataagattgatttatcattgatgcctactgaaataaaaagaggaaaggctggaagctgcagacaggatccctagcttgttttctgtcagtcattcattgtaagtagcacattgcaacaacaatcatgcttatgaccaatacagtcactaggttgtagttttttttaaataaaggaaaagcagtattgtcctggttttaaacctatgatggaattctaatgtcattattttaatggaatcaatcgaaatatgctctatagagaatatatcttttatatattgctgcagtttccttatgttaatcctttaacactaaggtaacatgacataatcataccatagaagggaacacaggttaccatattggtttgtaatatgggtcttggtgggttttgttttatcctttaaattttgttcccatgagttttgtggggatggggattctggttttattagctttgtgtgtgtcctcttcccccaaacccccttttggtgagaacatccccttgacagttgcagcctcttgacctcggataacaataagagagctcatctcatttttacttttgaacgttggccttacaatcaaatgtaagttatatatatttgtactgatgaaaatttataatctgctttaacaaaaataaatgttcatggtagaagcttttgcccatgaagggctgttctttcccctttcctttattagtaaatgaatttatttttcgttcttttggtcttactctccattctactgctgctgtaaatccctag

SEQ ID NO: 161651 - DNA, 1439 bp, Homo sapiens
  Payload ID: 11557
  Gene Symbol: NUMB
  Gene Name: numb homolog (Drosophila)
  Uniprot ID: P49757
  ENST ID: ENST00000559312
  CDS Start-End: 40-1410
ggcacagccaagattcagagccaggctgtaaaaattaaaatgaacaaattacggcaaagttttaggagaaagaaggatgtttatgttccagaggccagtcgtccacatcagtggcagacagatgaagaaggcgttcgcaccggaaaatgtagcttcccggttaagtaccttggccatgtagaagttgatgaatcaagaggaatgcacatctgtgaagatgctgtaaaaagattgaaagctgaaaggaagttcttcaaaggcttctttggaaaaactggaaagaaagcagttaaagcagttctgtgggtctcagcagatggactcagagttgtggatgaaaaaactaaggacctcatagttgaccagacgatagagaaagtttctttctgtgccccagacaggaactttgatagagccttttcttacatatgccgtgatggcaccactcgtcgctggatctgtcactgcttcatggctgtcaaggacacaggtgaaaggttgagccatgcagtaggctgtgcttttgcagcctgtttagagcgcaagcagaagcgggagaaggaatgtggagtgactgctacttttgatgctagtcggaccacttttacaagagaaggatcattccgtgtcacaacagccactgaacaagcagaaagagaggagatcatgaaacaaatgcaagatgccaagaaagggaccgagtggggtcaatcttctggtgctgcctctccaggtctcttccaggccggtcatagacgtactccctctgaggccgaccgatggttagaagaggtgtctaagagcgtccgggctcagcagccccaggcctcagctgctcctctgcagccagttctccagcctcctccacccactgccatctcccagccagcatcacctttccaagggaatgcattcctcacctctcagcctgtgccagtgggtgtggtcccagccctgcaaccagcctttgtccctgcccagtcctatcctgtggccaatggaatgccctatccagcccctaatgtgcctgtggtgggcatcactccctcccagatggtggccaacgtatttggcactgcaggccaccctcaggctgcccatccccatcagtcacccagcctggtcaggcagcagacattccctcactacgaggcaagcagtgctaccaccagtcccttctttaagcctcctgctcagcacctcaacggttctgcagctttcaatggtgtagatgatggcaggttggcctcagcagacaggcatacagaggttcctacaggcacctgcccagtggatccttttgaagcccagtgggctgcattagaaaataagtccaagcagcgtactaatccctcccctaccaaccctttctccagtgacttacagaagacgtttgaaattgaactttaagcaatcattatggctatgtatcttgtcca

SEQ ID NO: 161652 - DNA, 1586 bp, Homo sapiens
  Payload ID: 11557
  Gene Symbol: NUMB
  Gene Name: numb homolog (Drosophila)
  Uniprot ID: P49757
  ENST ID: ENST00000560335
  CDS Start-End: 40-1557
ggcacagccaagattcagagccaggctgtaaaaattaaaatgaacaaattacggcaaagttttaggagaaagaaggatgtttatgttccagaggccagtcgtccacatcagtggcagacagatgaagaaggcgttcgcaccggaaaatgtagcttcccggttaagtaccttggccatgtagaagttgatgaatcaagaggaatgcacatctgtgaagatgctgtaaaaagattgaaagctgaaaggaagttcttcaaaggcttctttggaaaaactggaaagaaagcagttaaagcagttctgtgggtctcagcagatggactcagagttgtggatgaaaaaactaaggacctcatagttgaccagacgatagagaaagtttctttctgtgccccagacaggaactttgatagagccttttcttacatatgccgtgatggcaccactcgtcgctggatctgtcactgcttcatggctgtcaaggacacaggtgaaaggttgagccatgcagtaggctgtgcttttgcagcctgtttagagcgcaagcagaagcgggagaaggaatgtggagtgactgctacttttgatgctagtcggaccacttttacaagagaaggatcattccgtgtcacaacagccactgaacaagcagaaagagaggagatcatgaaacaaatgcaagatgccaagaaagtgccagaagtagaaggggaggcagagagcatcagctccctgtgctcacagatcaccaatgccttcagcacacctgaggaccccttctcatctgctccgatgaccaaaccagtgacagtggtggcaccacaatctcctaccttccaagggaccgagtggggtcaatcttctggtgctgcctctccaggtctcttccaggccggtcatagacgtactccctctgaggccgaccgatggttagaagaggtgtctaagagcgtccgggctcagcagccccaggcctcagctgctcctctgcagccagttctccagcctcctccacccactgccatctcccagccagcatcacctttccaagggaatgcattcctcacctctcagcctgtgccagtgggtgtggtcccagccctgcaaccagcctttgtccctgcccagtcctatcctgtggccaatggaatgccctatccagcccctaatgtgcctgtggtgggcatcactccctcccagatggtggccaacgtatttggcactgcaggccaccctcaggctgcccatccccatcagtcacccagcctggtcaggcagcagacattccctcactacgaggcaagcagtgctaccaccagtcccttctttaagcctcctgctcagcacctcaacggttctgcagctttcaatggtgtagatgatggcaggttggcctcagcagacaggcatacagaggttcctacaggcacctgcccagtggatccttttgaagcccagtgggctgcattagaaaataagtccaagcagcgtactaatccctcccctaccaaccctttctccagtgacttacagaagacgtttgaaattgaactttaagcaatcattatggctatgtatcttgtcca

SEQ ID NO: 161653 - DNA, 3561 bp, Homo sapiens
  Payload ID: 11558
  Gene Symbol: NUMBL
  Gene Name: numb homolog (Drosophila)-like
  Uniprot ID: Q9Y6R0
  ENST ID: ENST00000252891
  CDS Start-End: 169-1998
aatcctcccgggagccgaggaggctcgcgcgcgtgcatcccgcaccatcccccggccccgggccctggccggcgtcagaccgagctgccgccgccaccaccgcagcagcagcagtcggggagccaggcccagccagggccgcgggaggcgggggcgcccgggccctggatgtcccgcagcgcggcggccagcggcggaccccggaggcctgagcggcacctgcccccagccccctgtggggccccggggcccccagaaacctgcaggacggagccagacggggcgggcaccatgaacaagttacggcagagcctgcggcggaggaagccagcctacgtgcccgaggcgtcgcgcccgcaccagtggcaggcagacgaggacgcggtgcggaagggcacgtgcagcttcccggtcaggtacctgggtcacgtggaggtagaggagtcccggggaatgcacgtgtgtgaagatgcggtgaagaagctgaaggcgatgggccgaaagtccgtgaagtctgtcctgtgggtgtcagccgatgggctccgagtggtggacgacaaaaccaaggatcttctggtcgaccagaccatcgaaaaggtctccttttgtgctcctgaccgcaacctggacaaggctttctcctatatctgtcgtgacgggactacccgccgctggatctgccactgttttctggcactgaaggactccggcgagaggctgagccacgctgtgggctgtgcttttgccgcctgcctggagcgaaaacagcgacgggagaaggaatgtggggtcacggccgccttcgatgccagccgcaccagcttcgcccgcgagggctccttccgcctgtctgggggtgggcggcctgctgagcgagaggccccggacaagaagaaagcagaggcagcagctgcccccactgtggctcctggccctgcccagcctgggcacgtgtccccgacaccagccaccacatcccctggtgagaagggtgaggcaggcacccctgtggctgcaggcaccactgcggccgccatcccccggcgccatgcacccctggagcagctggttcgccagggctccttccgtgggttcccagcactcagccagaagaactcgcctttcaaacggcagctgagcctacggctgaatgagctgccatccacgctgcagcgccgcactgacttccaggtgaagggcacagtgcctgagatggagcctcctggtgccggcgacagtgacagcatcaacgctctgtgcacacagatcagttcatcttttgccagtgctggagcgccagcaccagggccaccacctgccacaacagggacttctgcctggggtgagccctccgtgccccctgcagctgccttccagcctgggcacaagcggacaccttcagaggctgagcgatggctggaggaggtgtcacaggtggccaaggcccagcagcagcagcagcagcaacagcaacagcagcagcagcagcagcagcaacagcagcaagcagcctcagtggccccagtgcccaccatgcctcctgccctgcagcctttccccgcccccgtggggccctttgacgctgcacctgcccaagtggccgtgttcctgccacccccacacatgcagcccccttttgtgcccgcctacccgggcttgggctacccaccgatgccccgggtgcccgtggtgggcatcacaccctcacagatggtggcaaacgccttctgctcagccgcccagctccagcctcagcctgccactctgcttgggaaagctggggccttcccgccccctgccatacccagtgcccctgggagccaggcccgccctcgccccaatggggccccctggccccctgagccagcgcctgccccagctccagagttggacccctttgaggcccagtgggcggcattagaaggcaaagccactgtagagaaaccctccaaccccttttctggcgacctgcaaaagacattcgagattgaactgtagcccgagccgccccacccactccatcatctccaggtgccccacgcctgggggtggaggcacaacctctcccctaaccctgctccctggggctgcgcccctcaacaccctctcaacacccccctccctcaaccaccccgacaaccactacagaaccaacattgtgacgcccaggttgcaacaggatggaattcagggacggacccagcctggctaagggaaccatttcactgccggacttaggctggcaatgcccccttccccaaccccagacacaggggttggccacaatcccactgaatgcccttggttcacactccatttcccagtttctgttgacccccaccttccagtgttggacaggatggaggggggacacttgcttaggggctctcctgggccccacaccagtgcccaccccaaatctggtcgtctcctccccccatgcacagcacaagctaagggctgccctctgcccacacgctgcgttcactgccaatgctgtactcacctccatcaccctccaactttggggcccatgtcttccttgggccaaggtctcatgggggctagggccaagttgggggcccaggaggcggggagggaggaggaggagaagatgcgcagttacctcatgtcggtgcccgctggggaggggtccgggaagaaggggaaggggtgcctggcgggtacttttctatcttttatttccagattttttttgtatctaaacttgaagatttgtattatacaaggacagccaataaaggaagaatataatggtgcccctcgggaaacgagggtgtgtgtagggcgctggtgaggccctagaacctttcctcctgagtcatggactgaaacagagtcagaaggatgtccctgagtgataacctctgagtcatagcgtggtaacaggtaccactgactcagcacctgccaggcgggtattaaaggagccaaaattaatcaccccatttctattccttacagagttagaatcaaggaataaaaaacaaatattatgaactgctggctgggcacagtggctcacgcctgtaatcccagcactttgggaggtcgaggcaggcagatcacttaaggtcaggagttcgagaccagcctggccgccatggagaaacccagtctctaccaaaaattcaaaaattagccgggcgtggtggcaggcgcctgtaattccaggaggctgaggcacaagaatcgcttgaacccaggcagcagaggttgcagtgacctgaggtcacaccattgcactcctgcctgggcaacagaatgagactctgtctcaaaaaaaaaaaacaaaaaaaaaaaaactacttctaattagctcaatattaatattttaacaagttgggttggtaacagtatatctttgcccatgctggcaaattcttgttttgtcagcattttccataactctggccaaagtgtcacctgatgtggcaacgttttacagtcttgctattgtttcttgagtcctttaatctataagatgtatttttaaaaatatataacatataaattttgtttcgttatagctctttaaaa

SEQ ID NO: 161654 - DNA, 1931 bp, Homo sapiens
  Payload ID: 11558
  Gene Symbol: NUMBL
  Gene Name: numb homolog (Drosophila)-like
  ENST ID: ENST00000540131
  CDS Start-End: 98-1804
aaaccaaggcctccaggacgcgattccagacacaatccctacctctccctgcctaagggggtctcagcacaacaactgcctagacggggcgggcaccatgaacaagttacggcagagcctgcggcggaggaagccagcctacgtgcccgaggcgtcgcgcccgcaccagtggcaggcagacgaggacgcggtgcggaagggcacgtgcagcttcccggtcaggtacctgggtcacgtggaggtagaggagtcccggggaatgcacgtgtgtgaagatgcggtgaagaagctgaaggcgatgggccgaaagtccgtgaagtctgtcctgtgggtgtcagccgatgggctccgagtggtggacgacaaaaccaaggatcttctggtcgaccagaccatcgaaaaggtctccttttgtgctcctgaccgcaacctggacaaggctttctcctatatctgtcgtgacgggactacccgccgctggatctgccactgttttctggcactgaaggactccggcgagaggctgagccacgctgtgggctgtgcttttgccgcctgcctggagcgaaaacagcgacgggagaaggaatgtggggtcacggccgccttcgatgccagccgcaccagcttcgcccgcgagggctccttccgcctgtctgggggtgggcggcctgctgagcgagaggccccggacaagaagaaagcagaggcagcagctgcccccactgtggctcctggccctgcccagcctgggcacgtgtccccgacaccagccaccacatcccctggtgagaagggtgaggcaggcacccctgtggctgcaggcaccactgcggccgccatcccccggcgccatgcacccctggagcagctggttcgccagggctccttccgtgggttcccagcactcagccagaagaactcgcctttcaaacggcagctgagcctacggctgaatgagctgccatccacgctgcagcgccgcactgacttccaggtgaagggcacagtgcctgagatggagcctcctggtgccggcgacagtgacagcatcaacgctctgtgcacacagatcagttcatcttttgccagtgctggagcgccagcaccagggccaccacctgccacaacagggacttctgcctggggtgagccctccgtgccccctgcagctgccttccagcctgggcacaagcggacaccttcagaggctgagcgatggctggaggaggtgtcacaggtggccaaggcccagcagcagcagcagcagcaacagcaacagcagcagcagcagcagcagcaacagcagcaagcagcctcagtggccccagtgcccaccatgcctcctgccctgcagcctttccccgcccccgtggggccctttgacgctgcacctgcccaagtggccgtgttcctgccacccccacacatgcagcccccttttgtgcccgcctacccgggcttgggctacccaccgatgccccgggtgcccgtggtgggcatcacaccctcacagatggtggcaaacgccttctgctcagccgcccagctccagcctcagcctgccactctgcttgggaaagctggggccttcccgccccctgccatacccagtgcccctgggagccaggcccgccctcgccccaatggggccccctggccccctgagccagcgcctgccccagctccagagttggacccctttgaggcccagtgggcggcattagaaggcaaagccactgtagagaaaccctccaaccccttttctggcgacctgcaaaagacattcgagattgaactgtagcccgagccgccccacccactccatcatctccaggtgccccacgcctgggggtggaggcacaacctctcccctaaccctgctccctggggctgcgcccctcaacaccctctcaacacccccctccctc

SEQ ID NO: 161655 - DNA, 640 bp, Homo sapiens
  Payload ID: 11558
  Gene Symbol: NUMBL
  Gene Name: numb homolog (Drosophila)-like
  ENST ID: ENST00000600967
  CDS Start-End: 1-640
gtgtgaagatgcggtgaagaagctgaaggcgatgggccgaaagtccgtgaagtctgtcctgtgggtgtcagccgatgggctccgagtggtggacgacaaaaccaaggatcttctggtcgaccagaccatcgaaaaggtctccttttgtgctcctgaccgcaacctggacaaggctttctcctatatctgtcgtgacgggactacccgccgctggatctgccactgttttctggcactgaaggactccggcgagaggctgagccacgctgtgggctgtgcttttgccgcctgcctggagcgaaaacagcgacgggagaaggaatgtggggtcacggccgccttcgatgccagccgcaccagcttcgcccgcgagggctccttccgcctgtctgggggtgggcggcctgctgagcgagaggccccggacaagaagaaagaggcagcagctgcccccactgtggctcctggccctgcccagcctgggcacgtgtccccgacaccagccaccacatcccctggtgagaagggtgaggcaggcacccctgtggctgcaggcaccactgcggccgccatcccccggcgccatgcacccctggagcagctggttcgccagggctccttccgtgggttcccagcactc

SEQ ID NO: 161656 - DNA, 834 bp, Homo sapiens
  Payload ID: 11558
  Gene Symbol: NUMBL
  Gene Name: numb homolog (Drosophila)-like
  ENST ID: ENST00000598773
  CDS Start-End: 130-834
gcggtgacggtgacggcggctttgtgtgtgggcggaccccggaggcctgagcggcacctgcccccagccccctgtggggccccggggcccccagaaacctgcaggacggagccagacggggcgggcaccatgaacaagttacggcagagcctgcggcggaggaagccagcctacgtgcccgaggcgtcgcgcccgcaccagtggcaggcagacgaggacgcggtgcggaagggcacgtgcagcttcccggtcaggtacctgggtcacgtggaggtagaggagtcccggggaatgcacgtgtgtgaagatgcggtgaagaagctgaaggcgatgggccgaaagtccgtgaagtctgtcctgtgggtgtcagccgatgggctccgagtggtggacgacaaaaccaaggatcttctggtcgaccagaccatcgaaaaggtctccttttgtgctcctgaccgcaacctggacaaggctttctcctatatctgtcgtgacgggactacccgccgctggatctgccactgttttctggcactgaaggactccggcgagaggctgagccacgctgtgggctgtgcttttgccgcctgcctggagcgaaaacagcgacgggagaaggaatgtggggtcacggccgccttcgatgccagccgcaccagcttcgcccgcgagggctccttccgcctgtctgggggtgggcggcctgctgagcgagaggccccggacaagaagaaagcagaggcagcagctgcccccactgtggctcctggccctgcccagcctgggcacgtgtccccgacaccagccaccacatcccctggtgagaagggtgag

SEQ ID NO: 161657 - DNA, 559 bp, Homo sapiens
  Payload ID: 11558
  Gene Symbol: NUMBL
  Gene Name: numb homolog (Drosophila)-like
  ENST ID: ENST00000595741
  CDS Start-End: 213-559
agaagcaactctttcggacgcggagctggaggggatctgaggtcaggtgtcacggagggaaagggagcccaggccaggacggaccgggggaaaggactcggcgatgttcatagggcggaccccggaggcctgagcggcacctgcccccagccccctgtggggccccggggcccccagaaacctgcaggacggagccagacggggcgggcaccatgaacaagttacggcagagcctgcggcggaggaagccagcctacgtgcccgaggcgtcgcgcccgcaccagtggcaggcagacgaggacgcggtgcggaagggcacgtgcagcttcccggtcaggtacctgggtcacgtggaggtagaggagtcccggggaatgcacgtgtgtgaagatgcggtgaagaagctgaaggcgatgggccgaaagtccgtgaagtctgtcctgtgggtgtcagccgatgggctccgagtggtggacgacaaaaccaaggatcttctggtcgaccagaccatcgaaaaggtctccttttgtgctcctgaccgcaacctggacaaggcttt

SEQ ID NO: 161658 - DNA, 555 bp, Homo sapiens
  Payload ID: 11558
  Gene Symbol: NUMBL
  Gene Name: numb homolog (Drosophila)-like
  ENST ID: ENST00000600636
  CDS Start-End: 225-555
agatggggatggagatggggtcggggacacagcccccgtatcaaaccaaggcctccaggacgcgattccagacacaatccctacctctccctgcctaagggggtctcagcacaacaactgcctagggcggaccccggaggcctgagcggcacctgcccccagccccctgtggggccccggggcccccagaaacctgcaggacggagccagacggggcgggcaccatgaacaagttacggcagagcctgcggcggaggaagccagcctacgtgcccgaggcgtcgcgcccgcaccagtggcaggcagacgaggacgcggtgcggaagggcacgtgcagcttcccggtcaggtacctgggtcacgtggaggtagaggagtcccggggaatgcacgtgtgtgaagatgcggtgaagaagctgaaggcgatgggccgaaagtccgtgaagtctgtcctgtgggtgtcagccgatgggctccgagtggtggacgacaaaaccaaggatcttctggtcgaccagaccatcgaaaaggtctccttttgtgctcctgaccgca

SEQ ID NO: 161659 - DNA, 2249 bp, Homo sapiens
  Payload ID: 11558
  Gene Symbol: NUMBL
  Gene Name: numb homolog (Drosophila)-like
  ENST ID: ENST00000598779
  CDS Start-End: 109-1815
accgcagcagcagcagtcggggagccaggcccagccagggccgcgggaggcgggggcgcccgggccctggatgtcccgcagcgcggcggccagcacggggcgggcaccatgaacaagttacggcagagcctgcggcggaggaagccagcctacgtgcccgaggcgtcgcgcccgcaccagtggcaggcagacgaggacgcggtgcggaagggcacgtgcagcttcccggtcaggtacctgggtcacgtggaggtagaggagtcccggggaatgcacgtgtgtgaagatgcggtgaagaagctgaaggcgatgggccgaaagtccgtgaagtctgtcctgtgggtgtcagccgatgggctccgagtggtggacgacaaaaccaaggatcttctggtcgaccagaccatcgaaaaggtctccttttgtgctcctgaccgcaacctggacaaggctttctcctatatctgtcgtgacgggactacccgccgctggatctgccactgttttctggcactgaaggactccggcgagaggctgagccacgctgtgggctgtgcttttgccgcctgcctggagcgaaaacagcgacgggagaaggaatgtggggtcacggccgccttcgatgccagccgcaccagcttcgcccgcgagggctccttccgcctgtctgggggtgggcggcctgctgagcgagaggccccggacaagaagaaagcagaggcagcagctgcccccactgtggctcctggccctgcccagcctgggcacgtgtccccgacaccagccaccacatcccctggtgagaagggtgaggcaggcacccctgtggctgcaggcaccactgcggccgccatcccccggcgccatgcacccctggagcagctggttcgccagggctccttccgtgggttcccagcactcagccagaagaactcgcctttcaaacggcagctgagcctacggctgaatgagctgccatccacgctgcagcgccgcactgacttccaggtgaagggcacagtgcctgagatggagcctcctggtgccggcgacagtgacagcatcaacgctctgtgcacacagatcagttcatcttttgccagtgctggagcgccagcaccagggccaccacctgccacaacagggacttctgcctggggtgagccctccgtgccccctgcagctgccttccagcctgggcacaagcggacaccttcagaggctgagcgatggctggaggaggtgtcacaggtggccaaggcccagcagcagcagcagcagcaacagcaacagcagcagcagcagcagcagcaacagcagcaagcagcctcagtggccccagtgcccaccatgcctcctgccctgcagcctttccccgcccccgtggggccctttgacgctgcacctgcccaagtggccgtgttcctgccacccccacacatgcagcccccttttgtgcccgcctacccgggcttgggctacccaccgatgccccgggtgcccgtggtgggcatcacaccctcacagatggtggcaaacgccttctgctcagccgcccagctccagcctcagcctgccactctgcttgggaaagctggggccttcccgccccctgccatacccagtgcccctgggagccaggcccgccctcgccccaatggggccccctggccccctgagccagcgcctgccccagctccagagttggacccctttgaggcccagtgggcggcattagaaggcaaagccactgtagagaaaccctccaaccccttttctggcgacctgcaaaagacattcgagattgaactgtagcccgagccgccccacccactccatcatctccaggtgccccacgcctgggggtggaggcacaacctctcccctaaccctgctccctggggctgcgcccctcaacaccctctcaacacccccctccctcaaccaccccgacaaccactacagaaccaacattgtgacgcccaggttgcaacaggatggaattcagggacggacccagcctggctaagggaaccatttcactgccggacttaggctggcaatgcccccttccccaaccccagacacaggggttggccacaatcccactgaatgcccttggttcacactccatttcccagtttctgttgacccccaccttccagtgttggacaggatggaggggggacacttgcttaggggctctcctgggccccacaccagtgcccaccccaaatctggtcgtctcc

SEQ ID NO: 161660 - DNA, 1755 bp, Homo sapiens
  Payload ID: 11559
  Gene Symbol: NRM
  Gene Name: nurim (nuclear envelope membrane protein)
  Uniprot ID: Q8IXM6
  ENST ID: ENST00000259953
  CDS Start-End: 353-1141
atttgccattcttagcaactggccagtcaacaactcaactttataatgggaaaactagacgagctgagattcaacccacgtgagcggctgcagagccgctacccttaacagctctctctcgggattctaacattcccttctgtgacggagagacagcaggccgggacacgcatcccaggacggatccacagctggatggggaaggctgcgccaggcgggccggaagcctggcggtggcgtgcaggagccccgccctcctgggctggattcagccgggggcggggccgcgggcggggcctgtggcagcgggaatcccgaccccgcccctttccccacccctccatttctcgccatggcccctgcactgctcctgatccctgctgccctcgcctctttcatcctggcctttggcaccggagtggagttcgtgcgctttacctcccttcggccacttcttggagggatcccggagtctggtggtccggatgcccgccagggatggctggctgccctgcaggaccgcagcatccttgcccccctggcatgggatctggggctcctgcttctatttgttgggcagcacagcctcatggcagctgaaagagtgaaggcatggacatcccggtactttggggtccttcagaggtcactgtatgtggcctgcactgccctggccttgcagctggtgatgcggtactgggagcccatacccaaaggccctgtgttgtgggaggctcgggctgagccatgggccacctgggtgccgctcctctgctttgtgctccatgtcatctcctggctcctcatctttagcatccttctcgtctttgactatgctgagctcatgggcctcaaacaggtatactaccatgtgctggggctgggcgagcctctggccctgaagtctccccgggctctcagactcttctcccacctgcgccacccagtgtgtgtggagctgctgacagtgctgtgggtggtgcctaccctgggcacggaccgtctcctccttgctttcctccttaccctctacctgggcctggctcacgggcttgatcagcaagacctccgctacctccgggcccagctacaaagaaaactccacctgctctctcggccccaggatggggaggcagagtgaggagctcactctggttacaagccctgttcttcctctcccactgaattctaaatccttaacatccaggccctggctgcttcatgccagaggcccaaatccatggactgaaggagatgccccttctactacttgagactttattctctgggtccagctccataccctaaattctgagtttcagccactgaactccaaggtccacttctcaccagcaaggaagagtggggtatggaagtcatctgtcccttcactgtttagagcatgacactctccccctcaacagcctcctgagaaggaaaggatctgccctgaccactcccctggcactgttacttgcctctgcgcctcaggggtccccttctgcaccgctggcttccactccaagaaggtggaccagggtctgcaagttcaacggtcatagctgtccctccaggccccaaccttgcctcaccactcccggccctagtctctgcacctccttaggccctgcctctgggctcagaccccaacctagtcaaggggattctcctgctcttaactcgatgacttggggctccctgctctcccgaggaagatgctctgcaggaaaataaaagtcagcctttttctacata

SEQ ID NO: 161661 - DNA, 1228 bp, Homo sapiens
  Payload ID: 11559
  Gene Symbol: NRM
  Gene Name: nurim (nuclear envelope membrane protein)
  Uniprot ID: Q8IXM6
  ENST ID: ENST00000376420
  CDS Start-End: 3-614
ccatggcccctgcactgctcctgatccctgctgccctcgcctctttcatcctggcctttggcaccggagtggagttcgtgcgctttacctcccttcggccacttcttggagggatcccggagtctggtggtccggatgcccgccagggatggctggctgccctgcaggaccgcagcatccttgcccccctggcatgggatctggggctcctgcttctatttgttgggcagcacagcctcatggcagctgaaagagtgaaggcatggacatcccggtactttggggtccttcagaggtcactgtatgtggcctgcactgccctggccttgcaggtatactaccatgtgctggggctgggcgagcctctggccctgaagtctccccgggctctcagactcttctcccacctgcgccacccagtgtgtgtggagctgctgacagtgctgtgggtggtgcctaccctgggcacggaccgtctcctccttgctttcctccttaccctctacctgggcctggctcacgggcttgatcagcaagacctccgctacctccgggcccagctacaaagaaaactccacctgctctctcggccccaggatggggaggcagagtgaggagctcactctggttacaagccctgttcttcctctcccactgaattctaaatccttaacatccaggccctggctgcttcatgccagaggcccaaatccatggactgaaggagatgccccttctactacttgagactttattctctgggtccagctccataccctaaattctgagtttcagccactgaactccaaggtccacttctcaccagcaaggaagagtggggtatggaagtcatctgtcccttcactgtttagagcatgacactctccccctcaacagcctcctgagaaggaaaggatctgccctgaccactcccctggcactgttacttgcctctgcgcctcaggggtccccttctgcaccgctggcttccactccaagaaggtggaccagggtctgcaagttcaacggtcatagctgtccctccaggccccaaccttgcctcaccactcccggccctagtctctgcacctccttaggccctgcctctgggctcagaccccaacctagtcaaggggattctcctgctcttaactcgatgacttggggctccctgctctcccgaggaagatgctctgcaggaaaataaaagtcagcctttttctacata

SEQ ID NO: 161662 - DNA, 1734 bp, Homo sapiens
  Payload ID: 11559
  Gene Symbol: NRM
  Gene Name: nurim (nuclear envelope membrane protein)
  Uniprot ID: Q8IXM6
  ENST ID: ENST00000376421
  CDS Start-End: 335-1123
tggtaaaacagtaacttttcattttagatgggaaaactagacgagctgagattcaacccacgtgagcggctgcagagccgctacccttaacagctctctctcgggattctaacattcccttctgtgacggagagacagcaggccgggacacgcatcccaggacggatccacagctggatggggaaggctgcgccaggcgggccggaagcctggcggtggcgtgcaggagccccgccctcctgggctggattcagccgggggcggggccgcgggcggggcctgtggcagcgggaatcccgaccccgcccctttccccacccctccatttctcgccatggcccctgcactgctcctgatccctgctgccctcgcctctttcatcctggcctttggcaccggagtggagttcgtgcgctttacctcccttcggccacttcttggagggatcccggagtctggtggtccggatgcccgccagggatggctggctgccctgcaggaccgcagcatccttgcccccctggcatgggatctggggctcctgcttctatttgttgggcagcacagcctcatggcagctgaaagagtgaaggcatggacatcccggtactttggggtccttcagaggtcactgtatgtggcctgcactgccctggccttgcagctggtgatgcggtactgggagcccatacccaaaggccctgtgttgtgggaggctcgggctgagccatgggccacctgggtgccgctcctctgctttgtgctccatgtcatctcctggctcctcatctttagcatccttctcgtctttgactatgctgagctcatgggcctcaaacaggtatactaccatgtgctggggctgggcgagcctctggccctgaagtctccccgggctctcagactcttctcccacctgcgccacccagtgtgtgtggagctgctgacagtgctgtgggtggtgcctaccctgggcacggaccgtctcctccttgctttcctccttaccctctacctgggcctggctcacgggcttgatcagcaagacctccgctacctccgggcccagctacaaagaaaactccacctgctctctcggccccaggatggggaggcagagtgaggagctcactctggttacaagccctgttcttcctctcccactgaattctaaatccttaacatccaggccctggctgcttcatgccagaggcccaaatccatggactgaaggagatgccccttctactacttgagactttattctctgggtccagctccataccctaaattctgagtttcagccactgaactccaaggtccacttctcaccagcaaggaagagtggggtatggaagtcatctgtcccttcactgtttagagcatgacactctccccctcaacagcctcctgagaaggaaaggatctgccctgaccactcccctggcactgttacttgcctctgcgcctcaggggtccccttctgcaccgctggcttccactccaagaaggtggaccagggtctgcaagttcaacggtcatagctgtccctccaggccccaaccttgcctcaccactcccggccctagtctctgcacctccttaggccctgcctctgggctcagaccccaacctagtcaaggggattctcctgctcttaactcgatgacttggggctccctgctctcccgaggaagatgctctgcaggaaaataaaagtcagcctttttctac

SEQ ID NO: 161663 - DNA, 1228 bp, Homo sapiens; identical to SEQ ID NO: 161661
  Payload ID: 11559
  Gene Symbol: NRM
  Gene Name: nurim (nuclear envelope membrane protein)
  Uniprot ID: Q8IXM6
  ENST ID: ENST00000383570
  CDS Start-End: 3-614

SEQ ID NO: 161664 - DNA, 1755 bp, Homo sapiens; identical to SEQ ID NO: 161660
  Payload ID: 11559
  Gene Symbol: NRM
  Gene Name: nurim (nuclear envelope membrane protein)
  Uniprot ID: Q8IXM6
  ENST ID: ENST00000383571
  CDS Start-End: 353-1141

SEQ ID NO: 161665 - DNA, 1401 bp, Homo sapiens
  Payload ID: 11559
  Gene Symbol: NRM
  Gene Name: nurim (nuclear envelope membrane protein)
  ENST ID: ENST00000446443
  CDS Start-End: 1-787
tgaaagcggccgagaagctacaggggagggagacctgagttctaaattaggaactcaaggattagagttttggagaggcgggagagtgaggactgagggagccgaaaagggcggtgaccggagtattctaaatgcccgccagggatggctggctgccctgcaggaccgcagcatccttgcccccctggcatgggatctggggctcctgcttctatttgttgggcagcacagcctcatggcagctgaaagagtgaaggcatggacatcccggtactttggggtccttcagaggtcactgtatgtggcctgcactgccctggccttgcagctggtgatgcggtactgggagcccatacccaaaggccctgtgttgtgggaggctcgggctgagccatgggccacctgggtgccgctcctctgctttgtgctccatgtcatctcctggctcctcatctttagcatccttctcgtctttgactatgctgagctcatgggcctcaaacaggtatactaccatgtgctggggctgggcgagcctctggccctgaagtctccccgggctctcagactcttctcccacctgcgccacccagtgtgtgtggagctgctgacagtgctgtgggtggtgcctaccctgggcacggaccgtctcctccttgctttcctccttaccctctacctgggcctggctcacgggcttgatcagcaagacctccgctacctccgggcccagctacaaagaaaactccacctgctctctcggccccaggatggggaggcagagtgaggagctcactctggttacaagccctgttcttcctctcccactgaattctaaatccttaacatccaggccctggctgcttcatgccagaggcccaaatccatggactgaaggagatgccccttctactacttgagactttattctctgggtccagctccataccctaaattctgagtttcagccactgaactccaaggtccacttctcaccagcaaggaagagtggggtatggaagtcatctgtcccttcactgtttagagcatgacactctccccctcaacagcctcctgagaaggaaaggatctgccctgaccactcccctggcactgttacttgcctctgcgcctcaggggtccccttctgcaccgctggcttccactccaagaaggtggaccagggtctgcaagttcaacggtcatagctgtccctccaggccccaaccttgcctcaccactcccggccctagtctctgcacctccttaggccctgcctctgggctcagaccccaacctagtcaaggggattctcctgctcttaactcgatgacttggggctccctgctctcccgaggaagatgctctgcaggaaaataaaagtcagcctttttctacata

SEQ ID NO: 161666 - DNA, 1228 bp, Homo sapiens; identical to SEQ ID NO: 161661
  Payload ID: 11559
  Gene Symbol: NRM
  Gene Name: nurim (nuclear envelope membrane protein)
  Uniprot ID: Q8IXM6
  ENST ID: ENST00000445058
  CDS Start-End: 3-614

SEQ ID NO: 161667 - DNA, 1228 bp, Homo sapiens; identical to SEQ ID NO: 161661
  Payload ID: 11559
  Gene Symbol: NRM
  Gene Name: nurim (nuclear envelope membrane protein)
  Uniprot ID: Q8IXM6
  ENST ID: ENST00000456720
  CDS Start-End: 3-614

SEQ ID NO: 161668 - DNA, 1228 bp, Homo sapiens; identical to SEQ ID NO: 161661
  Payload ID: 11559
  Gene Symbol: NRM
  Gene Name: nurim (nuclear envelope membrane protein)
  Uniprot ID: Q8IXM6
  ENST ID: ENST00000422664
  CDS Start-End: 3-614

SEQ ID NO: 161669 - DNA, 1401 bp, Homo sapiens; identical to SEQ ID NO: 161665
  Payload ID: 11559
  Gene Symbol: NRM
  Gene Name: nurim (nuclear envelope membrane protein)
  ENST ID: ENST00000434776
  CDS Start-End: 1-787

SEQ ID NO: 161670 - DNA, 1755 bp, Homo sapiens; identical to SEQ ID NO: 161660
  Payload ID: 11559
  Gene Symbol: NRM
  Gene Name: nurim (nuclear envelope membrane protein)
  Uniprot ID: Q8IXM6
  ENST ID: ENST00000438502
  CDS Start-End: 353-1141

SEQ ID NO: 161671 - DNA, 1401 bp, Homo sapiens; identical to SEQ ID NO: 161665
  Payload ID: 11559
  Gene Symbol: NRM
  Gene Name: nurim (nuclear envelope membrane protein)
  ENST ID: ENST00000444096
  CDS Start-End: 1-787

SEQ ID NO: 161672 - DNA, 1755 bp, Homo sapiens; identical to SEQ ID NO: 161660
  Payload ID: 11559
  Gene Symbol: NRM
  Gene Name: nurim (nuclear envelope membrane protein)
  Uniprot ID: Q8IXM6
  ENST ID: ENST00000431322
  CDS Start-End: 353-1141

SEQ ID NO: 161673 - DNA, 1228 bp, Homo sapiens; identical to SEQ ID NO: 161661
  Payload ID: 11559
  Gene Symbol: NRM
  Gene Name: nurim (nuclear envelope membrane protein)
  Uniprot ID: Q8IXM6
  ENST ID: ENST00000449041
  CDS Start-End: 3-614

SEQ ID NO: 161674 - DNA, 1755 bp, Homo sapiens; identical to SEQ ID NO: 161660
  Payload ID: 11559
  Gene Symbol: NRM
  Gene Name: nurim (nuclear envelope membrane protein)
  Uniprot ID: Q8IXM6
  ENST ID: ENST00000427944
  CDS Start-End: 353-1141

SEQ ID NO: 161675 - DNA, 1401 bp, Homo sapiens; identical to SEQ ID NO: 161665
  Payload ID: 11559
  Gene Symbol: NRM
  Gene Name: nurim (nuclear envelope membrane protein)
  ENST ID: ENST00000411883
  CDS Start-End: 1-787

SEQ ID NO: 161676 - DNA, 1228 bp, Homo sapiens; identical to SEQ ID NO: 161661
  Payload ID: 11559
  Gene Symbol: NRM
  Gene Name: nurim (nuclear envelope membrane protein)
  Uniprot ID: Q8IXM6
  ENST ID: ENST00000450138
  CDS Start-End: 3-614

SEQ ID NO: 161677 - DNA, 1401 bp, Homo sapiens; identical to SEQ ID NO: 161665
  Payload ID: 11559
  Gene Symbol: NRM
  Gene Name: nurim (nuclear envelope membrane protein)
  ENST ID: ENST00000444252
  CDS Start-End: 1-787

SEQ ID NO: 161678 - DNA, 1401 bp, Homo sapiens; identical to SEQ ID NO: 161665
  Payload ID: 11559
  Gene Symbol: NRM
  Gene Name: nurim (nuclear envelope membrane protein)
  ENST ID: ENST00000430286
  CDS Start-End: 1-787

SEQ ID NO: 161679 - DNA, 1755 bp, Homo sapiens; identical to SEQ ID NO: 161660
  Payload ID: 11559
  Gene Symbol: NRM
  Gene Name: nurim (nuclear envelope membrane protein)
  Uniprot ID: Q8IXM6
  ENST ID: ENST00000422181
  CDS Start-End: 353-1141

SEQ ID NO: 161680 - DNA, 1401 bp, Homo sapiens; identical to SEQ ID NO: 161665
  Payload ID: 11559
  Gene Symbol: NRM
  Gene Name: nurim (nuclear envelope membrane protein)
  ENST ID: ENST00000436892
  CDS Start-End: 1-787

SEQ ID NO: 161681 - DNA, 1755 bp, Homo sapiens; identical to SEQ ID NO: 161660
  Payload ID: 11559
  Gene Symbol: NRM
  Gene Name: nurim (nuclear envelope membrane protein)
  Uniprot ID: Q8IXM6
  ENST ID: ENST00000422747
  CDS Start-End: 353-1141

SEQ ID NO: 161682 - DNA, 1734 bp, Homo sapiens; identical to SEQ ID NO: 161662
  Payload ID: 11559
  Gene Symbol: NRM
  Gene Name: nurim (nuclear envelope membrane protein)
  Uniprot ID: Q8IXM6
  ENST ID: ENST00000617159
  CDS Start-End: 335-1123

SEQ ID NO: 161683 - DNA, 1734 bp, Homo sapiens; identical to SEQ ID NO: 161662
  Payload ID: 11559
  Gene Symbol: NRM
  Gene Name: nurim (nuclear envelope membrane protein)
  Uniprot ID: Q8IXM6
  ENST ID: ENST00000613827
  CDS Start-End: 335-1123

SEQ ID NO: 161684 - DNA, 1734 bp, Homo sapiens; identical to SEQ ID NO: 161662
  Payload ID: 11559
  Gene Symbol: NRM
  Gene Name: nurim (nuclear envelope membrane protein)
  Uniprot ID: Q8IXM6
  ENST ID: ENST00000610775
  CDS Start-End: 335-1123

SEQ ID NO: 161685 - DNA, 1734 bp, Homo sapiens; identical to SEQ ID NO: 161662
  Payload ID: 11559
  Gene Symbol: NRM
  Gene Name: nurim (nuclear envelope membrane protein)
  Uniprot ID: Q8IXM6
  ENST ID: ENST00000612190
  CDS Start-End: 335-1123

SEQ ID NO: 161686 - DNA, 1734 bp, Homo sapiens; identical to SEQ ID NO: 161662
  Payload ID: 11559
  Gene Symbol: NRM
  Gene Name: nurim (nuclear envelope membrane protein)
  Uniprot ID: Q8IXM6
  ENST ID: ENST00000620249
  CDS Start-End: 335-1123

SEQ ID NO: 161687 - DNA, 1734 bp, Homo sapiens; identical to SEQ ID NO: 161662
  Payload ID: 11559
  Gene Symbol: NRM
  Gene Name: nurim (nuclear envelope membrane protein)
  Uniprot ID: Q8IXM6
  ENST ID: ENST00000617220
  CDS Start-End: 335-1123

SEQ ID NO: 161688 - DNA, 4676 bp, Homo sapiens
  Payload ID: 11560
  Gene Symbol: NUS1
  Gene Name: NUS1 dehydrodolichyl diphosphate synthase subunit
  Uniprot ID: Q96E22
  ENST ID: ENST00000368494
  CDS Start-End: 170-1051
gaagatggcggcgggggcgaggtgaggtgttggcagtggaaaggggttcgggctcggggggcggggggacgcggagcgatggcccgcgccggccgcaggggcggataaaaagccgtcgcgctgcgggagtgggcgggagggagagggggtgtctgagggccacaagagtatgacggggctgtacgagctggtgtggcgggtgctgcacgcgctgctctgtctgcaccgcacgctcacctcctggctccgcgttcggttcggcacctggaactggatctggcggcgctgctgccgcgccgcctctgccgcggtcctagcgccgctcggcttcacgctccgcaagcccccggcagtcggcaggaaccgccgtcaccaccggcacccgcgcggggggtcgtgcctggcagccgcacaccaccggatgcgctggcgcgcggacggtcgttccttggagaagctgcctgtgcatatgggcctggtgatcaccgaggtggagcaggaacccagcttctcggacatcgcgagcctcgtggtgtggtgtatggccgtgggcatctcctacattagcgtctacgaccaccaaggtattttcaaaagaaataattccagattgatggatgaaattttaaaacaacagcaagaacttctgggcctagattgttcaaaatactcaccagaatttgcaaatagtaatgacaaagatgatcaagttttaaattgccatttggcagtgaaggtgctgtctccggaagatggaaaagcagatattgtaagagctgctcaggacttttgccagttagtagcccagaagcaaaagagacccacagatttggatgtagatacgttagccagtttacttagttcaaatggttgtcctgatcctgatttagtattgaagttcggtcctgtggacagcacattaggctttcttccctggcacatcagattgactgagattgtctctttgccttcccacctaaacatcagttatgaggactttttctctgcccttcgtcaatatgcagcctgtgaacagcgtctgggaaagtagtggtcattggttgcataatttgatttgaggcttgtggaggaaaggaaccaagtgactctgatgtttacaaagcacctatgaaaccctgtacacacctagttcataatcctcataatttatcaacaaacacaaaaaagtgtcttacttgagagtgagtgtgtgtgtgtgcgtgtgcacgtgcacacatgtgcacgtttgtatgtatggaaataaacttataaatggggacgtattggagaaggaaatacatagacctacaactttgagcaaatagcagtgatgttttaggaactgaaatgtcacacttaaagtcttcagcccagctacttccctatttttgtggggagaagagggcctgattagaactgttctggttgtgtttggcgggaggggaataatttttgttcagtccttcttagtgaccaaactttaatttttaagaataatatattgacttactgaactgaagcattctgagttgaaaggagctccagaggagtggagttctgtgttgctcacatgttaaaatcttgctcaccttcagagcagagggaatacctatcttcagatatccgtccattttcatctcttaattgtagtcaaaagtatgacttgagagtgttgctctggtattctgggttctgaagtctggtattctggtattctgggttcaaaagtatgacttgagagtgttgctctggtattctgagagttgctctgtattctgggttctgaagattatttgaaaaataactcctactacattgaaatgcagacttaaaaatttaaacattggattaggcagtcaaaaaaaccaagcaagcataaaaggtcaataagttgtaatcttgatagtaaaggtggaaaacttattataaatggaaagaaagttttatttccttttttgtttgatgggcagtatgccatattatacccaaagttcttttaaaaaatatttccatcaaccatttttatttaaaataaacatttgagggaagttaccaaggcagcttttttcctcaaaagtaacctgttcctctttggaatagcacattttaggggcatggttaatacctgagatttttactcagtaaatcctgatggttactgtgtgtaaaatatctttaagtaggattgaaggcctctgtgggggaataaaatattaccaaagtctataaaaataaattttacatgttctcttttatgacagagagcagcactggttctgttatttttaaaatgaataattgatttcttgataggtgtttaatatttcttccctcactgctgattcttagatagaaaccattctttatatttgatagactgctttcagaaaacccttatcaacaagtgtacaatacttatctaaaactatacatttagaatggagcagtttaatactagatctcagaagttttgaaaaatagcaaagaagactggatttggaaagcatggtctacaattggttgttaaattctgaagctatgaagaataaatgtttcaactttggattatgaaaccccatttatgattttttaaatacacttgaaataaaaatgattaaactaaattttggtccagtgacattactttgcactgcataatccattatacgttgtacgactttttttttttgttttaatttattactgagagttttgtgtgaagctacagcatatctaaccagagaatttctgattccttatactgtgattatattatattgaggcatttgtagtgcagctgaagactgaatttatgccttttgtaaacatgataggtataaatgtcttataaacattctggagtatgtatagctttaatgaatgaaatttaatggacctgattaaaatgaagggatttaatcgttgttaaagttaagttagtcaaataaattacctactggaatatagcccaagccagtaaaggtttaatatttgcattttcgtgcttttattttctccttccattcataagtatatacttgaaagtacatctgtagcctatgatttgagtctcttgaagttctaggaagaggcaaactacaaactactaggattctgatttcagatgtagtcattccagaaccttctctttatgagttcacctgctagtacaatctccacaacttgaatggcattggttgttctgtaattcctgccaaaagcatcacaagttgtacatcatcaaggctccctttgcactcccaagaagaactggtaattttaaacaaaagtatgtgtctttatttgtattggaaaatactgtctttaaattgtttcttgttgacactccccacaatggaaaaattaccgaattaaacctgttttatggatggcagcttggagcatagcaagaagttggaggatttgaattccattcccagttctcattgtgttttgtttcttaaaactataataatcggttactgttataaagtttaaaaggtggttttaatgtgaatagcaaattctggtatatcgtgactaacgcttaagaatgcctgtctttgagaggaaggtgttataatattaatgaacagtgccaaatacactgtgcatatctgcaatttaatctttgaatgtatgttactggattagctccctcctcctgtgtgatggtaccatgcatagagtcaatcaaatccttgtgatgttttgtatggactttgacaatatgtaaataatgtgtaaagccagtttttatgattaaggaatcaaatttattgaattttattattgaaagttgaaacttaacatgtatgaacaaaaaccaataaaagaatatactcttttcattgactatagtattatgtgaatgctacatttgttctgaacacttaggggctgcaaaaatgtaataagaaatgcatatgactagatagcaatagtgttttttttagatggtatgctcttgattgaaatatattctcacttttaccaggttaaacatttggaatcttataatgttacttgctttttgatagataatagtgaaataaattcagctttgccattgctggagttgtcaaaattccacagtaattaaaatttgaatttttaccgaatatgaaatttccaaattaaaaacgtatatgtgtactcttttaaaaaggaatttgatagttcttgtcaaatgagaaaatttaaaggtaagagttatggtttgtcttatgctgcatagactattcacctcctaacttgaaggtctaatcataagacaattgtttttttgtgcatagttttcatctaaaattaagtttaccaaaggcaaataactgcttactaggaacttcctttagcaaaaattactataaagttcaggacagtttgaaataaaacccaggaaacaagattaatgtgagcagttctccaagatcctaactggtgggacataaactatgatgcaatggataggaaaaggtagtgcaaaaagaatttcttaaggtttaaaaaatacacttttcattataggaaaaagaagattcagagaaacaaaggaatgtaaccttattgattacatttttggtgatcaccgagaattttttgtactatattttaaaaaatgtattctactgtaacaagttaataaagagattttttaaaaaactataaactagaaa

SEQ ID NO: 161689 - DNA, 3974 bp, Homo sapiens
  Payload ID: 11561
  Gene Symbol: NUTM2A
  Gene Name: NUT family member 2A
  Uniprot ID: Q8IVF1
  ENST ID: ENST00000381689
  CDS Start-End: 332-2221
ggctttccagcaaaggggctgggacgtaaggctggcctgctggtgtggacagagattccagcaacatgcatgacctgggggtacaaggattgcttcctaaacaatgataagcacacagccacctaatagtctggatcggctgagaccatcctgatttcaaacacccagtccccttgccttcctaagaacccctgtgtttctcagactgaaaatgtgttttgaactttgttcacgaagtgaggccgctgttgaaattcgtcaagactgggaaagagccaaagtgggaaggagcatgggttgattggcacaaaagtaggtctgctgataaagaatggaagtaaaggggccatcaggtagaagcttttgctgtgagtcagaaggacaatttaaaagttgcctaaagaggcacacgccatctctgctgctgccttccagttggaagggaaactcaggttcttgcctaatggccaaagcccttcacagaatgtcccccacccctaacagctgcccactgcccctccccctctgcagaatgtctggggtcctatgttccaggaacctgtttactttcaaattttccctgtttcagttggactcaggagcatctggtgagccaggtcactctctgggtcttacccttggcttttctcattgcggaaactgccagacagcggtggtcagtgcccagcctgaggggatggcttcaaatggagcatacccagcgctgggaccgggcgtgaccgcgaaccctggcacctccctgtctgtgttcacggctctgcccttcaccacacccgctcccggcccagcacacgggccgctccttgtgactgcaggggctcctccaggcggccctctggtgctgtctaccctccccagcacacctctggtgacagaacaggatggctgcggcccgagtggggccggggcttccaacgtctttgtccagatgaggacagaggtggggcctgtgaaggccgctcaggcgcagaccttggtcctaactcaggcccccctcgtctggcaggctccaggcgccctctgcggaggtgttgtgtgtccacctcccctactcctggcagctgctcctgtggtgcctgttatggctgcccaggtggttgggggcacccaggcctgtgagggaggctggtcccagggccttcctcttccaccaccaccaccaccggctgcccagctgccccccattgtgtcccaagggaatgctgggccatggccacaaggggctcacggagagggcagcctggcttcctcccaggccaaggccccgccagatgactcctgtaaccccaggagtgtctatgagaacttccgactctggcagcactacaagcccctggcccggaggcaccttccccagagtcctgacaccgaagcgctttcgtgcttcctcatcccagttctccgatccctggcccggcggaagcccaccatgaccctggaggagggactgtggcgggccatgcgggaatggcagcacacgagcaactttgaccggatgatcttctacgagatggcggaaaagttcctggagtttgaggctgaggaggagatgcagattcagaaatcgcaatggatgaaggggccccagtgcctgcctcctccagccacaccgaggcttgaacctcgaggacccccggcccctgaggtggtcaagcagccagtgtaccttcccagcaaggccggccccaaggccccgactgcctgcctgccaccacccaggccccagaggccagtgaccaaggcccgccggccaccaccccggccccaccggcgagcagagaccaaggcccgcctgccaccacccaggccccagagaccagcagagaccaaggtccctgaggagatccccccagaagtggtgcaggagtatgtggacatcatggaggagctgctggggccttccctcggggccacgggggagcccgagaaacaacgggaagagggcgaagtgaagcagccacaggaagaggactggacgcccccagacccgggcctcctgagctacactgacaagctgtgttcccagaaagacttcgtcaccaaggtggaggccgtcattcatccccaattcctggaagaattgctttccccagatccacagatggatttcttggccctaagccaggagctggagcaggaggaaggactcacccttgcccagggagccccttcagatgctccagggactgacagatgctgaggaagccctgatccctcccaccacccactcacaaggccctgcctgctttagggaggcttcttggggcccccccatcgttatcagcatccctggaaaatcctgggattggagagagctggctggctcttgttctgctcggtgggagctgaggagaaggcagccgcctgcaacatggacatggggagaggaggctgctcctgcttaaccctcatcaggaagagcgcgggcactgggctgaggggagacgttgaggtgaccatccacacaggtgtgtttgggatacgatgatgggtggggagcaggggaagtccttctgcctgtttctgggcaggagagagtcttgtccaactagctaaagcagatgctccttgctgtggccacagggactggcctcggggccctcaaggtcctgcatggagccccccacagctatgattcccttcccatatgatgactgaactcatgtggaattgatgtagacacagatttacattggtttctaaaacagttccctcccaacacaccatcaccaatgggaacaagcatgtccagtccatcaggcgcagggtgggtgtttctgctggttccagggcccggaggagctggggcccaggccaagaggggccgagggtctgccgcccttctgccaggcacagaccccaagggcagagcaggggctgcctgggatgtggcattggctgtctgggaagtgccctgggagttgggggctaggtgttcgccaaagagagacttccagagtctatgagtgagatgaggactgcatcaggagagggaccgaggctggggaggatgctctgctctttcccaggttgtcctgtcttcccaatctctgctgaactgccctcaccccatgggccaactctgccccccttacccctaacccacctcttagaatctcagatcccagcgtggacaggacccggcacccaccctggttccctcctggccaacaccttcttctccacggtctgagttctgattcctcccccagggcgcttattggctcaggacccctgtgactgccagggcactggtcccagcactgcctgcgtgcagagctgtggtcacggccctgggggctggcccagcagcagaggctggtggggcaaagctgtctggtacacggtggcctggcccctcggccaagtgacaaagggagccatgtttgggtcctctctggccccatctgcccacagaacacagcagtcagcctgacagatgcccctctgccccgtcccttctgctcgatgtgggcagtgtcggaggcctgctgtcttctgtggcctttgggaaggagagtttatcttggcagggcttccccagctcagtgcacgtcaggccctcggggaaaatgtggggagcgaagagtcactggtgggtgatgtgggcagctcccgtgactcctctacattcacggccatcctcaggagataaggtagcactgcccctttgcagggtttaggaatgttaagtgagccgtgtttgaagggaacatggtccatactctggcgtgtgtgggtgcccagccaacttcctcacctaagggtgaaagtgacaccttggggctcctactggttaccccactggctgttgtctatcctactgtccctgtccttgtcttggctgagccattcctaggaagcagaacttgtgcttcctccacctctgtgtcccacctgagccctacaatctgcccctaaatgggcacagtggggctgactggggggctctg

SEQ ID NO: 161690 - DNA, 3290 bp, Homo sapiens
  Payload ID: 11561
  Gene Symbol: NUTM2A
  Gene Name: NUT family member 2A
  Uniprot ID: Q8IVF1
  ENST ID: ENST00000381707
  CDS Start-End: 384-3020
ggatttctggtctcggtgctgtaggtcacatagccactctttcctggattgaggctttccagcaaaggggctgggacgtaaggctggcctgctggtgtggacagagattccagcaacatgcatgacctgggggtacaaggattgcttcctaaacaatgataagcacacagccacctaatagtctggatcggctgagaccatcctgatttcaaacacccagtccccttgccttcctaagaacccctgtgtttctcagactgaaaatgtgttttgaactttgttcacgaagtgaggccgctgttgaaattcgtcaagactgggaaagagccaaagtgggaaggagcatgggttgattggcacaaaagtaggtctgctgataaagaatggaagtaaaggggccatcaggtagaagcttttgctgtgagtcagaaggacaatttaaaagttgcctaaagaggcacacgccatctctgctgctgccttccagttggaagggaaactcaggttcttgcctaatggccaaagcccttcacagaatgtcccccacccctaacagctgcccactgcccctccccctctgcagaatgtctggggtcctatgttccaggaacctgtttactttcaaattttccctgtttcagttggactcaggagcatctggtgagccaggtcactctctgggtcttacccttggcttttctcattgcggaaactgccagacagcggtggtcagtgcccagcctgaggggatggcttcaaatggagcatacccagcgctgggaccgggcgtgaccgcgaaccctggcacctccctgtctgtgttcacggctctgcccttcaccacacccgctcccggcccagcacacgggccgctccttgtgactgcaggggctcctccaggcggccctctggtgctgtctaccctccccagcacacctctggtgacagaacaggatggctgcggcccgagtggggccggggcttccaacgtctttgtccagatgaggacagaggtggggcctgtgaaggccgctcaggcgcagaccttggtcctaactcaggcccccctcgtctggcaggctccaggcgccctctgcggaggtgttgtgtgtccacctcccctactcctggcagctgctcctgtggtgcctgttatggctgcccaggtggttgggggcacccaggcctgtgagggaggctggtcccagggccttcctcttccaccaccaccaccaccggctgcccagctgccccccattgtgtcccaagggaatgctgggccatggccacaaggggctcacggagagggcagcctggcttcctcccaggccaaggccccgccagatgactcctgtaaccccaggagtgtctatgagaacttccgactctggcagcactacaagcccctggcccggaggcaccttccccagagtcctgacaccgaagcgctttcgtgcttcctcatcccagttctccgatccctggcccggcggaagcccaccatgaccctggaggagggactgtggcgggccatgcgggaatggcagcacacgagcaactttgaccggatgatcttctacgagatggcggaaaagttcctggagtttgaggctgaggaggagatgcagattcagaaatcgcaatggatgaaggggccccagtgcctgcctcctccagccacaccgaggcttgaacctcgaggacccccggcccctgaggtggtcaagcagccagtgtaccttcccagcaaggccggccccaaggccccgactgcctgcctgccaccacccaggccccagaggccagtgaccaaggcccgccggccaccaccccggccccaccggcgagcagagaccaaggcccgcctgccaccacccaggccccagagaccagcagagaccaaggtccctgaggagatccccccagaagtggtgcaggagtatgtggacatcatggaggagctgctggggccttccctcggggccacgggggagcccgagaaacaacgggaagagggcgaagtgaagcagccacaggaagaggactggacgcccccagacccgggcctcctgagctacactgacaagctgtgttcccagaaagacttcgtcaccaaggtggaggccgtcattcatccccaattcctggaagaattgctttccccagatccacagatggatttcttggccctaagccaggagctggagcaggaggaaggactcacccttgcccagctagtggagaagcgcctcctacccttgaaggagaaacagcatgcgagggcagcccctagtcgtggcacagcccggttggactcaagttcttctaagtttgcagctggccaaggagcagagagagacgtccctgtcccccaacaaggggttggcatggaaacctgcccaccccagacgactgcccgggactctcagggacgaggcagagcacacactggcatggccaggtccaaagactctgttgtgcttttgggatgtcaggattcccctgggctgagggctgcccggccaacctctcctccccaggaccacagacccacctgccctggcgtgggtaccaaggatgccttggatctccctggagggtctcctgtcagggagtcacatgggctggctcaggggtcaagtgaggaggaggaactccccagcctggccttcctcttgggttcccagcacaagcttctgccctggtggctaccccagagccctgtccctgcctcgggccttctcagcccagaaaagtggggaccccagggaactcatcagttcccatctgctgagagaagaggcctcaacctagcaccttctcctgccaacaaggccaagaagcgacctctctttggaagcctgtcccctgctgaaaagacaccccacccagggcctgggctcagggtctctggggagcaatccctgacttgggggctgggtggcccctcacagtctcaaaagagaaagggtgaccccttggtctccaggaaggagaagaagcagcgttgtagccagtaggggcttctgagcaggctctctggggccgatccccaaggatggggctctggcatccgatgccccaaagcggtcaaaagcttcttctcccccagtgctgatcttgctgggccttagctttggagggtaggggagggaggggagggagagggtggctgaatggggagggcaggaagggagggtctggggggaaggggctggggagtgggggtgggaagcagtgcgttgggggcctcgtgtgtaagtgtgaataaatgtagttgtcttggaaaa

SEQ ID NO: 161691 - DNA, 2239 bp, Homo sapiens
  Payload ID: 11562
  Gene Symbol: NUTM2B
  Gene Name: NUT family member 2B
  ENST ID: ENST00000342531
  CDS Start-End: 1-1969
cctaactcaggcccccctcgtctggcaggctccaggcgccctctgcggaggtgttgtgtgtccacctcccctactcctggcagctgctcctgtggtgcctgttatggctgcccaggtggttgggggcacccaggcctgtgagggaggctggtcccagggccttcctcttccaccaccaccaccaccggctgcccagctgccccccattgtgtcccaagggaatgctgggccatggccacaaggggctcatggagagagcagcctggcttcctcccaggccaaggccccgccagatgactcctgtaaccccaggagtgtctatgagaacttccgactctggcagcactacaagcccctggcccggaggcaccttccccagagtcctgacaccgaagcgctttcgtgcttcctcatcccagttctccgatcgctggcccggcggaagcccaccatgaccctggaggagggactgtggcgggccatgcgggaatggcagcacacgagcaactttgaccggatgatcttctacgagatggcggaaaagttcctggagtttgaggctgaggaggagatgcagattcagaaatcgcaatggatgaaggggccccagtgcctgcctcctccagccacaccgaggcttgaacctcgaggacccccggcccctgaggtggtcaagcagccagtgtaccttcccagcaaggccggccccaaggccccgactgcctgcctgccaccacccaggccccagaggccagtgaccaaggcccgccggccaccaccccggccccaccggcgagcagagaccaaggcccgcctgccaccacccaggccccagagaccagcagagaccaaggtccctgaggagatccccccagaagtggtgcaggagtatgtggacatcatggaggagctgctggggccttccctcggggccacgggggagcccgagaaacaacgggaagagggcaaagtgaagcagccacaggaagaggactggacgcccccagacccgggcctcctgagctacattgacaagctgtgttcccagaaagacttcgtcaccaaggtggaggccgtcattcatccccaattcctggaagaattgctttccccagatccacagatggatttcttggccctaagccaggacctggagcaggaggaaggactcacccttgcccagctagtggagaagcgcctcccacccttgaaggagaaacagcatgcgagggcagcccctagtcgtggcacagcccggttggactcaagttcttctaagtttgcagctggccaaggagcagagagagacgtccctgacccccaacaaggggttggcatggaaacctgcccaccccagatgactgcccgggactctcagggacgaggcagagcacacactggcatggccaggtccgaagactctgttgtgcttttgggatgtcaggattcccctgggctgagggctgcctggccaacctctcctccccaggaccacagacccacctgccctggcgtgggtaccaaggatgccttggatctccctggagggtctcctgtcagggagtcacatgggctggctcaggggtcaagtgaggaggaggaactccccagcctggccttcctcttgggttcccagcacaagcttctgccctggtggctaccccagagccctgtccctgcctcgggccttctcagcccagaaaagtggggaccccagggaactcatcagtccccatctgctgagagaagaggcctcaacctagcaccttctcctgccaacaaggccaagaagcgacctctctttggaagcctgtcccctgctgaaaagacaccctacccagggcctgggctcagggtctctggggagcaatccctgacttgggggctgggtggcccctcacagtctcaaaagagaaagggtgaccccttggtctccaggaaggagaagaagcagcattgtagccagtaggggcttctgagcaggctctctggggccaatccccaaggatggggctctggcatccgatgccccaaagcggtcaaaagcttcttctcccccagtgctgatcttgctgggccttagctttggagggtaggggagggaggggagggagagggtggctgaatggggagggcaggaagggagggtctggggggaaggggctggggagtgggggtgggaagcagtgcgttgggggcctcgtgtgtaagtgtgaataaatgtagttgtcttggaaaa

SEQ ID NO: 161692 - DNA, 3970 bp, Homo sapiens
  Payload ID: 11562
  Gene Symbol: NUTM2B
  Gene Name: NUT family member 2B
  ENST ID: ENST00000372321
  CDS Start-End: 533-2221
ggctttccagcaaaggggctgggacgtaaggctggcctgctggtgtggacagagattccagcaacatgcatgacctgggggtacaaggattgcttcctaaacaatgataagcacacagccacctaatagtctggatcggctgagaccatcctgatttcaaacacccagtccccttgccttcctaagaacccctgtgtttctcagactgaaaatgtgttttgaactttgttcacgaagtgaggccgctgttgaaattcgtcaagactgggaaagagccaaagtgggaaggagcatgggttgattggcacaaaagtaggtctgctgataaagaatggaagtaaaggggccatcaggtagaagcttttgctgtgagtcagaaggacaatttaaaagttgcctaaagaggcacacgccatctctgctgctgccttccagttggaagggaaactcaggttcttgcctaatggccgaagcccttcacagaacgtcccccacccctaacagctgcccactgcccctccccctctgcagaatgtctggggtcctatgttccaggaacctgtttactttcaaattttccctgtttcagttggactcaggagcatctggtgagccaggtcactctctgggtcttacccttggcttttcttattgcggaaactgccagacggcggtggtcagtgcccagcctgaggggatggcttcgaatggagcatacccagtgctgggaccgggcgtgaccgcgaaccctggcacctccctgtctgtgttcacggctctgcccttcaccacacccgctcccggcccagcacacgggccgctccttgtgactgcaggggctcctccaggcggccctctggtgctgtctaccttccccagcacacctctggtgacagaacaggatggctgcggcccgagtggggccggggcttccaacgtctttgtccagatgaggacagaggtggggcctgtgaaggccgctcaggcgcagaccttggtcctaactcaggcccccctcgtctggcaggctccaggcgccctctgcggaggtgttgtgtgtccacctcccctactcctggcagctgctcctgtggtgcctgttatggctgcccaggtggttgggggcacccaggcctgtgagggaggctggtcccagggccttcctcttccaccaccaccaccaccggctgcccagctgccccccattgtgtcccaagggaatgctgggccatggccacaaggggctcatggagagagcagcctggcttcctcccaggccaaggccccgccagatgactcctgtaaccccaggagtgtctatgagaacttccgactctggcagcactacaagcccctggcccggaggcaccttccccagagtcctgacaccgaagcgctttcgtgcttcctcatcccagttctccgatcgctggcccggcggaagcccaccatgaccctggaggagggactgtggcgggccatgcgggaatggcagcacacgagcaactttgaccggatgatcttctacgagatggcggaaaagttcctggagtttgaggctgaggaggagatgcagattcagaaatcgcaatggatgaaggggccccagtgcctgcctcctccagccacaccgaggcttgaacctcgaggacccccggcccctgaggtggtcaagcagccagtgtaccttcccagcaaggccggccccaaggccccgactgcctgcctgccaccacccaggccccagaggccagtgaccaaggcccgccggccaccaccccggccccaccggcgagcagagaccaaggcccgcctgccaccacccaggccccagagaccagcagagaccaaggtccctgaggagatccccccagaagtggtgcaggagtatgtggacatcatggaggagctgctggggccttccctcggggccacgggggagcccgagaaacaacgggaagagggcaaagtgaagcagccacaggaagaggactggacgcccccagacccgggcctcctgagctacattgacaagctgtgttcccagaaagacttcgtcaccaaggtggaggccgtcattcatccccaattcctggaagaattgctttccccagatccacagatggatttcttggccctaagccaggacctggagcaggaggaaggactcacccttgcccagggagccccttcagatgctccagggactgacagatgctgaggaagccctgatccctcccactaccgactcacaaggccctgcctgctttagggaggcttcttggggccccccatcgtcatcagcatccctggaaaatcctgggattggagagagctggctggctcttgttctgctcggtgggagctgaggagaaggcagccacctgcaacatggacatggggagaggaggctgctcctgcttaaccctcatcaggaagagcgcgggcactgggctgaggggagacgttgaggtgaccatccacacaggtgtgtttgggatacgatgatgggtggggagcaggggaagtccttctgcctgtttctgggcaggagagagtcttgtccaactagctaaagcagatgctccttgctgtggccacagggactggcctcggggccctcaaggtcctgcatggagccccccacagctatgattcccttcccatatgatgactgaactcatgtggaattgatgtagacacagatttacattggtttctaaaacagttccctcccaacacaccatcaccaatgggaacaaacatgtccagtccatcaggcgcagggtgggtgtttctgctggttccagggcccggaggagctggggcccaggccaagaggggccgagggtcagccgcccttctgccaggcacagaccccaagggcagagcaggggctgcctgggatgtggcattggctgtctgggaagtgacctgggagttgggggctaggtgttcgccaaagggagacttccagagtctacgagtgagatgaggactgcatcaggagagggaccgaggctggggaggatgctctgctctttcccaggttgtcctgtcctcccaatctctgctgaactgccctcaccccatgggccaacttctgccccccttacccctaacccacctcttagaatctcagatcccagcatggacaggacccggcacccaccctggttccctcctggccaacaccttcttctccacggtctgagttctgattcctcccccagggcgcttattggctcaggacccctgtgactgccagggcactggtcccagcactgcctgcgtgcagagctgtggtcacggcgctgggggctggcccagcagcagaggctggtggggcaaagctgtctggtacacggtggcctggcccctcggccaagtgacaaagggagccatgtttgggtcctctctggccccatctgcccacagaacacagcagtcagcctgacagatgcccctctgccccgtcccttctgctcgatgtgggcagtgtcggaggcctgctgtcttctgtggcctttgggaaggagagtttatcttggcagggcttccccagctcagtgcacatcaggccctcggggaaaatgtggggagcgaagagtcactggtgggtgatgtgggcagctcccgtgactcctctacattcagggccatcctcaagagataaggtagcactgcccctttgcagggtttaggaatgttaagtgagccgtgtttgaagggaacatggtccatactctggcgtgtgtgggtgcccagccaacttcctcacctaagggtgaaagtgacaccttggggctcctgctggttaccccactggctgttgtctatcccactgtccctgtccttgtcttggctgagccattcctaggaagcagaacttgtgcttcctccacctctgtgtcccacctgagccctacaatctgcccctaaatgggcacagtggggctgactggggggc

SEQ ID NO: 161693 - DNA, 3292 bp, Homo sapiens
  Payload ID: 11562
  Gene Symbol: NUTM2B
  Gene Name: NUT family member 2B
  Uniprot ID: A6NNL0
  ENST ID: ENST00000429828
  CDS Start-End: 384-3020
ggatttctggtctcggtgctgtaggtcacatagccactctttcctggattgaggctttccagcaaaggggctgggacgtaaggctggcctgctggtgtggacagagattccagcaacatgcatgacctgggggtacaaggattgcttcctaaacaatgataagcacacagccacctaatagtctggatcggctgagaccatcctgatttcaaacacccagtccccttgccttcctaagaacccctgtgtttctcagactgaaaatgtgttttgaactttgttcacgaagtgaggccgctgttgaaattcgtcaagactgggaaagagccaaagtgggaaggagcatgggttgattggcacaaaagtaggtctgctgataaagaatggaagtaaaggggccatcaggtagaagcttttgctgtgagtcagaaggacaatttaaaagttgcctaaagaggcacacgccatctctgctgctgccttccagttggaagggaaactcaggttcttgcctaatggccgaagcccttcacagaacgtcccccacccctaacagctgcccactgcccctccccctctgcagaatgtctggggtcctatgttccaggaacctgtttactttcaaattttccctgtttcagttggactcaggagcatctggtgagccaggtcactctctgggtcttacccttggcttttcttattgcggaaactgccagacggcggtggtcagtgcccagcctgaggggatggcttcgaatggagcatacccagtgctgggaccgggcgtgaccgcgaaccctggcacctccctgtctgtgttcacggctctgcccttcaccacacccgctcccggcccagcacacgggccgctccttgtgactgcaggggctcctccaggcggccctctggtgctgtctaccttccccagcacacctctggtgacagaacaggatggctgcggcccgagtggggccggggcttccaacgtctttgtccagatgaggacagaggtggggcctgtgaaggccgctcaggcgcagaccttggtcctaactcaggcccccctcgtctggcaggctccaggcgccctctgcggaggtgttgtgtgtccacctcccctactcctggcagctgctcctgtggtgcctgttatggctgcccaggtggttgggggcacccaggcctgtgagggaggctggtcccagggccttcctcttccaccaccaccaccaccggctgcccagctgccccccattgtgtcccaagggaatgctgggccatggccacaaggggctcatggagagagcagcctggcttcctcccaggccaaggccccgccagatgactcctgtaaccccaggagtgtctatgagaacttccgactctggcagcactacaagcccctggcccggaggcaccttccccagagtcctgacaccgaagcgctttcgtgcttcctcatcccagttctccgatcgctggcccggcggaagcccaccatgaccctggaggagggactgtggcgggccatgcgggaatggcagcacacgagcaactttgaccggatgatcttctacgagatggcggaaaagttcctggagtttgaggctgaggaggagatgcagattcagaaatcgcaatggatgaaggggccccagtgcctgcctcctccagccacaccgaggcttgaacctcgaggacccccggcccctgaggtggtcaagcagccagtgtaccttcccagcaaggccggccccaaggccccgactgcctgcctgccaccacccaggccccagaggccagtgaccaaggcccgccggccaccaccccggccccaccggcgagcagagaccaaggcccgcctgccaccacccaggccccagagaccagcagagaccaaggtccctgaggagatccccccagaagtggtgcaggagtatgtggacatcatggaggagctgctggggccttccctcggggccacgggggagcccgagaaacaacgggaagagggcaaagtgaagcagccacaggaagaggactggacgcccccagacccgggcctcctgagctacattgacaagctgtgttcccagaaagacttcgtcaccaaggtggaggccgtcattcatccccaattcctggaagaattgctttccccagatccacagatggatttcttggccctaagccaggacctggagcaggaggaaggactcacccttgcccagctagtggagaagcgcctcccacccttgaaggagaaacagcatgcgagggcagcccctagtcgtggcacagcccggttggactcaagttcttctaagtttgcagctggccaaggagcagagagagacgtccctgacccccaacaaggggttggcatggaaacctgcccaccccagatgactgcccgggactctcagggacgaggcagagcacacactggcatggccaggtccgaagactctgttgtgcttttgggatgtcaggattcccctgggctgagggctgcctggccaacctctcctccccaggaccacagacccacctgccctggcgtgggtaccaaggatgccttggatctccctggagggtctcctgtcagggagtcacatgggctggctcaggggtcaagtgaggaggaggaactccccagcctggccttcctcttgggttcccagcacaagcttctgccctggtggctaccccagagccctgtccctgcctcgggccttctcagcccagaaaagtggggaccccagggaactcatcagtccccatctgctgagagaagaggcctcaacctagcaccttctcctgccaacaaggccaagaagcgacctctctttggaagcctgtcccctgctgaaaagacaccctacccagggcctgggctcagggtctctggggagcaatccctgacttgggggctgggtggcccctcacagtctcaaaagagaaagggtgaccccttggtctccaggaaggagaagaagcagcattgtagccagtaggggcttctgagcaggctctctggggccaatccccaaggatggggctctggcatccgatgccccaaagcggtcaaaagcttcttctcccccagtgctgatcttgctgggccttagctttggagggtaggggagggaggggagggagagggtggctgaatggggagggcaggaagggagggtctggggggaaggggctggggagtgggggtgggaagcagtgcgttgggggcctcgtgtgtaagtgtgaataaatgtagttgtcttggaaaatg

SEQ ID NO: 161694 - DNA, 3290 bp, Homo sapiens
  Payload ID: 11563
  Gene Symbol: NUTM2D
  Gene Name: NUT family member 2D
  Uniprot ID: Q5VT03
  ENST ID: ENST00000381697
  CDS Start-End: 599-3019
ggatttctggtctcggtgctgtaggtcacatagccactctttcctggattgaggctttccagcaaaggggctgggacgtaaggctggcctgctggtgtggacagagattccagcaacatgcatgacctgggggtacaaggattgcttcctaaacaatgataagcacacagccacctaatagtctggatcggctgagaccatcctgatttcaaacacccagtccccttgccttcctaagaacccctgtgtttctcagactgaaaatgtgttttgaactttgttcacgaagtgaggccgctgttgaaattcgtcaagactgggaaagagccaaagtgggaaggagcatgggttgattggcacaaaagtaggtctgctgataaagaatggaagtaaaggggccatcaggtagaagcttttgctgtgagtcagaaggacaatttaaaagttgcctaaagaggcacacgccatctctgctgctgccttccagttggaagggaaactcaggttcttgcctaatggccgaagcccttcacagaatgtcccccacccctaacagctgcccactgcccctccccctctgcagaatgtctggggtcctatgttccaggaacctgtttactttcaaattttcctgtttcagttggactcaggagcatctggtgagccaggtcactctctgggtcttacccttggcttttctcattgtggaaactgccagacagcggtagtcagtgcccagcctgaggggatggcttcaaatggagcatacccagcgctgggaccgggcgtgaccgcgaaccctggcacctccctgtctgtgttcacggctctgcccttcaccacacccgctcccggcccagcacacgggccgctccttgtgactgcaggggctcctccaggcggccctctggtgctgtctaacttccccagcacacctctggtgacagaacaggatggctgcggcccgagtggggccggggcttccaacgtctttgtccagatgaggacagaggtggggcctgtgaaggccgctcaggcgcagaccttggtcttaactcagacccccctcgtctggcaggctccaggcgccctctgcggaggtgttgtgtgtccacctcccctactcctggcagctgctcctgtggtgcctgttatggctgcccaggtggttgggggcacccaggcctgtgagggaggctggtcccagggccttcctcttccaccaccaccaccaccggctgcccagctgccccccattgtgtcccaagggaatgctgggccatggccacaaggggctcacggagagggcagcctggcttcctcccaggccaaggccccgccagatgactcctgtaaccccaggagtgtctatgagaacttccgactctggcagcactacaagcccctggcccggaggcaccttccccagagtcctgacaccgaagcgctttcgtgcttcctcatcccagttctccgatccctggcccggcggaagcccaccatgaccctggaggagggactgtggcgggccatgcgggaatggcagcacacgagcaactttgaccggatgatcttctacgagatggcggaaaagttcctggagtttgaggctgaggaggagatgcagattcagaaatcgcaatggatgaaggggccccagtgcctgcctcctccagccacaccgaggcttgaacctcgaggacccccggcccctgaggtggtcaagcagccagtgtaccttcccagcaaggccggccccaaggccccgactgcctgcctgccaccacccaggccccagaggccagtgaccaaggcccgccggccaccaccccggccccaccggcgagcagagaccaaggcccgcctgccaccacccaggccccagagaccagcagagaccaaggtccctgaggagatccccccagaagtggtgcaggagtatgtggacatcatggaggagctgctggggccttctctcggggccacgggggagcccgagaaacaacgggaagagggcgaagtgaagcagccacaggaagaggactggacgcccccagacccgggcctcctgagctacactgacaagctgtgttcccagaaagacttcgtcaccaaggtggaggccgtcattcatccccaattcctggaagaattgctttccccagatccacagatggatttcttggccctaagccaggagctggagcaggaggaaggactcacccttgcccagctagtggagaagcgcctcctacccttgaaggagaaacagcatgcgagggcagcccctagtcgtggcacagcccggttggactcaagttcttctaagtttgcagctggccaaggagcagagagagacgtccctgacccccaacaaggggttggcatggaaacctgcccaccccagacgactgcccgggactctcagggacgaggcagagcacacactggcatggccaggtccaaagactctgttgtgcttttgggatgtcaggattcccctgggctgagggctgcccggccaacctctcctccccaggaccacagacccacctgccctggcgtgggtaccaaggatgccttggatctccctggagggtctcctgtcagggagtcacatgggctggctcaggggtcaagtgaggaggaggaactccccagcctggccttcctcttgggttcccagcacaagcttctgccctggtggctaccccagagccctgtccctgcctcgggccttctcagcccagaaaagtggggaccccagggaactcatcagtccccatctgctgagagaagaggcctcaacctagcaccttctcctgccaacaaggccaagaagcgacctctctttggaagcctgtcccctgctgaaaagacaccccacccagggcctgggctcagggtctctggggagcaatccctgacttgggggctgggtggcccctcacagtctcaaaagagaaagggtgaccccttggtctccaggaaggagaagaagcagcgttgtagccagtaggggcttctgagcaggctctctggggccgatccccaaggatggggctctggcatccgatgccccaaagcggtcaaaagcttcttctcccccagtgctgatcttgctgggccttagctttggagggtaggggagggaggggagggagagggtggcctgaatggggagggcaggaagggagggtctggggggaaggggctggggagtgggggtgggaagcagtgtgttgggggcctcgtgtgtaagtgtgaataaatgtagttgtcttggaaaa

SEQ ID NO: 161695 - DNA, 5543 bp, Homo sapiens
  Payload ID: 11563
  Gene Symbol: NUTM2D
  Gene Name: NUT family member 2D
  ENST ID: ENST00000412718
  CDS Start-End: 547-2220
ggctttccagcaaaggggctgggacgtaaggctggcctgctggtgtggacagagattccagcaacatgcatgacctgggggtacaaggattgcttcctaaacaatgataagcacacagccacctaatagtctggatcggctgagaccatcctgatttcaaacacccagtccccttgccttcctaagaacccctgtgtttctcagactgaaaatgtgttttgaactttgttcacgaagtgaggccgctgttgaaattcgtcaagactgggaaagagccaaagtgggaaggagcatgggttgattggcacaaaagtaggtctgctgataaagaatggaagtaaaggggccatcaggtagaagcttttgctgtgagtcagaaggacaatttaaaagttgcctaaagaggcacacgccatctctgctgctgccttccagttggaagggaaactcaggttcttgcctaatggccgaagcccttcacagaatgtcccccacccctaacagctgcccactgcccctccccctctgcagaatgtctggggtcctatgttccaggaacctgtttactttcaaattttcctgtttcagttggactcaggagcatctggtgagccaggtcactctctgggtcttacccttggcttttctcattgtggaaactgccagacagcggtagtcagtgcccagcctgaggggatggcttcaaatggagcatacccagcgctgggaccgggcgtgaccgcgaaccctggcacctccctgtctgtgttcacggctctgcccttcaccacacccgctcccggcccagcacacgggccgctccttgtgactgcaggggctcctccaggcggccctctggtgctgtctaacttccccagcacacctctggtgacagaacaggatggctgcggcccgagtggggccggggcttccaacgtctttgtccagatgaggacagaggtggggcctgtgaaggccgctcaggcgcagaccttggtcttaactcagacccccctcgtctggcaggctccaggcgccctctgcggaggtgttgtgtgtccacctcccctactcctggcagctgctcctgtggtgcctgttatggctgcccaggtggttgggggcacccaggcctgtgagggaggctggtcccagggccttcctcttccaccaccaccaccaccggctgcccagctgccccccattgtgtcccaagggaatgctgggccatggccacaaggggctcacggagagggcagcctggcttcctcccaggccaaggccccgccagatgactcctgtaaccccaggagtgtctatgagaacttccgactctggcagcactacaagcccctggcccggaggcaccttccccagagtcctgacaccgaagcgctttcgtgcttcctcatcccagttctccgatccctggcccggcggaagcccaccatgaccctggaggagggactgtggcgggccatgcgggaatggcagcacacgagcaactttgaccggatgatcttctacgagatggcggaaaagttcctggagtttgaggctgaggaggagatgcagattcagaaatcgcaatggatgaaggggccccagtgcctgcctcctccagccacaccgaggcttgaacctcgaggacccccggcccctgaggtggtcaagcagccagtgtaccttcccagcaaggccggccccaaggccccgactgcctgcctgccaccacccaggccccagaggccagtgaccaaggcccgccggccaccaccccggccccaccggcgagcagagaccaaggcccgcctgccaccacccaggccccagagaccagcagagaccaaggtccctgaggagatccccccagaagtggtgcaggagtatgtggacatcatggaggagctgctggggccttctctcggggccacgggggagcccgagaaacaacgggaagagggcgaagtgaagcagccacaggaagaggactggacgcccccagacccgggcctcctgagctacactgacaagctgtgttcccagaaagacttcgtcaccaaggtggaggccgtcattcatccccaattcctggaagaattgctttccccagatccacagatggatttcttggccctaagccaggagctggagcaggaggaaggactcacccttgcccagggagccccttcagatgctccagggactgacagatgctgaggaagccctgatccctcccaccacccactcacaaggccctgcctgctttagggaggcttcttggggccccctcatcgttatcagcatccctggaaaatcctgggattggagagagctggctggctcttgttctgctcggtgggagctgaggagaaggcagccgcctgcaacatggacatggggagaggaggctgctcctgcttaaccctcatcaggaagagcgcgggcactgggctgaggggagacgttgaggtgaccatccacacaggtgtgtttgggatacgatgatgggtggggagcaggggaagtccttctgcctgtttctgggcaggagagagtcttgtccaactagctaaagcagatgctccttgctgtggccacagggactggcctcggggccctcaaggtcctgcatggagccccccacagctatgattcccttcccatatgatgactgaactcatgtggaattgatgtagacacagatttacattggtttctaaaacagttccctcccaacacaccatcaccaatgggaacaagcatgtccagtccatcaggcgcagggtgggggtttctgctggttccagggcccggaggagctggggcccaggccaagaggggccgagggtcagccgcccttctgccaggcacagaccccaagggcagagcaggggctgcctgggatgtggcattggctgtctgggaagtgccctgggagttgggggctaggtgttcgccaaagggagacttccagagtctatgagtgagatgaggactgcatcaggagagggaccgaggctggggaggatgctctgctctttcccaggttgtcctgtcttcccaatctctgctgaactgccctcaccccatgggccaactctgccccccttacccctaacccacctcttagaatctcagatcccagcgtggacaggacccggcacccaccctggttccctcctggccaacaccttcttctccacggtctgagttctgattcctcccccagggcgcttattggctcaggacccctgtgactgccagggcactggtcccagcactgcctgcgtgcagagctgtggtcacggccctgggggctggcccagcagcagaggctggtggggcaaagctgtctggtacacggtggcctggcccctcggccaagtgacaaagggagccatgtttgggtcctctctggccccatctgcccacagaacacagcagtcagcctgacagatgcccctctgccccgtcccttctgctcgatgtgggcagtgtcggaggcctgctgtcttctgtggcctttgggaaggagagtttatcttggcagggcttccccagctcagtgcacgtcaggccctcggggaaaatgtggggagcgaagagtcactggtgggtgatgtgggcagctcccgtgactcctctacattcacggccatcctcaggagataaggtagcactgcccctttgcagggtttaggaatgttaagtgagccgtgtttgaagggaacatggtccatactctggcgtgtgtgggtgcccagccaacttcctcacctaagggtgaaagtgacaccttggggctcctgctggttaccccactggctgttgtctatcccactgtccctgtccttgtcttggctgagccattcctaggaagcagaacttgtgcttcctccacctctgtgtcccacctgagccctacaatctgcccctaaatgggcacagtggggctgactggggggctctggtagactgaacatacgtcccccgcccagttcctgtgctgaagccctaacccccaacgtgatggtatttggaaatggggcctttgggagttattcagggttagaagagaccatgagggtggggccctaatgatgggattagggccctggtaagaagcagagaccccagagctctctctctccctgacacgaggacacactgagaaggcggccatctgcaagccagagagagagccctcaccagaaccttgcccactgggatgctaacctcggacttccagcctccagactgtgacaaatacatttctttttttaatatgtgccaccacccccaagtctatggccctttgtccgagcagccctatgtgactaggacaaagtccataatctcaagaacttccttcatgactggtatctggaaaccgtgcatcagagccacgggaaagaaaggctcagccctttacaactgtcagcacacctccaccccaagtgcagtgtatcacacatgaaccaggagagcctgggacacagtgaaaaggaatctgtaaatacccatgatgtcatcgcatccacacttggggaagccatgcagcttgctcacagcaggtgctgggggtgtgctgaggctcttggtcggcttggcctccctgctcacacacccaggtcactctctgggaaccagtgcggctggggtggcccctggcaggtttgcctccagagacccctcccttcaccattggatgacagatccccgaagaagccatagcctcctgggaaactccatctgacaacgtgagcaaggcttgcccccgttagtgaacatgctgtgctttctgacagctatgaggatggacttgatccaggtggctgcccttttgtagctcactttgattctaacttcagcgttgcatgatgccctatgaatggaatatacaatgtgtgtctttcacatctgtcttctttcacttagaataatatttccaatggcatctacatttttagtatgtatcattacatcaaacctttttgttgctgaataatattccattaatggatatactaaaatttatccatttatcagttaagaacgtttgggtttttttcactttttggctattgtgaataacacttctaagaacatttgtgtacaaggtttcctggggatgtatgtttccatttctcatggctacatacctaagagtgaaattggtggaccatatggaaactctgtgtttaaccatttcagaaggtgccagactgttcccagtgtacatgaaccattttatatacccactagctgtgtgagggtcccagcgtctctccatattcgagccaacatttattatcaactctctttttgataaagtcatcctagtggttctgaagttgcatctcatcgtagtttgcatttgtgtttctctgatgttgaacctctttcacgtacctattcgccacttgtatatcttctttggagcaatgtgtactcaacatttagtaatttttaactggtttgtgttttgtcattgagttataagaattctttatatattccagataaaaatgctttacaag

SEQ ID NO: 161696 - DNA, 1018 bp, Homo sapiens
  Payload ID: 11563
  Gene Symbol: NUTM2D
  Gene Name: NUT family member 2D
  ENST ID: ENST00000465545
  CDS Start-End: 1-458
aggtccctgaggagatccccccagaagtggtgcaggagtatgtggacatcatggaggagctgctggggccttctctcggggccacgggggagcccgagaaacaacgggaagagggcgaagtgaagcagccacaggaagaggactggacgcccccagacccgggcctcctgagctacactgacaagctgtgttcccagaaagacttcgtcaccaaggtggaggccgtcattcatccccaattcctggaagaattgctttccccagatccacagatggatttcttggccctaagccaggagctggagcaggaggaaggactcacccttgcccaggtaccccaggggcaggagggacctggcacacaaggcccacctgattgtctaatcccccccgctggggatgctcggcttcttggggagccactctggagtgggaagatgcaggttcagagggagtaggatggacaggagccagggaggggagtcagcatgcaagctgtggtgaggcccaacgggaggcccggcagagccacaccctctctctttgacataaagcccagctgcctcaggcttccctacctgccgcctaagtgccctggtctccaccaccctgggccccgctcacacctggggcagtgcccgtaagtgccccctttcctcccgcagctagtggagaagcgcctcctacccttgaaggagaaacagcatgcgagggcagcccctagtcgtggcacagcccggttggactcaagttcttctaagtttgcagctggccaaggagcagagagagacgtccctgacccccaacaaggggttggcatggaaacctgcccaccccagacgactgcccgggactctcagggacgaggcagagcacacactggcatggccaggtccaaagactctgttgtgcttttgggatgtcaggattcccctgggctgagggctgcccggccaacctctcctccccaggaccacagacccacctgccctggcgtgggtaccaaggatgccttgga

SEQ ID NO: 161697 - DNA, 2901 bp, Homo sapiens
  Payload ID: 11563
  Gene Symbol: NUTM2D
  Gene Name: NUT family member 2D
  ENST ID: ENST00000620936
  CDS Start-End: 1-2634
atggaagtaaaggggccatcaggtagaagcttttgctgtgagtcagaaggacaatttaaaagttgcctaaagaggcacacgccatctctgctgctgccttccagttggaagggaaactcaggttcttgcctaatggccgaagcccttcacagaatgtcccccacccctaacagctgcccactgcccctccccctctgcagaatgtctggggtcctatgttccaggaacctgtttactttcaaattttcctttcagttggactcaggagcatctggtgagccaggtcactctctgggtcttacccttggcttttctcattgtggaaactgccagacagcggtagtcagtgcccagcctgaggggatggcttcaaatggagcatacccagcgctgggaccgggcgtgaccgcgaaccctggcacctccctgtctgtgttcacggctctgcccttcaccacacccgctcccggcccagcacacgggccgctccttgtgactgcaggggctcctccaggcggccctctggtgctgtctaacttccccagcacacctctggtgacagaacaggatggctgcggcccgagtggggccggggcttccaacgtctttgtccagatgaggacagaggtggggcctgtgaaggccgctcaggcgcagaccttggtcttaactcagacccccctcgtctggcaggctccaggcgccctctgcggaggtgttgtgtgtccacctcccctactcctggcagctgctcctgtggtgcctgttatggctgcccaggtggttgggggcacccaggcctgtgagggaggctggtcccagggccttcctcttccaccaccaccaccaccggctgcccagctgccccccattgtgtcccaagggaatgctgggccatggccacaaggggctcacggagagggcagcctggcttcctcccaggccaaggccccgccagatgactcctgtaaccccaggagtgtctatgagaacttccgactctggcagcactacaagcccctggcccggaggcaccttccccagagtcctgacaccgaagcgctttcgtgcttcctcatcccagttctccgatccctggcccggcggaagcccaccatgaccctggaggagggactgtggcgggccatgcgggaatggcagcacacgagcaactttgaccggatgatcttctacgagatggcggaaaagttcctggagtttgaggctgaggaggagatgcagattcagaaatcgcaatggatgaaggggccccagtgcctgcctcctccagccacaccgaggcttgaacctcgaggacccccggcccctgaggtggtcaagcagccagtgtaccttcccagcaaggccggccccaaggccccgactgcctgcctgccaccacccaggccccagaggccagtgaccaaggcccgccggccaccaccccggccccaccggcgagcagagaccaaggcccgcctgccaccacccaggccccagagaccagcagagaccaaggtccctgaggagatccccccagaagtggtgcaggagtatgtggacatcatggaggagctgctggggccttctctcggggccacgggggagcccgagaaacaacgggaagagggcgaagtgaagcagccacaggaagaggactggacgcccccagacccgggcctcctgagctacactgacaagctgtgttcccagaaagacttcgtcaccaaggtggaggccgtcattcatccccaattcctggaagaattgctttccccagatccacagatggatttcttggccctaagccaggagctggagcaggaggaaggactcacccttgcccagctagtggagaagcgcctcctacccttgaaggagaaacagcatgcgagggcagcccctagtcgtggcacagcccggttggactcaagttcttctaagtttgcagctggccaaggagcagagagagacgtccctgacccccaacaaggggttggcatggaaacctgcccaccccagacgactgcccgggactctcagggacgaggcagagcacacactggcatggccaggtccaaagactctgttgtgcttttgggatgtcaggattcccctgggctgagggctgcccggccaacctctcctccccaggaccacagacccacctgccctggcgtgggtaccaaggatgccttggatctccctggagggtctcctgtcagggagtcacatgggctggctcaggggtcaagtgaggaggaggaactccccagcctggccttcctcttgggttcccagcacaagcttctgccctggtggctaccccagagccctgtccctgcctcgggccttctcagcccagaaaagtggggaccccagggaactcatcagtccccatctgctgagagaagaggcctcaacctagcaccttctcctgccaacaaggccaagaagcgacctctctttggaagcctgtcccctgctgaaaagacaccccacccagggcctgggctcagggtctctggggagcaatccctgacttgggggctgggtggcccctcacagtctcaaaagagaaagggtgaccccttggtctccaggaaggagaagaagcagcgttgtagccagtaggggcttctgagcaggctctctggggccgatccccaaggatggggctctggcatccgatgccccaaagcggtcaaaagcttcttctcccccagtgctgatcttgctgggccttagctttggagggtaggggagggaggggagggagagggtggcctgaatggggagggcaggaagggagggtctggggggaaggggctggggagtgggggtgggaagcagtgtgttgggggcctcgtgtgtaagtgtgaataaatgtagttgtcttgg

SEQ ID NO: 161698 - DNA, 3292 bp, Homo sapiens
  Payload ID: 11564
  Gene Symbol: NUTM2E
  Gene Name: NUT family member 2E
  Uniprot ID: B1AL46
  ENST ID: ENST00000429984
  CDS Start-End: 384-3020
ggatttctggtctcggtgctgtaggtcacatagccactctttcctggattgaggctttccagcaaaggggctgggacgtaaggctggcctgctggtgtggacagagattccagcaacatgcatgacctgggggtacaaggattgcttcctaaacaatgataagcacacagccacctaatagtctggatcggctgagaccatcctgatttcaaacacccagtccccttgccttcctaagaacccctgtgtttctcagactgaaaatgtgttttgaactttgttcacgaagtgaggccgctgttgaaattcgtcaagactgggaaagagccaaagtgggaaggagcatgggttgattggcacaaaagtaggtctgctgataaagaatggaagtaaaggggccatcaggtagaagcttttgctgtgagtcagaaggacaatttaaaagttgcctaaagaggcacacgccatctctgctgctgccttccagttggaagggaaactcaggttcttgcctaatggccgaagcccttcacagaacgtcccccacccctaacagctgcccactgcccctccccctctgcagaatgtctggggtcctatgttccaggaacctgtttactttcaaattttccctgtttcagttggactcaggagcatctggtgagccaggtcactctctgggtcttacccttggcttttcttattgcggaaactgccagacggcggtggtcagtgcccagcctgaggggatggcttcgaatggagcatacccagtgctgggaccgggcgtgaccgcgaaccctggcacctccctgtctgtgttcacggctctgcccttcaccacacccgctcccggcccagcacacgggccgctccttgtgactgcaggggctcctccaggcggccctctggtgctgtctaccttccccagcacacctctggtgacagaacaggatggctgcagcccgagtggggccggggcttccaacgtctttgtccagatgaggacagaggtggggcctgtgaaggccgctcaggcgcagaccttggtcctaactcaggcccccctcgtctggcaggctccaggcgccctctgcggaggtgttgtgtgtccacctcccctactcctggcagctgctcctgtggtgcctgttatggctgcccaggtggttgggggcacccaggcctgtgagggaggctggtcccagggccttcctcttccaccaccaccaccaccggctgcccagctgccccccattgtgtcccaagggaatgctgggccatggccacaaggggctcatggagagagcagcctggcttcctcccaggccaaggccccgccagatgactcctgtaaccccaggagtgtctatgagaacttccgactctggcagcactacaagcccctggcccggaggcaccttccccagagtcctgacaccgaagcgctttcgtgcttcctcatcccagttctccgatcgctggcccggcggaagcccaccatgaccctggaggagggactgtggcgggccatgcgggaatggcagcacacgagcaactttgaccggatgatcttctacgagatggcggaaaagttcctggagtttgaggctgaggaggagatgcagattcagaaatcgcaatggatgaaggggccccagtgcctgcctcctccagccacaccgaggcttgaacctcgaggacccccggcccctgaggtggtcaagcagccagtgtaccttcccagcaaggccggccccaaggcccagactgcctgcctgccaccacccagaccccagaggccagtgaccaaggcccgccggccaccaccccagccccaccggcgagcagagaccaaggcccgcctgccaccacccaggccccagagaccagcagagaccaaggtccctgaggagatccccccagaagtggtgcaggagtatgtggacatcatggaggagctgctggggccttccctcggggccacgggggagcccgagaaacaacgggaagagggcaaagtgaagcagccacaggaagaggactggacgcccccagacccgggcctcctgagctacattgacaagctgtgttcccagaaagacttcgtcaccaaggtggaggccgtcattcatccccaattcctggaagaattgctttccccagatccacagatggatttcttggccctaagccaggacctggagcaggaggaaggactcacccttgcccagctagtggagaagcgcctcccacccttgaaggagaaacagcattcgagggcagcccctagtcgtggcacagcccggttggactcaagttcttctaagtttgcagctggccaaggagcagagagagacgtccctgacccccaagaaggggttggcatggaaacctgcccaccccagacgactgcccgggactctcagggacgaggcagagcacacactggcatggccaggtccgaagactctgttgtgcttttgggatgtcaggattcccctgggctgagggctgcccggccaacctctcctccccaggaccacagacccacctgccctggcgtgggtaccaaggatgccttggatctccctggagggtctcctgtcagggagtcacatgggctggctcaggggtcaagtgaggaggaggaactccccagcctggccttcctcttgggttcccagcacaagcttctgccctggtggctaccccagagccctgtccctgcctcgggccttctcagcccagaaaagtggggaccccagggaactcatcagtccccatctgctgagagaagaggcctcaacctagcaccttctcctgccaacaaggccaagaagcaacctctctttggaagcctgtcccctgctgaaaagacaccccaccgagggcctgggctcagggtctctggggagcaatccctgacttgggggctgggtggcccctcacagtctcaaaagagaaagggtgaccccttggtctccaggaaggagaagaagcagcattgtagccagtaggggcttctgagcaggctctctggggccaatccccaaggatggggctctggcatccgatgccccaaagcggtcaaaagcttcttctcccccagtgctgatcttgctgggccttagctttggagggtaggggagggaggggagggagagggtggctgaatggggagggcaggaagggagggtctggggggaaggggctggggagtgggggtgggaagcagtgtgttgggggcctcgtgtgtaagtgtgaataaatgtagttgtcttggaaaatg

SEQ ID NO: 161699 - DNA, 3623 bp, Homo sapiens
  Payload ID: 11564
  Gene Symbol: NUTM2E
  Gene Name: NUT family member 2E
  ENST ID: ENST00000602967
  CDS Start-End: 384-2360
ggatttctggtctcggtgctgtaggtcacatagccactctttcctggattgaggctttccagcaaaggggctgggacgtaaggctggcctgctggtgtggacagagattccagcaacatgcatgacctgggggtacaaggattgcttcctaaacaatgataagcacacagccacctaatagtctggatcggctgagaccatcctgatttcaaacacccagtccccttgccttcctaagaacccctgtgtttctcagactgaaaatgtgttttgaactttgttcacgaagtgaggccgctgttgaaattcgtcaagactgggaaagagccaaagtgggaaggagcatgggttgattggcacaaaagtaggtctgctgataaagaatggaagtaaaggggccatcaggtagaagcttttgctgtgagtcagaaggacaatttaaaagttgcctaaagaggcacacgccatctctgctgctgccttccagttggaagggaaactcaggttcttgcctaatggccgaagcccttcacagaacgtcccccacccctaacagctgcccactgcccctccccctctgcagaatgtctggggtcctatgttccaggaacctgtttactttcaaattttccctgtttcagttggactcaggagcatctggtgagccaggtcactctctgggtcttacccttggcttttcttattgcggaaactgccagacggcggtggtcagtgcccagcctgaggggatggcttcgaatggagcatacccagtgctgggaccgggcgtgaccgcgaaccctggcacctccctgtctgtgttcacggctctgcccttcaccacacccgctcccggcccagcacacgggccgctccttgtgactgcaggggctcctccaggcggccctctggtgctgtctaccttccccagcacacctctggtgacagaacaggatggctgcagcccgagtggggccggggcttccaacgtctttgtccagatgaggacagaggtggggcctgtgaaggccgctcaggcgcagaccttggtcctaactcaggcccccctcgtctggcaggctccaggcgccctctgcggaggtgttgtgtgtccacctcccctactcctggcagctgctcctgtggtgcctgttatggctgcccaggtggttgggggcacccaggcctgtgagggaggctggtcccagggccttcctcttccaccaccaccaccaccggctgcccagctgccccccattgtgtcccaagggaatgctgggccatggccacaaggggctcatggagagagcagcctggcttcctcccaggccaaggccccgccagatgactcctgtaaccccaggagtgtctatgagaacttccgactctggcagcactacaagcccctggcccggaggcaccttccccagagtcctgacaccgaagcgctttcgtgcttcctcatcccagttctccgatcgctggcccggcggaagcccaccatgaccctggaggagggactgtggcgggccatgcgggaatggcagcacacgagcaactttgaccggatgatcttctacgagatggcggaaaagttcctggagtttgaggctgaggaggagatgcagattcagaaatcgcaatggatgaaggggccccagtgcctgcctcctccagccacaccgaggcttgaacctcgaggacccccggcccctgaggtggtcaagcagccagtgtaccttcccagcaaggccggccccaaggcccagactgcctgcctgccaccacccagaccccagaggccagtgaccaaggcccgccggccaccaccccagccccaccggcgagcagagaccaaggcccgcctgccaccacccaggccccagagaccagcagagaccaaggtccctgaggagatccccccagaagtggtgcaggagtatgtggacatcatggaggagctgctggggccttccctcggggccacgggggagcccgagaaacaacgggaagagggcaaagtgaagcagccacaggaagaggactggacgcccccagacccgggcctcctgagctacattgacaagctgtgttcccagaaagacttcgtcaccaaggtggaggccgtcattcatccccaattcctggaagaattgctttccccagatccacagatggatttcttggccctaagccaggacctggagcaggaggaaggactcacccttgcccaggtaccccaggggcaggagggacctggcacacaaggcccacctgattgtctaatcccccccgctggggatgctcggcttcttggggagccactctggagtgggaagatgcaggttcagagggagtaggatggacaggagccagggaggggagtcagcatgcaagctgtggtgaggcccaacgggaggcccggcagagccacaccctctctctttgacataaagcccagctgcctcaggcttccctacctgccgcctaagtgccctggtctccaccaccctgggccctgctcacacctggggcagtgccagtaagtgccccctttcctcccgcagctagtggagaagcgcctcccacccttgaaggagaaacagcattcgagggcagcccctagtcgtggcacagcccggttggactcaagttcttctaagtttgcagctggccaaggagcagagagagacgtccctgacccccaagaaggggttggcatggaaacctgcccaccccagacgactgcccgggactctcagggacgaggcagagcacacactggcatggccaggtccgaagactctgttgtgcttttgggatgtcaggattcccctgggctgagggctgcccggccaacctctcctccccaggaccacagacccacctgccctggcgtgggtaccaaggatgccttggatctccctggagggtctcctgtcagggagtcacatgggctggctcaggggtcaagtgaggaggaggaactccccagcctggccttcctcttgggttcccagcacaagcttctgccctggtggctaccccagagccctgtccctgcctcgggccttctcagcccagaaaagtggggaccccagggaactcatcagtccccatctgctgagagaagaggcctcaacctagcaccttctcctgccaacaaggccaagaagcaacctctctttggaagcctgtcccctgctgaaaagacaccccaccgagggcctgggctcagggtctctggggagcaatccctgacttgggggctgggtggcccctcacagtctcaaaagagaaagggtgaccccttggtctccaggaaggagaagaagcagcattgtagccagtaggggcttctgagcaggctctctggggccaatccccaaggatggggctctggcatccgatgccccaaagcggtcaaaagcttcttctcccccagtgctgatcttgctgggccttagctttggagggtaggggagggaggggagggagagggtggctgaatggggagggcaggaagggagggtctggggggaaggggctggggagtgggggtgggaagcagtgtgttgggggcctcgtgtgtaagtgtgaataaatgtagttgtcttggaaaa

SEQ ID NO: 161700 - DNA, 2561 bp, Homo sapiens
  Payload ID: 11565
  Gene Symbol: NUTM2F
  Gene Name: NUT family member 2F
  Uniprot ID: A1L443
  ENST ID: ENST00000253262
  CDS Start-End: 22-2292
gtcagtgcccagcctgaggggatggcttcaaatggagcatacccagtgctgggacccggcgtgaccgtgaaccctggcacctccctgtctgtgttcacggctctgccctttgccacacccgctcccggcccagcacacaggccgcccctcgtgactgcagtggttcctccagccggccctctggtgctctctgccttccccagcacccctctagtggcaggacaggatggccgcggcccgagtggggccggggcttccaacgtctttgtccagatgaggacagaagtggggcctgtgaagccccctcaggcacagaccttgatcctaactcaggcccccctcgtctggcaggctccaggcaccctctgtggaggtgtcatgtgtccacctcccctactcctggcagctgctcctggggtgcccgttacctctgcccaggtggttgggggcacccaggcctgtgagggaggctggtcccatggccttcctcttccaccaccaccaccggctgcccaggtggcccccatcgtgtccccagggaacgctaggccatggccacaaggggctcatggagagggcagcctggctccctcccaggccaaggcccggccggacgactcctgtaaacccaagagtgtctatgagaacttccgactctggcagcactacaagcccctggcccggaggcaccttccccagagtcctgacactgaagcgctttcctgcttcctcatcccagttctccgatccctggcccggcggaagcccaccatgacgctggaggagggactgtggcaggccatgcgggaatggcagcacacgagcaactttgaccggatgatcttctacgagatggcggaaaagttcctggaatttgaggctgaggaggagatgcagattcagaaatcgcagtggatgaaggggccccagagcctgcctcctccagccccgccgaggcttgaacctcgaggaccccctgcccctgaggtggtcaagcagccagtgtaccttcccagcaaggatggccccaaggccccgactgcctgcctgccaccacccaggccccagaggccagcggagaccaaggcccacctgccaccacccaggccccagaggccagcggagaccaacgcccacctgccaccacccaggccccagaggccagcggagaccaaggtccctgaggagatcccccctgaagtggtgcaggagtatgtggacatcatggaggagctgctggggtctcaccctggggacacaggggagcctgagggacaacgggaaaagggcaaagtggagcagccgcaggaagaggacgggataacctcagacccgggcctcctgagctacattgacaagctgtgttcccaggaagactttgtcaccaaggtggaggccgtcattcacccccgattcctggaagaattgctttccccagatccacagatggatttcttggccctaagccaggagctggagcaggaggaaggactcacccttgcccagctagtggagaagcgcctcctgtccttgaaggagaaagggtgcgggagggcagcccctcgacatggcacggccaggttggactcaagtccttctgagtttgcagctggccaagaagcagcgagagaggtccctgacccccaacaaagggtcagcgtggaaacctccccaccccagacagctgcccaggaccctcagggacagggcagagtgcgcactggcatggccaggtccgaagaccctgctgtgcttttgggatgtcaggattcccccaggctgaaggctgtccggccaacctctcctccccaggaccacagacccacctgccccggcctggggaccaaggacgccttgggtctccctggagagtctcctgtcaaggagtcacatgggctggctaaggggtcaagtgaggagacggaactccctggcatggtctatgtcgtgggttcccaccacaggctgaggccctggaggctgtcccagagccctgtcccttcctcgggccttctcagcccaggagggagaggaccccagggagctcttcagtctccatctgctcagaaaagaggcctcagcccatcaccttctcctgccagcaagtccaagaagcgacctctctttggaagcccatcccctgctgaaaagacaccgcacccagggcctgggctcagggtctctggggagcaatccctggcttgggggctgggtggcccctcacagtctcaaaagagaaagggtgaccccttggcctccaggaggaagaagaagcggcattgtagccagtaggggccgccatggggcagactctctgatgccagtccccaaaagtggggctctgaagtctcggaccctcatggcacccggtgccccaaagcaaaggctgcttctcctccagtgctgatcttgctgggccttagctttggagggtaggggaaggaggggagggagaaggtggctgaacggggagggcaggaagggagggcctggggggtgggaagcagtgccttgggggccttgtgtgtaaatgtgaataaatgtagttgttttggaaaatg

SEQ ID NO: 161701 - DNA, 2516 bp, Homo sapiens
  Payload ID: 11565
  Gene Symbol: NUTM2F
  Gene Name: NUT family member 2F
  ENST ID: ENST00000341207
  CDS Start-End: 22-2247
gtcagtgcccagcctgaggggatggcttcaaatggagcatacccagtgctgggacccggcgtgaccgtgaaccctggcacctccctgtctgtgttcacggctctgccctttgccacacccgctcccggcccagcacacaggccgcccctcgtgactgcagtggttcctccagccggccctctggtgctctctgccttccccagcacccctctagtggcaggacaggatggccgcggcccgagtggggccggggcttccaacgtctttgtccagatgaggacagaagtggggcctgtgaagccccctcaggcacagaccttgatcctaactcaggcccccctcgtctggcaggctccaggcaccctctgtggaggtgtcatgtgtccacctcccctactcctggcagctgctcctggggtgcccgttacctctgcccaggtggttgggggcacccaggcctgtgagggaggctggtcccatggccttcctcttccaccaccaccaccggctgcccaggtggcccccatcgtgtccccagggaacgctaggccatggccacaaggggctcatggagagggcagcctggctccctcccaggccaaggcccggccggacgactcctgtaaacccaagagtgtctatgagaacttccgactctggcagcactacaagcccctggcccggaggcaccttccccagagtcctgacactgaagcgctttcctgcttcctcatcccagttctccgatccctggcccggcggaagcccaccatgacgctggaggagggactgtggcaggccatgcgggaatggcagcacacgagcaactttgaccggatgatcttctacgagatggcggaaaagttcctggaatttgaggctgaggaggagatgcagattcagaaatcgcagtggatgaaggggccccagagcctgcctcctccagccccgccgaggcttgaacctcgaggaccccctgcccctgaggtggtcaagcagccagtgtaccttcccagcaaggatggccccaaggccccgactgcctgcctgccaccacccaggccccagaggccagcggagaccaaggcccacctgccaccacccaggccccagaggccagcggagaccaaggtccctgaggagatcccccctgaagtggtgcaggagtatgtggacatcatggaggagctgctggggtctcaccctggggacacaggggagcctgagggacaacgggaaaagggcaaagtggagcagccgcaggaagaggacgggataacctcagacccgggcctcctgagctacattgacaagctgtgttcccaggaagactttgtcaccaaggtggaggccgtcattcacccccgattcctggaagaattgctttccccagatccacagatggatttcttggccctaagccaggagctggagcaggaggaaggactcacccttgcccagctagtggagaagcgcctcctgtccttgaaggagaaagggtgcgggagggcagcccctcgacatggcacggccaggttggactcaagtccttctgagtttgcagctggccaagaagcagcgagagaggtccctgacccccaacaaagggtcagcgtggaaacctccccaccccagacagctgcccaggaccctcagggacagggcagagtgcgcactggcatggccaggtccgaagaccctgctgtgcttttgggatgtcaggattcccccaggctgaaggctgtccggccaacctctcctccccaggaccacagacccacctgccccggcctggggaccaaggacgccttgggtctccctggagagtctcctgtcaaggagtcacatgggctggctaaggggtcaagtgaggagacggaactccctggcatggtctatgtcgtgggttcccaccacaggctgaggccctggaggctgtcccagagccctgtcccttcctcgggccttctcagcccaggagggagaggaccccagggagctcttcagtctccatctgctcagaaaagaggcctcagcccatcaccttctcctgccagcaagtccaagaagcgacctctctttggaagcccatcccctgctgaaaagacaccgcacccagggcctgggctcagggtctctggggagcaatccctggcttgggggctgggtggcccctcacagtctcaaaagagaaagggtgaccccttggcctccaggaggaagaagaagcggcattgtagccagtaggggccgccatggggcagactctctgatgccagtccccaaaagtggggctctgaagtctcggaccctcatggcacccggtgccccaaagcaaaggctgcttctcctccagtgctgatcttgctgggccttagctttggagggtaggggaaggaggggagggagaaggtggctgaacggggagggcaggaagggagggcctggggggtgggaagcagtgccttgggggccttgtgtgtaaatgtgaataaatgtagttgttttggaaaatg

SEQ ID NO: 161702 - DNA, 2851 bp, Homo sapiens
  Payload ID: 11566
  Gene Symbol: NUTM2G
  Gene Name: NUT family member 2G
  Uniprot ID: Q5VZR2
  ENST ID: ENST00000354649
  CDS Start-End: 716-2194
cttcctaagaaaggggacgggaagtaaggctggcctactggtgtggacagattccagcaacatacatgacctgggggcacaaggactgcttcctaaacaatgatgagcacacagccacctaatagcctggatcagctgaggccattctgatttcaaacactcagtccccttgccttcctaagaacccctgtgtttctcagactgaaaacgtgttctgaattttgttaagtaagtgtggcccctgttgaaattcatcaagagtgggaaagagccaaagtgggaaggagcatgggttgattggcacaaaagtaggtctgttgataaagaatggaagtaaaggggacatcaggtagaagcttttgctgtgagtcagaaggacaatttaaaagttgcctaaagaggcgcacactgtctgtgttgctgccatccagttggatggcaaccaactgaaccaagggaacctcaggttcttgcctactggccagagcccttcacagaatgtcccccacccccgccaagcccggctgcccactgcccctccccctctgcagaatgtctggggtcctgtgttccaaacctgtttatatgcaaattatccctgctccacttggactcaggaggatctgctgagtcaggtcactctctgggtcctgcccttgacttttttcattgcggaagctgccagacagtggtggtcagtgcccagcctgaggggatggcttcaaatggagcatacccagtgctgggacccggcgtgaccgtgaaccctggcacctccctgtctgtgttcacggctctgccctttgccacaccctctcccggcccaacacacaggccgcccctcgtgactgcagtggttcctccagccggccctctggtgctctctgccttccccagcacccctctagtggcaggacaggatggccgcggcccaagtggggctggggcttccaacgtctttgtccagatgaggacagaagtggggcctgtgaagccccctcaggcacagaccttgatcctaactcaggcccccctcgtctggcaggctccaggcaccctctgtggaggtgtcatgtgtccacctcccctactcctggcagctgctcctggggtgcccgttacctctgcccaggtggttgggggcacccaggcctgtgagggaggctggtcccatggccttcctcttccaccaccaccaccggctgcccaggtggcccccatcgtgtccccagggaacgctgggccatggccacaaggggctcatggagagggcagcctggctccctcccaggccaaggcccggccggacgactcctgtaaacccaagagtgtctatgagaacttccgactctggcagcactacaagcccctggcccggaggcaccttccccagagtcctgacactgaagcgctttcctgcttcctcatcccagttctccgatccctggcccggcggaagcccaccatgacgctggaggagggactgtggcgggccatgcgggaatggcagcacacgagcaactttgaccggatgattttctacgagatggcggcaaagttcctggagtttgaggctgaggaggagatgcagattcagaaatcgcagtggatgaaggggccccagagcctgcctcctccagccccgccgaggcttgaacctcgaggaccccctgcccctgaggtggtcaagcagccagtgtaccttcccagcaaggatggccccaaggccccgactgcctgcctgccaccacccaggccccagaggccagcggagaccaaggcccacctgccaccacccaggcccccgaggccagcagagaccaaggtccctgaggagatcccccctgaagtggtgcaggagtatgtggacatcatggaggagctgctggggtctcaccctggggacacaggggagcctgagggacaacgggaaaagggcaaagtggagcagccgcaggaagaggacgggatgacctcagacccgggcctcctgagctacattgacaagctgtgttcccaggaagactttgtcaccaaggtggaggccgtcattcacccccgattcctggaagaattgctttccccagatccacagatggatttcttggccctaagccaggagctggagcaggaggaaggactcacccttgcccagggggccccttcagatgctctggggactgacagatgctgaggaagccctgatccctcccaccatccactcacaaggccccgcctgctttagggaggcttctcggggcctcccatcattatcagtatccctggaaaatcctgggatggagagagctggctggctttttttctgctcggtgggagctgaggagaaggcagctgcctgcaacatggacatggggagaggcggctgctcctgcttaaccctcatcaggaagagcacgggcactgggctgaggggagacgttgaggtgaccgtccacatgggtgtgtttgggatatgatgaggggcgcagagcaggggcctgtttctgggcaggagagagtcttgtccaactggctgaagcagatgctccttgctgtggccacatggaatggcctcaggggccctcagggtcttgcatggagctcccccaacagctatgattcccttcccatatgatgactgaactcgtgtggaattgatgtagacacagatttacattggcatctaaaacagttccctcccaacacaccatcaccaacgggaacaagcatgaccagcctgccaggcgcaaggtgggtgtgtctgctggtcccagggccaggagaagctggggcccaggccgagaggggccgagggtcagtcgcccttctgccaggcacagaccccaagggc

SEQ ID NO: 161703 - DNA, 2516 bp, Homo sapiens
  Payload ID: 11566
  Gene Symbol: NUTM2G
  Gene Name: NUT family member 2G
  Uniprot ID: Q5VZR2
  ENST ID: ENST00000372322
  CDS Start-End: 22-2247
gtcagtgcccagcctgaggggatggcttcaaatggagcatacccagtgctgggacccggcgtgaccgtgaaccctggcacctccctgtctgtgttcacggctctgccctttgccacaccctctcccggcccaacacacaggccgcccctcgtgactgcagtggttcctccagccggccctctggtgctctctgccttccccagcacccctctagtggcaggacaggatggccgcggcccaagtggggctggggcttccaacgtctttgtccagatgaggacagaagtggggcctgtgaagccccctcaggcacagaccttgatcctaactcaggcccccctcgtctggcaggctccaggcaccctctgtggaggtgtcatgtgtccacctcccctactcctggcagctgctcctggggtgcccgttacctctgcccaggtggttgggggcacccaggcctgtgagggaggctggtcccatggccttcctcttccaccaccaccaccggctgcccaggtggcccccatcgtgtccccagggaacgctgggccatggccacaaggggctcatggagagggcagcctggctccctcccaggccaaggcccggccggacgactcctgtaaacccaagagtgtctatgagaacttccgactctggcagcactacaagcccctggcccggaggcaccttccccagagtcctgacactgaagcgctttcctgcttcctcatcccagttctccgatccctggcccggcggaagcccaccatgacgctggaggagggactgtggcgggccatgcgggaatggcagcacacgagcaactttgaccggatgattttctacgagatggcggcaaagttcctggagtttgaggctgaggaggagatgcagattcagaaatcgcagtggatgaaggggccccagagcctgcctcctccagccccgccgaggcttgaacctcgaggaccccctgcccctgaggtggtcaagcagccagtgtaccttcccagcaaggatggccccaaggccccgactgcctgcctgccaccacccaggccccagaggccagcggagaccaaggcccacctgccaccacccaggcccccgaggccagcagagaccaaggtccctgaggagatcccccctgaagtggtgcaggagtatgtggacatcatggaggagctgctggggtctcaccctggggacacaggggagcctgagggacaacgggaaaagggcaaagtggagcagccgcaggaagaggacgggatgacctcagacccgggcctcctgagctacattgacaagctgtgttcccaggaagactttgtcaccaaggtggaggccgtcattcacccccgattcctggaagaattgctttccccagatccacagatggatttcttggccctaagccaggagctggagcaggaggaaggactcacccttgcccagctagtggagaagcgcctcctgtccttgaaggagaaagggtgcgggagggcagcccctcgacatggcacggccaggttggactcaagtccttctgagtttgcagctggccaagaagcagcgagagaggtccctgacccccaacaaagggtcagcgtggaaacctccccaccccagacggctgcccaggaccctcagggacagggcagagtgcgcactggcatggccaggtccgaagaccctgctgtgcttttgggatgtcaggactcccccaggctgaaggctgtccggccaacctctcctccccaggaccacagacccacctgccccggcctggggaccaaggacgccttgggtctccctggagagtctcctgtcaaggagtcacatgggctggctaaggggtcaagtgaggagacggaactccctggcatggtctatgtcgtgggttcccaccacaggctgaggccctggaggctgtcccagagccctgtcccttcctcgggccttctcagcccaggagggagaggaccccagggagctcttcaatctccatctgctcagaaaagaggcctcagcccatcaccttctcctgccagcaagtccaagaagcgacctctctttggaagcccatcccctgctgaaaagacaccgcacccagggcctgggctcagggtctctggggagcaatccctggcttgggggctgggtggcccctcacagtctcaaaagagaaagggtgaccccttggcctccaggaggaagaagaagcggcattgtagccagtaggggccgccatggggcagactctctgatgccagtccccaaaagtggggctctgaagtctcggaccctcatggcacccggtgccccaaagcaaaggctgcttctcctccagtgctgatcttgctgggccttagctttggagggtaggggaaggaggggagggagaaggtggctgaacggggagggcaggaagggagggcctggggggtgggaagcagtgccttgggggccttgtgtgtaaatgtgaataaatgtagttgttttggaaaatg

SEQ ID NO: 161704 - DNA, 3795 bp, Homo sapiens
  Payload ID: 11567
  Gene Symbol: NUTM1
  Gene Name: NUT midline carcinoma, family member 1
  Uniprot ID: Q86Y26
  ENST ID: ENST00000333756
  CDS Start-End: 156-3554
gagttccgtattctagttctgtgtgatctgatctttaccttcccttccttggatccctgtgcacctactggagccaggttactctgggtcctggacctgactgcctcattctggaggcttccagacagccacagttagtgcccaaacctgagaggatggcttcagatggagcatctgcattgccgggaccggatatgagcatgaaacctagtgccgccccgtctccatcccctgcacttccctttctcccaccaacttctgacccaccagaccacccacccagggagccacctccacagcccatcatgccttcagtattctctccagacaaccctctgatgctctctgctttccccagctcactgttggtgacaggggatgggggcccttgcctcagtggggctggggctggcaaggtcattgtcaaagtcaagacagaaggggggtcagctgagccctctcaaactcagaactttatccttactcagactgccctcaattcgactgccccgggcactccctgtggaggccttgagggtcctgcacctccatttgtgacagcatctaatgtgaagaccattctgccctctaaggctgttggtgtcagccaggagggtcctccaggccttccgcctcagcctccaccaccagttgctcaactggtccccattgtgcccctggaaaaagcttggccagggccacatgggacaaccggggaaggaggtcctgtggccactctatccaagccttccctaggtgaccgctccaaaatttccaaggacgtttatgagaacttccgtcagtggcagcgttacaaagccttggcccggaggcacctatcccagagtcctgacacagaagctctttcctgttttcttatcccagtgcttcgttccctggcccggctgaagcccactatgaccctggaggagggactgccattggctgtgcaggagtgggagcacaccagcaactttgaccggatgatcttttatgagatggcagaaaggttcatggagtttgaggctgaggagatgcagattcagaacacacagctgatgaatgggtctcagggcctgtctcctgcaacccctttgaaacttgatcctctagggcccctggcctctgaggtttgccagcagccagtgtacattccgaagaaggcagcctccaagacacgggccccccgccggcgtcagcgtaaagcccagagacctcctgctcctgaggcacccaaggagatcccaccagaagctgtgaaggagtatgttgacatcatggaatggctggtggggactcacttggccactggggagtcagatggaaaacaagaggaagaagggcagcagcaggaggaggaagggatgtatccagatccaggtctcctgagctacatcaatgagctgtgttctcagaaggtctttgtctccaaggtggaggctgtcattcaccctcaatttctggcagatctgctgtccccagaaaaacagagagatcccttggccttaattgaggagctagagcaagaagaaggactcactcttgcccagctggtccagaagcgactcatggccttggaagaggaggaagatgcagaggcgcctccaagtttcagtggcgctcagttggactcaagtccttctggttctgttgaggatgaagatggggatgggcggcttcggccctcacctgggcttcagggggctgggggcgccgcttgccttggaaaggtttcttcttcaggaaaacgggcaagagaagtgcatggtgggcaggagcaagccctagatagccccagagggatgcacagggatgggaacactctgccatcccccagcagctgggacctgcagccagaacttgcagctccacagggaactccgggacccttgggtgtggagaggagagggtctgggaaggttataaaccaggtatctctacatcaggatggccatctaggaggcgctgggcctcctgggcactgcctggtggctgataggacttcagaggctctgcccctttgttggcagggaggcttccagcctgagagcactcccagtttggatgctggacttgcagagctggctcctctgcaaggacaagggttagaaaagcaagtcctgggattgcagaaaggacaacaaacagggggtcgtggagtgcttcctcaagggaaggagcctttagcagtgccctgggaaggctcttcaggagccatgtggggagatgacagaggtacccccatggctcagagttatgatcagaatccttcccctagagcagctggggagagggacgatgtctgtctcagcccaggagtttggctgagcagtgagatggatgctgtaggcttggagctgcctgtacaaatagaggaggtcatagagagcttccaagttgagaagtgtgtaactgagtatcaggaaggctgccagggactgggctccaggggcaacatttccctgggtcctggagaaaccctagtacctggggatacggagagcagtgtgattccctgtggaggcacagttgcggcagctgccctagaaaagagaaactattgcagcttgccaggacctttgagggccaacagcccacccttgaggtccaaagaaaatcaagaacagagctgtgaaaccgtagggcatcccagtgatctgtgggcagaaggttgcttcccattgctagaaagtggtgattccacactggggtcttccaaagaaacccttccacccacatgccaaggcaatctccttatcatggggactgaggatgcctcctccttgcctgaagccagtcaagaggcagggagcagaggcaattccttttctcctctgttggaaaccatagaacctgtcaacatactagatgttaaagatgactgtggcctccaactaagggtcagcgaggacacctgcccactgaatgttcattcttatgacccccaaggagaaggcagggtggatcctgatctgtccaagcctaaaaaccttgctcctttacaagagagtcaggagtcttacacaactgggactcccaaagcaacatcttctcaccagggccttggaagcactttgcctagaaggggaaccaggaatgccatagttccgagagaaacttctgttagtaaaacacacaggtcagcagacagggccaaaggaaaggagaaaaagaaaaaggaagcagaggaagaggatgaggaactctccaactttgcttacctcttggcctctaaacttagcctctcaccaagggagcatcccctcagtcctcaccatgcctcaggaggtcagggcagccagagagcatcccacctgctccctgctggagcaaaaggccccagcaaacttccatatcctgttgccaagtctgggaagcgagctctagctggaggtccagcccctactgaaaagacaccccactcaggagctcaacttggggtccccagggagaaacccctagctctgggagtagttcgaccctcacagcctcgtaaaaggcggtgtgacagttttgtcacgggcagaaggaagaaacgacgtcgtagccagtagggagcagcgggaccatctgaccccacttgccagtccctaaaggtgggtgccccagagtagattccacccctgctgcccaccaatggagaatcccaatgttgaatctcatcccaatgttgttttgttgttctgcaaaagtggcaagcatggagagagaggtcagactggctaggctgcagggggaattacctttggaaggagctatatagaaaaaaaatgaataaagtgttttgttggaaaa

SEQ ID NO: 161705 - DNA, 3922 bp, Homo sapiens
  Payload ID: 11567
  Gene Symbol: NUTM1
  Gene Name: NUT midline carcinoma, family member 1
  Uniprot ID: Q86Y26
  ENST ID: ENST00000438749
  CDS Start-End: 224-3676
acccatttcaggagcagtgagttttcaatgcctgaagaaacaagggctccaggattcagagcccctttaccctagggaagaaagaagaggttttcttccctcccctcttttacatccagttcccctgctccatttcaaagcgttggcggtaaagaatgcatgttgagtatcaatattccgtaaagcgaaagagcgtaaagttattttatgaaactggtgaagcatgtttcagcggtcgaaccaagatttaaagttaggtccctaccgcaaattcagcgctctttcttatggtgcatctgcattgccgggaccggatatgagcatgaaacctagtgccgccccgtctccatcccctgcacttccctttctcccaccaacttctgacccaccagaccacccacccagggagccacctccacagcccatcatgccttcagtattctctccagacaaccctctgatgctctctgctttccccagctcactgttggtgacaggggatgggggcccttgcctcagtggggctggggctggcaaggtcattgtcaaagtcaagacagaaggggggtcagctgagccctctcaaactcagaactttatccttactcagactgccctcaattcgactgccccgggcactccctgtggaggccttgagggtcctgcacctccatttgtgacagcatctaatgtgaagaccattctgccctctaaggctgttggtgtcagccaggagggtcctccaggccttccgcctcagcctccaccaccagttgctcaactggtccccattgtgcccctggaaaaagcttggccagggccacatgggacaaccggggaaggaggtcctgtggccactctatccaagccttccctaggtgaccgctccaaaatttccaaggacgtttatgagaacttccgtcagtggcagcgttacaaagccttggcccggaggcacctatcccagagtcctgacacagaagctctttcctgttttcttatcccagtgcttcgttccctggcccggctgaagcccactatgaccctggaggagggactgccattggctgtgcaggagtgggagcacaccagcaactttgaccggatgatcttttatgagatggcagaaaggttcatggagtttgaggctgaggagatgcagattcagaacacacagctgatgaatgggtctcagggcctgtctcctgcaacccctttgaaacttgatcctctagggcccctggcctctgaggtttgccagcagccagtgtacattccgaagaaggcagcctccaagacacgggccccccgccggcgtcagcgtaaagcccagagacctcctgctcctgaggcacccaaggagatcccaccagaagctgtgaaggagtatgttgacatcatggaatggctggtggggactcacttggccactggggagtcagatggaaaacaagaggaagaagggcagcagcaggaggaggaagggatgtatccagatccaggtctcctgagctacatcaatgagctgtgttctcagaaggtctttgtctccaaggtggaggctgtcattcaccctcaatttctggcagatctgctgtccccagaaaaacagagagatcccttggccttaattgaggagctagagcaagaagaaggactcactcttgcccagctggtccagaagcgactcatggccttggaagaggaggaagatgcagaggcgcctccaagtttcagtggcgctcagttggactcaagtccttctggttctgttgaggatgaagatggggatgggcggcttcggccctcacctgggcttcagggggctgggggcgccgcttgccttggaaaggtttcttcttcaggaaaacgggcaagagaagtgcatggtgggcaggagcaagccctagatagccccagagggatgcacagggatgggaacactctgccatcccccagcagctgggacctgcagccagaacttgcagctccacagggaactccgggacccttgggtgtggagaggagagggtctgggaaggttataaaccaggtatctctacatcaggatggccatctaggaggcgctgggcctcctgggcactgcctggtggctgataggacttcagaggctctgcccctttgttggcagggaggcttccagcctgagagcactcccagtttggatgctggacttgcagagctggctcctctgcaaggacaagggttagaaaagcaagtcctgggattgcagaaaggacaacaaacagggggtcgtggagtgcttcctcaagggaaggagcctttagcagtgccctgggaaggctcttcaggagccatgtggggagatgacagaggtacccccatggctcagagttatgatcagaatccttcccctagagcagctggggagagggacgatgtctgtctcagcccaggagtttggctgagcagtgagatggatgctgtaggcttggagctgcctgtacaaatagaggaggtcatagagagcttccaagttgagaagtgtgtaactgagtatcaggaaggctgccagggactgggctccaggggcaacatttccctgggtcctggagaaaccctagtacctggggatacggagagcagtgtgattccctgtggaggcacagttgcggcagctgccctagaaaagagaaactattgcagcttgccaggacctttgagggccaacagcccacccttgaggtccaaagaaaatcaagaacagagctgtgaaaccgtagggcatcccagtgatctgtgggcagaaggttgcttcccattgctagaaagtggtgattccacactggggtcttccaaagaaacccttccacccacatgccaaggcaatctccttatcatggggactgaggatgcctcctccttgcctgaagccagtcaagaggcagggagcagaggcaattccttttctcctctgttggaaaccatagaacctgtcaacatactagatgttaaagatgactgtggcctccaactaagggtcagcgaggacacctgcccactgaatgttcattcttatgacccccaaggagaaggcagggtggatcctgatctgtccaagcctaaaaaccttgctcctttacaagagagtcaggagtcttacacaactgggactcccaaagcaacatcttctcaccagggccttggaagcactttgcctagaaggggaaccaggaatgccatagttccgagagaaacttctgttagtaaaacacacaggtcagcagacagggccaaaggaaaggagaaaaagaaaaaggaagcagaggaagaggatgaggaactctccaactttgcttacctcttggcctctaaacttagcctctcaccaagggagcatcccctcagtcctcaccatgcctcaggaggtcagggcagccagagagcatcccacctgctccctgctggagcaaaaggccccagcaaacttccatatcctgttgccaagtctgggaagcgagctctagctggaggtccagcccctactgaaaagacaccccactcaggagctcaacttggggtccccagggagaaacccctagctctgggagtagttcgaccctcacagcctcgtaaaaggcggtgtgacagttttgtcacgggcagaaggaagaaacgacgtcgtagccagtagggagcagcgggaccatctgaccccacttgccagtccctaaaggtgggtgccccagagtagattccacccctgctgcccaccaatggagaatcccaatgttgaatctcatcccaatgttgttttgttgttctgcaaaagtggcaagcatggagagagaggtcagactggctaggctgcagggggaattacctttggaaggagctatatagaaaaaaaatgaataaagtgttttgttggaaaatgctc

SEQ ID NO: 161706 - DNA, 4102 bp, Homo sapiens
  Payload ID: 11567
  Gene Symbol: NUTM1
  Gene Name: NUT midline carcinoma, family member 1
  Uniprot ID: Q86Y26
  ENST ID: ENST00000537011
  CDS Start-End: 383-3865
ctactgtgtgctaggtacacggcgttagaggggggtagggatggatgtggatagaatattgacgtatagaagcctgtctttgtctcaagatacacacccatttcaggagcagtgagttttcaatgcctgaagaaacaagggctccaggattcagagcccctttaccctagggaagaaagaagaggttttcttccctcccctcttttacatccagttcccctgctccatttcaaagcgttggcggtaaagaatgcatgttgagtatcaatattccgtaaagcgaaagagcgtaaagttattttatgaaactggtgaagcatgtttcagcggtcgaaccaagatttaaagttaggtccctaccgcaaattcagcgctctttcttatggtggttactctgggtcctggacctgactgcctcattctggaggcttccagacagccacagttagtgcccaaacctgagaggatggcttcagatggagcatctgcattgccgggaccggatatgagcatgaaacctagtgccgccccgtctccatcccctgcacttccctttctcccaccaacttctgacccaccagaccacccacccagggagccacctccacagcccatcatgccttcagtattctctccagacaaccctctgatgctctctgctttccccagctcactgttggtgacaggggatgggggcccttgcctcagtggggctggggctggcaaggtcattgtcaaagtcaagacagaaggggggtcagctgagccctctcaaactcagaactttatccttactcagactgccctcaattcgactgccccgggcactccctgtggaggccttgagggtcctgcacctccatttgtgacagcatctaatgtgaagaccattctgccctctaaggctgttggtgtcagccaggagggtcctccaggccttccgcctcagcctccaccaccagttgctcaactggtccccattgtgcccctggaaaaagcttggccagggccacatgggacaaccggggaaggaggtcctgtggccactctatccaagccttccctaggtgaccgctccaaaatttccaaggacgtttatgagaacttccgtcagtggcagcgttacaaagccttggcccggaggcacctatcccagagtcctgacacagaagctctttcctgttttcttatcccagtgcttcgttccctggcccggctgaagcccactatgaccctggaggagggactgccattggctgtgcaggagtgggagcacaccagcaactttgaccggatgatcttttatgagatggcagaaaggttcatggagtttgaggctgaggagatgcagattcagaacacacagctgatgaatgggtctcagggcctgtctcctgcaacccctttgaaacttgatcctctagggcccctggcctctgaggtttgccagcagccagtgtacattccgaagaaggcagcctccaagacacgggccccccgccggcgtcagcgtaaagcccagagacctcctgctcctgaggcacccaaggagatcccaccagaagctgtgaaggagtatgttgacatcatggaatggctggtggggactcacttggccactggggagtcagatggaaaacaagaggaagaagggcagcagcaggaggaggaagggatgtatccagatccaggtctcctgagctacatcaatgagctgtgttctcagaaggtctttgtctccaaggtggaggctgtcattcaccctcaatttctggcagatctgctgtccccagaaaaacagagagatcccttggccttaattgaggagctagagcaagaagaaggactcactcttgcccagctggtccagaagcgactcatggccttggaagaggaggaagatgcagaggcgcctccaagtttcagtggcgctcagttggactcaagtccttctggttctgttgaggatgaagatggggatgggcggcttcggccctcacctgggcttcagggggctgggggcgccgcttgccttggaaaggtttcttcttcaggaaaacgggcaagagaagtgcatggtgggcaggagcaagccctagatagccccagagggatgcacagggatgggaacactctgccatcccccagcagctgggacctgcagccagaacttgcagctccacagggaactccgggacccttgggtgtggagaggagagggtctgggaaggttataaaccaggtatctctacatcaggatggccatctaggaggcgctgggcctcctgggcactgcctggtggctgataggacttcagaggctctgcccctttgttggcagggaggcttccagcctgagagcactcccagtttggatgctggacttgcagagctggctcctctgcaaggacaagggttagaaaagcaagtcctgggattgcagaaaggacaacaaacagggggtcgtggagtgcttcctcaagggaaggagcctttagcagtgccctgggaaggctcttcaggagccatgtggggagatgacagaggtacccccatggctcagagttatgatcagaatccttcccctagagcagctggggagagggacgatgtctgtctcagcccaggagtttggctgagcagtgagatggatgctgtaggcttggagctgcctgtacaaatagaggaggtcatagagagcttccaagttgagaagtgtgtaactgagtatcaggaaggctgccagggactgggctccaggggcaacatttccctgggtcctggagaaaccctagtacctggggatacggagagcagtgtgattccctgtggaggcacagttgcggcagctgccctagaaaagagaaactattgcagcttgccaggacctttgagggccaacagcccacccttgaggtccaaagaaaatcaagaacagagctgtgaaaccgtagggcatcccagtgatctgtgggcagaaggttgcttcccattgctagaaagtggtgattccacactggggtcttccaaagaaacccttccacccacatgccaaggcaatctccttatcatggggactgaggatgcctcctccttgcctgaagccagtcaagaggcagggagcagaggcaattccttttctcctctgttggaaaccatagaacctgtcaacatactagatgttaaagatgactgtggcctccaactaagggtcagcgaggacacctgcccactgaatgttcattcttatgacccccaaggagaaggcagggtggatcctgatctgtccaagcctaaaaaccttgctcctttacaagagagtcaggagtcttacacaactgggactcccaaagcaacatcttctcaccagggccttggaagcactttgcctagaaggggaaccaggaatgccatagttccgagagaaacttctgttagtaaaacacacaggtcagcagacagggccaaaggaaaggagaaaaagaaaaaggaagcagaggaagaggatgaggaactctccaactttgcttacctcttggcctctaaacttagcctctcaccaagggagcatcccctcagtcctcaccatgcctcaggaggtcagggcagccagagagcatcccacctgctccctgctggagcaaaaggccccagcaaacttccatatcctgttgccaagtctgggaagcgagctctagctggaggtccagcccctactgaaaagacaccccactcaggagctcaacttggggtccccagggagaaacccctagctctgggagtagttcgaccctcacagcctcgtaaaaggcggtgtgacagttttgtcacgggcagaaggaagaaacgacgtcgtagccagtagggagcagcgggaccatctgaccccacttgccagtccctaaaggtgggtgccccagagtagattccacccctgctgcccaccaatggagaatcccaatgttgaatctcatcccaatgttgttttgttgttctgcaaaagtggcaagcatggagagagaggtcagactggctaggctgcagggggaattacctttggaaggagctatatagaaaaaaaatgaataaagtgttttgttgg

SEQ ID NO: 161707 - DNA, 4196 bp, Homo sapiens
  Payload ID: 11567
  Gene Symbol: NUTM1
  Gene Name: NUT midline carcinoma, family member 1
  Uniprot ID: Q86Y26
  ENST ID: ENST00000614490
  CDS Start-End: 552-3950
ctactgtgtgctaggtacacggcgttagaggggggtagggatggatgtggatagaatattgacgtatagaagcctgtctttgtctcaagatacacacccatttcaggagcagtgagttttcaatgcctgaagaaacaagggctccaggattcagagcccctttaccctagggaagaaagaagaggttttcttccctcccctcttttacatccagttcccctgctccatttcaaagcgttggcggtaaagaatgcatgttgagtatcaatattccgtaaagcgaaagagcgtaaagttattttatgaaactggtgaagcatgtttcagcggtcgaaccaagatttaaagttaggtccctaccgcaaattcagcgctctttcttatggtgaatgccttgagttccgtattctagttctgtgtgatctgatctttaccttcccttccttggatccctgtgcacctactggagccaggttactctgggtcctggacctgactgcctcattctggaggcttccagacagccacagttagtgcccaaacctgagaggatggcttcagatggagcatctgcattgccgggaccggatatgagcatgaaacctagtgccgccccgtctccatcccctgcacttccctttctcccaccaacttctgacccaccagaccacccacccagggagccacctccacagcccatcatgccttcagtattctctccagacaaccctctgatgctctctgctttccccagctcactgttggtgacaggggatgggggcccttgcctcagtggggctggggctggcaaggtcattgtcaaagtcaagacagaaggggggtcagctgagccctctcaaactcagaactttatccttactcagactgccctcaattcgactgccccgggcactccctgtggaggccttgagggtcctgcacctccatttgtgacagcatctaatgtgaagaccattctgccctctaaggctgttggtgtcagccaggagggtcctccaggccttccgcctcagcctccaccaccagttgctcaactggtccccattgtgcccctggaaaaagcttggccagggccacatgggacaaccggggaaggaggtcctgtggccactctatccaagccttccctaggtgaccgctccaaaatttccaaggacgtttatgagaacttccgtcagtggcagcgttacaaagccttggcccggaggcacctatcccagagtcctgacacagaagctctttcctgttttcttatcccagtgcttcgttccctggcccggctgaagcccactatgaccctggaggagggactgccattggctgtgcaggagtgggagcacaccagcaactttgaccggatgatcttttatgagatggcagaaaggttcatggagtttgaggctgaggagatgcagattcagaacacacagctgatgaatgggtctcagggcctgtctcctgcaacccctttgaaacttgatcctctagggcccctggcctctgaggtttgccagcagccagtgtacattccgaagaaggcagcctccaagacacgggccccccgccggcgtcagcgtaaagcccagagacctcctgctcctgaggcacccaaggagatcccaccagaagctgtgaaggagtatgttgacatcatggaatggctggtggggactcacttggccactggggagtcagatggaaaacaagaggaagaagggcagcagcaggaggaggaagggatgtatccagatccaggtctcctgagctacatcaatgagctgtgttctcagaaggtctttgtctccaaggtggaggctgtcattcaccctcaatttctggcagatctgctgtccccagaaaaacagagagatcccttggccttaattgaggagctagagcaagaagaaggactcactcttgcccagctggtccagaagcgactcatggccttggaagaggaggaagatgcagaggcgcctccaagtttcagtggcgctcagttggactcaagtccttctggttctgttgaggatgaagatggggatgggcggcttcggccctcacctgggcttcagggggctgggggcgccgcttgccttggaaaggtttcttcttcaggaaaacgggcaagagaagtgcatggtgggcaggagcaagccctagatagccccagagggatgcacagggatgggaacactctgccatcccccagcagctgggacctgcagccagaacttgcagctccacagggaactccgggacccttgggtgtggagaggagagggtctgggaaggttataaaccaggtatctctacatcaggatggccatctaggaggcgctgggcctcctgggcactgcctggtggctgataggacttcagaggctctgcccctttgttggcagggaggcttccagcctgagagcactcccagtttggatgctggacttgcagagctggctcctctgcaaggacaagggttagaaaagcaagtcctgggattgcagaaaggacaacaaacagggggtcgtggagtgcttcctcaagggaaggagcctttagcagtgccctgggaaggctcttcaggagccatgtggggagatgacagaggtacccccatggctcagagttatgatcagaatccttcccctagagcagctggggagagggacgatgtctgtctcagcccaggagtttggctgagcagtgagatggatgctgtaggcttggagctgcctgtacaaatagaggaggtcatagagagcttccaagttgagaagtgtgtaactgagtatcaggaaggctgccagggactgggctccaggggcaacatttccctgggtcctggagaaaccctagtacctggggatacggagagcagtgtgattccctgtggaggcacagttgcggcagctgccctagaaaagagaaactattgcagcttgccaggacctttgagggccaacagcccacccttgaggtccaaagaaaatcaagaacagagctgtgaaaccgtagggcatcccagtgatctgtgggcagaaggttgcttcccattgctagaaagtggtgattccacactggggtcttccaaagaaacccttccacccacatgccaaggcaatctccttatcatggggactgaggatgcctcctccttgcctgaagccagtcaagaggcagggagcagaggcaattccttttctcctctgttggaaaccatagaacctgtcaacatactagatgttaaagatgactgtggcctccaactaagggtcagcgaggacacctgcccactgaatgttcattcttatgacccccaaggagaaggcagggtggatcctgatctgtccaagcctaaaaaccttgctcctttacaagagagtcaggagtcttacacaactgggactcccaaagcaacatcttctcaccagggccttggaagcactttgcctagaaggggaaccaggaatgccatagttccgagagaaacttctgttagtaaaacacacaggtcagcagacagggccaaaggaaaggagaaaaagaaaaaggaagcagaggaagaggatgaggaactctccaactttgcttacctcttggcctctaaacttagcctctcaccaagggagcatcccctcagtcctcaccatgcctcaggaggtcagggcagccagagagcatcccacctgctccctgctggagcaaaaggccccagcaaacttccatatcctgttgccaagtctgggaagcgagctctagctggaggtccagcccctactgaaaagacaccccactcaggagctcaacttggggtccccagggagaaacccctagctctgggagtagttcgaccctcacagcctcgtaaaaggcggtgtgacagttttgtcacgggcagaaggaagaaacgacgtcgtagccagtagggagcagcgggaccatctgaccccacttgccagtccctaaaggtgggtgccccagagtagattccacccctgctgcccaccaatggagaatcccaatgttgaatctcatcccaatgttgttttgttgttctgcaaaagtggcaagcatggagagagaggtcagactggctaggctgcagggggaattacctttggaaggagctatatagaaaaaaaatgaataaagtgttttgttggaaaatgctc

SEQ ID NO: 161708 - DNA, 2713 bp, Homo sapiens
  Payload ID: 11568
  Gene Symbol: NYX
  Gene Name: nyctalopin
  Uniprot ID: Q9GZU5
  ENST ID: ENST00000342595
  CDS Start-End: 457-1902
tggctgcctgacttgggagatggatgggctgagggagtggagggggacctcagaggagcaggaccagggagactcccaggacggtaagcaacatttgaggaccattcactaacgcttctctgcaggggtttcctctccatccatttccttgctgggttgtcagtgatgccatctgagttgctgtcagggctgtagcctgacaaagggtttcctaatagatccaaactgtccatttgtggggagcttctgattttctgttgttactggtttcccttagcccaacaccagggtcattaagaaggaaggaatgtgaggaagaaagaaaggcagggcattcaggaagaagtgtggaggcatgggagggttctcatggggccctcctgggcactgggtgacctgtcctttctcccctcaggtaggggtcccacggctgggtggtcctaagccactgggtggatgaaaggccgagggatgttggtcctgcttctgcatgcggtggtcctcggcctgcccagcgcctgggccgtgggggcctgcgcccgcgcttgtcccgccgcctgcgcctgcagcaccgtggagcgcggctgctcggtgcgctgcgaccgcgcgggcctcctgcgggtgccggccgagctcccgtgcgaggcggtctccatcgacctggaccggaacggcctgcgcttcctgggcgagcgagccttcggcacgctgccgtccttgcgccgcctgtcgctgcgccacaacaacctgtccttcatcacgcccggcgccttcaagggcctgccgcgcctggctgagctgcgcctggcgcacaacggcgacctgcgctacctgcacgcgcgcaccttcgcggcgctcagccgcctgcgccgcctagacctagcagcctgccgcctcttcagcgtgcccgagcgcctcctggccgaactgccggccctgcgcgaactcgccgccttcgacaacctgttccgccgcgtgccgggcgcgctgcgcggcctggccaacctgacgcacgcgcacctggagcgcggccgcatcgaggcggtggcctccagctcgctgcagggcctgcgccgcctgcgctcgctcagcctgcaggccaaccgcgtccgtgccgtgcacgctggcgccttcggggactgtggcgtcctggagcatctgctgctcaacgacaacctgctggccgagctcccggccgacgccttccgcggcctgcggcgcctgcgcacgctcaacctgggtggcaacgcgctggaccgcgtggcgcgcgcctggttcgctgacctggccgagctcgagctgctctacctggaccgcaacagcatcgccttcgtggaggagggcgccttccagaacctctcgggtctcctcgcgctgcacctcaacggcaaccgcctcaccgtgctcgcctgggtcgccttccagcccggcttcttcctgggccgcctcttcctcttccgcaacccgtggtgctgcgactgccgtctggagtggctgagggactggatggagggctccggacgtgtcaccgacgtgccgtgcgcctccccgggctccgtggccggcctggacctcagccaggtgaccttcgggcgctcctccgatggcctctgtgtggaccccgaggagctgaacctcaccacgtccagtccaggcccgtccccagaaccagcggccaccaccgtgagcaggttcagcagcctcctctccaagctgctggccccgagggtcccggtggaggaggcggccaacaccactggggggctggccaacgcctccctgtccgacagcctctcctcccgtggggtgggaggcgcgggccggcagccctggtttctcctcgcctcttgtctcctgcccagcgtggcccagcacgtggtgtttggcctgcagatggactgacctggccagaggggggaaagtttgcttaactgggcttgagtgtgtttgtggtaaggggagaggagccggaatggagggcagaggtgaaaatcccagtggagggtggaaggaaccgtttgcctccagagatggccccagggagaacacagggacgtgccactcgagggggaggatggtatggatttctgcttttgtcacacgggcatccattggaaaagagaagcaagaatgaacgtgggccctcgggtgggaagactaggaatcggaagcttctagggcttcacatcccttcccctcccctccccttcccctcatcttccaggcaacagtgcctgcaaggcctgaattagagagacttccattggctaagtagttaagagccgtcccatttctcctggcggggtaacccattacaccgaagtcctttgttttctaccacaatcctcctcctcctctccaggggcctggaaacactaggattcaggaaggtaggcaggacgtgagagaagggagatgggagagagatttaagacaaagggtggcggtggttcctggggtctgagatgtgttaggaggcgtttaaaacaaagatccagttcatttactccacagttattcccagggctggccctagccacaaaggaactttagggcagggtagggaaaaaaggggcagcagggggtgtgtttgtggacaaataaatttgtaaagtccgaggattaaaaaaaaaaaaaggttaaaccggtttctctactgctggacttttcagagtctttcatatgctaacattcattgtgaatctcccaagag

SEQ ID NO: 161709 - DNA, 2297 bp, Homo sapiens
  Payload ID: 11568
  Gene Symbol: NYX
  Gene Name: nyctalopin
  Uniprot ID: Q9GZU5
  ENST ID: ENST00000378220
  CDS Start-End: 99-1544
ggctgagggagtggagggggacctcagaggagcaggaccagggagactcccaggacggtaggggtcccacggctgggtggtcctaagccactgggtggatgaaaggccgagggatgttggtcctgcttctgcatgcggtggtcctcggcctgcccagcgcctgggccgtgggggcctgcgcccgcgcttgtcccgccgcctgcgcctgcagcaccgtggagcgcggctgctcggtgcgctgcgaccgcgcgggcctcctgcgggtgccggccgagctcccgtgcgaggcggtctccatcgacctggaccggaacggcctgcgcttcctgggcgagcgagccttcggcacgctgccgtccttgcgccgcctgtcgctgcgccacaacaacctgtccttcatcacgcccggcgccttcaagggcctgccgcgcctggctgagctgcgcctggcgcacaacggcgacctgcgctacctgcacgcgcgcaccttcgcggcgctcagccgcctgcgccgcctagacctagcagcctgccgcctcttcagcgtgcccgagcgcctcctggccgaactgccggccctgcgcgaactcgccgccttcgacaacctgttccgccgcgtgccgggcgcgctgcgcggcctggccaacctgacgcacgcgcacctggagcgcggccgcatcgaggcggtggcctccagctcgctgcagggcctgcgccgcctgcgctcgctcagcctgcaggccaaccgcgtccgtgccgtgcacgctggcgccttcggggactgtggcgtcctggagcatctgctgctcaacgacaacctgctggccgagctcccggccgacgccttccgcggcctgcggcgcctgcgcacgctcaacctgggtggcaacgcgctggaccgcgtggcgcgcgcctggttcgctgacctggccgagctcgagctgctctacctggaccgcaacagcatcgccttcgtggaggagggcgccttccagaacctctcgggtctcctcgcgctgcacctcaacggcaaccgcctcaccgtgctcgcctgggtcgccttccagcccggcttcttcctgggccgcctcttcctcttccgcaacccgtggtgctgcgactgccgtctggagtggctgagggactggatggagggctccggacgtgtcaccgacgtgccgtgcgcctccccgggctccgtggccggcctggacctcagccaggtgaccttcgggcgctcctccgatggcctctgtgtggaccccgaggagctgaacctcaccacgtccagtccaggcccgtccccagaaccagcggccaccaccgtgagcaggttcagcagcctcctctccaagctgctggccccgagggtcccggtggaggaggcggccaacaccactggggggctggccaacgcctccctgtccgacagcctctcctcccgtggggtgggaggcgcgggccggcagccctggtttctcctcgcctcttgtctcctgcccagcgtggcccagcacgtggtgtttggcctgcagatggactgacctggccagaggggggaaagtttgcttaactgggcttgagtgtgtttgtggtaaggggagaggagccggaatggagggcagaggtgaaaatcccagtggagggtggaaggaaccgtttgcctccagagatggccccagggagaacacagggacgtgccactcgagggggaggatggtatggatttctgcttttgtcacacgggcatccattggaaaagagaagcaagaatgaacgtgggccctcgggtgggaagactaggaatcggaagcttctagggcttcacatcccttcccctcccctccccttcccctcatcttccaggcaacagtgcctgcaaggcctgaattagagagacttccattggctaagtagttaagagccgtcccatttctcctggcggggtaacccattacaccgaagtcctttgttttctaccacaatcctcctcctcctctccaggggcctggaaacactaggattcaggaaggtaggcaggacgtgagagaagggagatgggagagagatttaagacaaagggtggcggtggttcctggggtctgagatgtgttaggaggcgtttaaaacaaagatccagttcatttactccacagttattcccagggctggccctagccacaaaggaactttagggcagggtagggaaaaaaggggcagcagggggtgtgtttgtggacaaataaatttgtaaagtccgaggattaaaaaaaaaaaaaggttaaaccggtttctct

SEQ ID NO: 161710 - DNA, 7857 bp, Homo sapiens
  Payload ID: 11569
  Gene Symbol: NYNRIN
  Gene Name: NYN domain and retroviral integrase containing
  Uniprot ID: Q9P2P1
  ENST ID: ENST00000382554
  CDS Start-End: 319-6015
ctgggcccaaaacttgggtggaaggcagaggcctccgggaccctccccgccccctcctcccccccgccggctcccccgccctctcctccgcgcccctttaagctatccagcagacggagacagagttgatccaggaggggctggcagagtgctggagggggaaggctgggggcggagggaagggcggcaggagcccgaccggtcccacccctagctacaaccccgggcaggaagagctcgtcgcggtagcagcggtcgaaggggaccaagctccagagggcgggcgcccgagccgtgcggggagcgggcggggcagccatgctcctgtctgggggcgatcctccggcgcaggaatggttcatggtgcagacaaaatcgaagcctcgggtgcagcggcagcggctgcaagtgcagcgcatctttagggtcaagctgaacgccttccagagccgcccggacaccccctacttctggctacagctcgaggggccccgagagaacatgggcaaagccaaggaatacctgaagggcctgtgcagcccagagctgtggaaagaggttcgctacccaccgatcctgcactgtgccttccttggggcccaaggcctcttcctggactgcctctgctggagcacccttgcctacctggtgcctggcccccctggctccctgatggtgggcgggctgactgagtctttcatcatgacacagaactggctggaggagctggtggggcgactgcgctggggccctgcccctctgctgaccccccgggggatctgggaggctgaggtgacccgggcctttggggccctggtctggatccgtggtgaccagcatgcaggggacctactgcagctgcccccagcggtccaggagctgctgctgagcctggtgcgggatgctgcgggcaaggaagacatcatcgagtggctcagccgcttcggcatctctgactcccactccgatccggaggttctaatctgccctccccagcagcagaaggaagccccagccatggtgtccgtgggagagagtcctggaccctttgtggacatggggaccctccagaacaggggcccagaaaattcaaagagattatctagcctgggagccactgggtccctgatcacagcccagagcacaccgcaggaggcagcaaaccagctggtacgggtcggttccaacaaccaagatggtatggacagtgctcaagaggaagggacagtgcaagccaccagcagccaggactccacgaaccacacacaagccttgttgaagcaaaggcaggtccagaagatagaagataaactcctcttccaacctccagtatcagccctgggtgtgtgcccaccctggaaggcctggaccccggggccagcctttgggccattgtggccgggggctattgctgcaaccttctggaggatcaatgagctgcattctctacatctggcctggctcctgtcccaggcgtgcttcaatttccccttctggcagagacctctgggccccattcagttgaagctgccagggcagaatcctttgcccttaaatctggagtggaagcagaaggagctggctcctctgcctagtgcagaaagcccagctggtagaccagatggggggctgggaggagaagcagccctgcagaattgcccaaggccagagatttccccaaaagttacgagtttattggtggtccctgggagctcagatgtaaaagacaaagttagctcggatctcccacagatagggccacccttgacctctacaccccaactacaggctggaggtgagccgggggatcaagggagtatgcagttagattttaagggactggaagagggacccgctccagtgctgccaacagggcaagggaagcccgtggctcaaggggggctgacagatcagtcagtacctggagctcaaacagtgcctgaaactctcaaagtgcccatggctgcagcagtgcccaaagctgaaaatccctccagaactcaagtgccatctgcagctcccaaactgcctacatctcgaatgatgctggcagtgcacacagagcctgcagctcccgaagtgcctttggctccaacaaagccaacagctcaactgatggccacagctcaaaaaacagttgtgaatcaaccagtgttggtagctcaagtggaacccacaactccaaaaactccccaggctcagaagatgcctgtagcaaaaacatcacctgcaggtcccaaaacacccaaagctcaagccgggcctgcagctacagtttccaaagcacctgcagcttccaaagcacctgcagctcccaaagtacctgtgacccccagagtctccagagctcccaaaacacctgcagctcagaaggtgcccacggatgcagggccaaccttggatgtagccagacttctgagtgaggtccagcctacatcaagggctagtgtctccttactgaagggccaggggcaggctggaaggcagggtccccagtccagtggcaccttggccctcagcagtaagcaccagtttcagatggaggggctcctgggggcttgggagggggccccaaggcagccacctcgccacctgcaagcgaacagcacagtgaccagcttccagaggtaccacgaggccctgaatacacccttcgagctgaacctgtcaggggaacctggaaaccaggggttgcggcgagtggtcatcgatggcagcagtgtggccatggtgcatggcctgcagcacttcttctcctgccgaggaattgccatggcagtgcagtttttctggaaccggggacaccgagaggtcactgtgtttgtacccacctggcagctgaagaagaaccggagggtgagagagagccactttctgacgaagctacactcgctcaagatgctttcaatcacaccctcccagcttgagaatggcaagaagatcaccacctacgattataggttcatggtaaagctggcagaggagacagatggcatcattgtcaccaatgagcagattcacatcctgatgaatagttccaagaaactgatggtcaaagatcgcttgctgcctttcacctttgcggggaatctcttcatggtgcctgatgaccccctgggccgtgatggccccaccttggatgagtttctgaagaagccaaacaggttggacactgacattggcaacttcctgaaggtgtggaagacccttcctcccagctcagccagtgtcactgagctgagtgatgacgctgactctgggcccctggagagtctgccgaatatggaagaagtcagggaagagaaggaggagaggcaggatgaggagcagagacaggggcagggcacacagaaggcggctgaggaggacgaccttgactcttcgctggcgtcagtgttcagggtggagtgcccgtccctttcggaggagatcctgcggtgcctcagcctccatgatccccctgatggggccctggacatcgacctcctgccaggggcagcttctccctacctgggcatcccctgggatggaaaggctccctgccagcaggttcttgcccacctggcccagctcaccatccccagcaacttcaccgcactctccttcttcatgggcttcatggactcccacagggatgccatccctgactatgaagccctagtgggccccctgcacagcctcctcaagcagaagcctgactggcagtgggaccaggagcatgaggaggccttcctggccctgaagcgagccctggtgtctgccctctgcctgatggcccccaactcccagctgcccttccgcctggaggtgaccgtgagccacgtggccctgacggccatcctccatcaggagcactcagggaggaagcaccccatagcctatacctcaaaacccctcctccctgatgaggagagccagggcccccagtcagggggtgacagcccctatgctgtggcctgggccctcaagcatttttcccgctgcattggagacaccccggtggtcctggacctttcctatgcctcccggaccactgcggaccctgaggtgcgggagggccgcagggtttccaaagcttggttgatccgatggtccctcttggttcaggacaaaggcaagagggccctggaattggccctcctccagggcctgctgggggagaaccgcctgctcacccccgcggcctccatgcctcgcttcttccaggttctgccgcctttctctgacctgtccacgttcgtctgcatccacatgtcgggctactgcttctaccgtgaggatgagtggtgtgctggctttggtctctatgttctatcgcccaccagcccccctgtctccctttccttctcctgctccccttacacgccaacctatgcccacctggcagccgtggcctgcggcctggagcgctttggccagtccccactcccagtggttttcctcactcactgcaactggatcttcagcctcctgtgggagctcctgcccctctggagggctcggggcttcctctcctctgatggggctccactccctcacccaagcctgctctcctacattatatccctcacctctggcctctcatcccttccgtttatctaccgaacctcctaccggggctctctgtttgctgtgacagtggacaccctggccaagcagggtgcccaggggggtgggcagtggtggagtttgccaaaggatgtgccagcccctacagtgagtccccatgccatgggcaagaggcccaatttgctggcattacagctgagtgacagcaccctggccgacatcattgccaggctgcaggctgggcagaaactgtctggctcctcaccgtttagttctgcctttaactcactcagcctcgacaaggagagtggcctgcttatgttcaagggagataagaagcccagggtctgggtagtcccgacgcaactccggagggatctgattttctctgtgcatgacattcccttgggggcccaccagaggcccgaagagacctacaagaagttgcgtttgctggggtggtggcctgggatgcaggagcatgtgaaagattactgcaggagctgcttgttctgcatcccccgaaatctcataggcagcgagttgaaggttattgagtccccatggcccctcaggtcgaccgccccctggtcgaacctgcagatcgaggtggtgggcccggtcaccataagtgaggagggccataagcatgtacttattgtggctgacccaaacaccaggtgggtggaggcattccccctgaagccctacacacacacggctgtggcccaggtgctgcttcagcatgtgtttgcaaggtggggtgttcctgtgaggctggaggcagcccaggggccccagtttgcccggcacgtccttgtgagctgtgggctggccctgggagcccaggtggcctccctgagtcgggacctccagttcccctgcctgacgagctcaggggcctactgggaattcaagagggccctcaaggagttcatcttcctgcatgggaagaagtgggcggcctccctgcctttgctgcacctggccttcagggcctcctccactgatgccacaccgttcaaggtcctgaccgggggtgagtcaaggctcacggagcccctgtggtgggagatgagcagcgcaaacattgaagggctcaagatggacgtcttcctgctacagctggtgggggagctgctggagctccactggagggtggctgacaaggcgagtgaaaaggccgagaacaggcgtttcaagcgggagagccaggagaaggagtggaatgtgggtgaccaggtccttttgctgtccctccccaggaatggcagcagtgccaaatgggtgggtcccttctatatcggggaccggctgagcctgtcactctataggatatggggcttcccaaccccagagaagctggggtgcatctatcccagcagtctgatgaaggcctttgccaagagtggcaccccgctgtccttcaaggtcttggagcagtgagcgggagcagcgggggtgccccctgccccagggccgtgggtttctgctgctaggcctccccctgtcccagcagtgctctcagtccactgggggccctcagttgtgccttttgtagagaacttgcttcataaagctttgctgaattgccttgaactagggaccagcatccccatggaaacatccccagtttggggtacttggagaatttgccaaaggctgtcagatatgggtccctggcagttttacactgggaaatggagtgctcctctaggctataccaggctcagtgtcttctccccaagtatcctctttccccttcacatgtaggtgtgtggtggtgtgcacacacactcacgaaagaatctatcttggccatgaaactgtggctgttgaccttggaattggaaccacagtcctttcccatacagaaaccccaaatgtgggctcctccctccaacctgttcttttggggaccctttgcccttagagctgtcacagatgacataagcctgggcaggctgtggggaggccgctgcctcctagcctcacggtcagctttctcaagccaggtgtggcctgcacagctctcagggcagggctggccatcctcccaggcctcaagggcagtgtcttggagtgggaggatggccagccacaagccaccagcttgtcagcatgggaagggcaagggggaaatgggttggcctacctcatttgactccagccaatggagacaattcctgacccctgctttgatggtgttgaccccacaggaatcaaggatcttgatgccaagtgtggcatctctatctgaagagctgcttctgttagacccaggggccccggcctctgttttaagggggcagggcgtctgcaacaggagtggcacacggtgaagtgctggcatggctctacctcccaacccctcccaaccccatcccaaagcctacagtcctctgctccttctacctccactgtatcctgcatcccagaccctacagattgtgtgattgcttcatctgtatcaccccccgagtcctgtggacctgccttctgtgtagagcaaaacccaggctccctcacagccattctttgcagagatcacccttgcagtgagtgtgagttccttccaggtgtgtgcgcgtacactcaccctctgaattgctgccgctgccaaggaagtgggctccaggtgaaggccagtgccacgtcactctggctggccttcttagtagtttcatttctccggaagctgagccagtctcctggtctagcccaggttgccagaacgcttggcattgcagagtgctagagccagtggagaacttgccaacttgattgttttacagcagaggaaagaggatcacagagggaaaatgattcacccaaagtcacacagcaagttcatggctgagctgagaccaggattaagcttcctgactcccagttcaccatgaaaagggttctggcaacaggttcaagctggagaatccttcaaaatgctacacccacattctctccaactcttcatctccctgatcttccagacaaactacctggatgttgcccttaaaccatttctagctgttaaccctgtccagaaaaatgattgagtgatagctgagaagtggaaagtgtgggatttttggcaggtgctctctttcctccgccccccgcgccattctttctcttcctcctctctgtaatggtatgtccagcctcactctccctccctggtgctgtatgcgttccccctgttagctacatttgtgatcacatacccttcttttaagtgaatttttttcatttgatttgtcaataaacgaatcaaactggagctga

SEQ ID NO: 161711 - DNA, 1759 bp, Homo sapiens
  Payload ID: 11570
  Gene Symbol: MGMT
  Gene Name: O-6-methylguanine-DNA methyltransferase
  Uniprot ID: P16455
  ENST ID: ENST00000306010
  CDS Start-End: 33-749
gtgcccctcggccccgcccccgcgccccggatatgctgggacagcccgcgcccctagaacgctttgcgtcccgacgcccgcaggtcctcgcggtgcgcaccgtttgcgacttggtacttggaaaaatggacaaggattgtgaaatgaaacgcaccacactggacagccctttggggaagctggagctgtctggttgtgagcagggtctgcacgaaataaagctcctgggcaaggggacgtctgcagctgatgccgtggaggtcccagcccccgctgcggttctcggaggtccggagcccctgatgcagtgcacagcctggctgaatgcctatttccaccagcccgaggctatcgaagagttccccgtgccggctcttcaccatcccgttttccagcaagagtcgttcaccagacaggtgttatggaagctgctgaaggttgtgaaattcggagaagtgatttcttaccagcaattagcagccctggcaggcaaccccaaagccgcgcgagcagtgggaggagcaatgagaggcaatcctgtccccatcctcatcccgtgccacagagtggtctgcagcagcggagccgtgggcaactactccggaggactggccgtgaaggaatggcttctggcccatgaaggccaccggttggggaagccaggcttgggagggagctcaggtctggcaggggcctggctcaagggagcgggagctacctcgggctccccgcctgctggccgaaactgagtatgtgcagtaggatggatgtttgagcgacacacacgtgtaacactgcatcggatgcggggcgtggaggcaccgctgtattaaaggaagtggcagtgtcctgggaacaagcgtgtctgccctttctgtttccatattttacagcaggatgagttcagacgcccgcggtcctgcacacatttgtttccttctctaacgctgcccttgctctatttttcatgtccattaaaacaggccaagtgagtgtggaaggcctggctcatgttgggccacagcccaggatggggcagtctggcaccctcaggccacagacggctgccatagccgctgtccagggccagctaaggcccatcccaggccgtccacactagaaagctggccctgccccatccccaccatgcctcccttcctggctgtgtccatggctgtgatggcattctccactcagcagttcctagcatcccacacccaggtctcactgaaagaaaggggaacaggccatggcagtcagtgcttacagaggttttctagctttgtttcctacctgccaaaaaggctaatgcaagatgcatccacttatggtctgtatcaggtgaatagaaaataaccatttgccaagatttggaaagacagagagctctctggacacgggttcgatggagcttgcacctctctgagagctgaagtcaagtctcaccctctctccatactccctggcctagtgtgctctgggcagcaggtaggaagggacagggacctctcatctcaagggctgccccaaagggccctcagggaccatgggcctgttaggaccccagcaccccagtgtcgatcctggaagtcaaaggtcacgactgtggggggccagctcatgtcactgatggcagcaggcagggtttccagcatgggcggtgcgctgctgtctgatacttcattattgtgttgtcatcctagctgtataattaactatatccaaaagccggaagggaaacctgtagctctgcatatgg

SEQ ID NO: 161712 - DNA, 1129 bp, Homo sapiens
  Payload ID: 11571
  Gene Symbol: OARD1
  Gene Name: O-acyl-ADP-ribose deacylase 1
  ENST ID: ENST00000373154
  CDS Start-End: 237-497
ctcggctagcaagctagaggggctcgtttccgccccgctaccgggcgggggcggccatcttagatgcgtgcaattaagggctttggcgggattggctccgcgtttgggctggtccgctgctccccacctaccagggtcggatccggagcccttccccgcggggcggggacctccaaacaaccgactcctttccagctgaagaaacacttaaattctggaaatagcgactcagtatcatggccagcagccttaatgaagatccagaaggaagcagaatcacttatgtgaaaggagacctttttgcatgcccgaaaacagactctttagcccactgtatcagtgaggattgtcgcatgggcgctgggatagctgtcctctttaagaagaaatttggaggggtgcaagaacttttaaatcaacaaaagaaatctggagaagtggctgttctgaagagagatgggcgatatatatattacttggattggatgtggtcttgatcgtctgcaatgggaaaatgtatctgcgatgatcgaggaggtatttgaggcaacagacatcaaaattactgtgtacacactctgaaccagtgaacattttggatgtttccgtgttctcctgtgtcatctctactgggccataggaccgggcaaacctaccttaaaataggcagaggaaagtttcatgagaagtagtgtgtttaacaagacagactttggttgctgtattcaagtatttggattatgactgtggaggagggcttgcttaagatatgtggttgtgtttttttgtggaaaagtaaggagttaggtggcttgataataggcagggaaaccagattgtcgggactatgacctttttctccagtatgctacctgatttgtttggctggccactaggtggcagcattggttctacttctctgctttttaagagaaatttcaggaaggatgatcattccagttagtttggcattttttgtcgtttgtgcacataacttggtgttatccttatgtcatcagattcctcctaggggagagtttttgttttaattacaaaattaaattctacattgttaccaagaaatttgtggtgataaaaatggaaaaataaaaatttggggagttagtga

SEQ ID NO: 161713 - DNA, 1337 bp, Homo sapiens
  Payload ID: 11571
  Gene Symbol: OARD1
  Gene Name: O-acyl-ADP-ribose deacylase 1
  Uniprot ID: Q9Y530
  ENST ID: ENST00000424266
  CDS Start-End: 345-803
gagtgtgggctcggctagcaagctagaggggctcgtttccgccccgctaccgggcgggggcggccatcttagatgcgtgcaattaagggctttggcgggattggctccgcgtttgggctggtccgctgctccccacctaccagggtcggatccggagcccttccccgcggggcggggacctccaaacaaccgactcctttccaggtgaagggtgacttgggtacgttggggctttgagcgagcctccccgcaccctcccataggaccccaggacagactgcgtcctcgctgacccgccctaggctgaagaaacacttaaattctggaaatagcgactcagtatcatggccagcagccttaatgaagatccagaaggaagcagaatcacttatgtgaaaggagacctttttgcatgcccgaaaacagactctttagcccactgtatcagtgaggattgtcgcatgggcgctgggatagctgtcctctttaagaagaaatttggaggggtgcaagaacttttaaatcaacaaaagaaatctggagaagtggctgttctgaagagagatgggcgatatatatattacttgattacaaagaaaagggcttcgcacaagccaacttatgaaaacttacagaagagtttagaggcaatgaagtctcattgtctgaagaatggagtcactgacctctccatgcccaggattggatgtggtcttgatcgtctgcaatgggaaaatgtatctgcgatgatcgaggaggtatttgaggcaacagacatcaaaattactgtgtacacactctgaaccagtgaacattttggatgtttccgtgttctcctgtgtcatctctactgggccataggaccgggcaaacctaccttaaaataggcagaggaaagtttcatgagaagtagtgtgtttaacaagacagactttggttgctgtattcaagtatttggattatgactgtggaggagggcttgcttaagatatgtggttgtgtttttttgtggaaaagtaaggagttaggtggcttgataataggcagggaaaccagattgtcgggactatgacctttttctccagtatgctacctgatttgtttggctggccactaggtggcagcattggttctacttctctgctttttaagagaaatttcaggaaggatgatcattccagttagtttggcattttttgtcgtttgtgcacataacttggtgttatccttatgtcatcagattcctcctaggggagagtttttgttttaattacaaaattaaattctacattgttaccaagaaatttgtggtgataaaaatggaaaaataaaaattt

SEQ ID NO: 161714 - DNA, 401 bp, Homo sapiens
  Payload ID: 11571
  Gene Symbol: OARD1
  Gene Name: O-acyl-ADP-ribose deacylase 1
  ENST ID: ENST00000471367
  CDS Start-End: 127-393
gggtacgttggggctttgagcgagcctccccgcaccctcccataggaccccaggacagactgcgtcctcgctgacccgccctaggctgaagaaacacttaaattctggaaatagcgactcagtatcatggccagcagccttaatgaagatccagaaggaagcagaatcacttatgtgaaaggagacctttttgcatgcccgaaaacagactctttagcccactgtatcagtgaggattgtcgcatgggcgctgggatagctgtcctctttaagaagaaatttggaggggtgcaagaacttttaaatcaacgtgagttttggaaaccacttacctggtttgccctggctagagcaccttttaatctgttacactttaataaaatatgcgtgtaaagagggga

SEQ ID NO: 161715 - DNA, 832 bp, Homo sapiens
  Payload ID: 11571
  Gene Symbol: OARD1
  Gene Name: O-acyl-ADP-ribose deacylase 1
  ENST ID: ENST00000482515
  CDS Start-End: 338-571
agtttcgttacgcatgcgcgggcggcggcgggaaaccacggaatttactgccggaagttcggcggccttcgccaaagagtgtgggctcggctagcaagctagaggggctcgtttccgccccgctaccgggcgggggcggccatcttagatgcgtgcaattaagggctttggcgggattggctccgcgtttgggctggtccgctgctccccacctaccagggtcggatccggagcccttccccgcggggcggggacctccaaacaaccgactcctttccaggtgaagggtgacttggctgaagaaacacttaaattctggaaatagcgactcagtatcatggccagcagccttaatgaagatccagaaggaagcagaatcacttatgtgaaaggagacctttttgcatgcccgaaaacagactctttagcccactgtatcagtgaggattgtcgcatgggcgctgggatagctgtcctctttaagaagaaatttggaggggtgcaagaacttttaaatcaacgattggatgtggtcttgatcgtctgcaatgggaaaatgtatctgcgatgatcgaggaggtatttgaggcaacagacatcaaaattactgtgtacacactctgaaccagtgaacattttggatgtttccgtgttctcctgtgtcatctctactgggccataggaccgggcaaacctaccttaaaataggcagaggaaagtttcatgagaagtagtgtgtttaacaagacagactttggttgctgtattcaagtatttggattatgactgtggaggagggcttgcttaagatatgtggttgtgtttttttgtg

SEQ ID NO: 161716 - DNA, 829 bp, Homo sapiens
  Payload ID: 11571
  Gene Symbol: OARD1
  Gene Name: O-acyl-ADP-ribose deacylase 1
  ENST ID: ENST00000480585
  CDS Start-End: 88-348
ggttgttcttccctgctgagatggctggctgacttcaccagtcaagctgaagaaacacttaaattctggaaatagcgactcagtatcatggccagcagccttaatgaagatccagaaggaagcagaatcacttatgtgaaaggagacctttttgcatgcccgaaaacagactctttagcccactgtatcagtgaggattgtcgcatgggcgctgggatagctgtcctctttaagaagaaatttggaggggtgcaagaacttttaaatcaacaaaagaaatctggagaagtggctgttctgaagagagatgggcgatatatatattacttggattggatgtggtcttgatcgtctgcaatgggaaaatgtatctgcgatgatcgaggaggtatttgaggcaacagacatcaaaattactgtgtacacactctgaaccagtgaacattttggatgtttccgtgttctcctgtgtcatctctactgggccataggaccgggcaaacctaccttaaaataggcagaggaaagtttcatgagaagtagtgtgtttaacaagacagactttggttgctgtattcaagtatttggattatgactgtggaggagggcttgcttaagatatgtggttgtgtttttttgtggaaaagtaaggagttaggtggcttgataataggcagggaaaccagattgtcgggactatgacctttttctccagtatgctacctgatttgtttggctggccactaggtggcagcattggttctacttctctgctttttaagagaaatttcaggaaggatgatcattccagttagtttggcattttttg

SEQ ID NO: 161717 - DNA, 704 bp, Homo sapiens
  Payload ID: 11571
  Gene Symbol: OARD1
  Gene Name: O-acyl-ADP-ribose deacylase 1
  ENST ID: ENST00000469104
  CDS Start-End: 214-480
accgggcgggggcggccatcttagatgcgtgcaattaagggctttggcgggattggctccgcgtttgggctggtccgctgctccccacctaccagggtcggatccggagcccttccccgcggggcggggacctccaaacaaccgactcctttccaggtgaagggtgacttggctgaagaaacacttaaattctggaaatagcgactcagtatcatggccagcagccttaatgaagatccagaaggaagcagaatcacttatgtgaaaggagacctttttgcatgcccgaaaacagactctttagcccactgtatcagtgaggattgtcgcatgggcgctgggatagctgtcctctttaagaagaaatttggaggggtgcaagaacttttaaatcaacgtgagttttggaaaccacttacctggtttgccctggctagagcaccttttaatctgttacactttaataaaatatgcgtgtaaagaggggattcctaagaaccaaatgtttttaagattttcctccccaagaatggcctctagtttagacgtttaccatatcaaaacccaactcctgtgaaggtttttaatctcttcctcttgtatcatgaaactttcttgacgatattactgtacttctctgaaacttgaaataactctgagatgcttagtctataggttggcattcaagatcctttacttaccaa

SEQ ID NO: 161718 - DNA, 764 bp, Homo sapiens
  Payload ID: 11571
  Gene Symbol: OARD1
  Gene Name: O-acyl-ADP-ribose deacylase 1
  ENST ID: ENST00000486443
  CDS Start-End: 285-626
ctagcaagctagaggggctcgtttccgccccgctaccgggcgggggcggccatcttagatgcgtgcaattaagggctttggcgggattggctccgcgtttgggctggtccgctgctccccacctaccagggtcggatccggagcccttccccgcggggcggggacctccaaacaaccgactcctttccaggtgaagggtgacttggatcacttatgtgaaaggagacctttttgcatgcccgaaaacagactctttagcccactgtatcagtgaggattgtcgcatgggcgctgggatagctgtcctctttaagaagaaatttggaggggtgcaagaacttttaaatcaacaaaagaaatctggagaagtggctgttctgaagagagatgggcgatatatatattacttgattacaaagaaaagggcttcgcacaagccaacttatgaaaacttacagaagagtttagaggcaatgaagtctcattgtctgaagaatggagtcactgacctctccatgcccaggattggatgtggtcttgatcgtctgcaatgggaaaatgtatctgcgatgatcgaggaggtatttgaggcaacagacatcaaaattactgtgtacacactctgaaccagtgaacattttggatgtttccgtgttctcctgtgtcatctctactgggccataggaccgggcaaacctaccttaaaataggcagaggaaagtttcatgagaagtagtgtgtttaacaagacagactttggttgc

SEQ ID NO: 161719 - DNA, 717 bp, Homo sapiens
  Payload ID: 11571
  Gene Symbol: OARD1
  Gene Name: O-acyl-ADP-ribose deacylase 1
  ENST ID: ENST00000464633
  CDS Start-End: 242-475
gtgggctcggctagcaagctagaggggctcgtttccgccccgctaccgggcgggggcggccatcttagatgcgtgcaattaagggctttggcgggattggctccgcgtttgggctggtccgctgctccccacctaccagggtcggatccggagcccttccccgcggggcggggacctccaaacaaccgactcctttccagctgaagaaacacttaaattctggaaatagcgactcagtatcatggccagcagccttaatgaagatccagaaggaagcagaatcacttatgtgaaaggagacctttttgcatgcccgaaaacagactctttagcccactgtatcagtgaggattgtcgcatgggcgctgggatagctgtcctctttaagaagaaatttggaggggtgcaagaacttttaaatcaacgattggatgtggtcttgatcgtctgcaatgggaaaatgtatctgcgatgatcgaggaggtatttgaggcaacagacatcaaaattactgtgtacacactctgaaccagtgaacattttggatgtttccgtgttctcctgtgtcatctctactgggccataggaccgggcaaacctaccttaaaataggcagaggaaagtttcatgagaagtagtgtgtttaacaagacagactttggttgctgtattcaagtatttggattatgactgtggaggagggcttgcttaagatat

SEQ ID NO: 161720 - DNA, 1515 bp, Homo sapiens
  Payload ID: 11571
  Gene Symbol: OARD1
  Gene Name: O-acyl-ADP-ribose deacylase 1
  Uniprot ID: Q9Y530
  ENST ID: ENST00000463088
  CDS Start-End: 197-655
ccgggcgggggcggccatcttagatgcgtgcaattaagggctttggcgggattggctccgcgtttgggctggtccgctgctccccacctaccagggtcggatccggagcccttccccgcggggcggggacctccaaacaaccgactcctttccagctgaagaaacacttaaattctggaaatagcgactcagtatcatggccagcagccttaatgaagatccagaaggaagcagaatcacttatgtgaaaggagacctttttgcatgcccgaaaacagactctttagcccactgtatcagtgaggattgtcgcatgggcgctgggatagctgtcctctttaagaagaaatttggaggggtgcaagaacttttaaatcaacaaaagaaatctggagaagtggctgttctgaagagagatgggcgatatatatattacttgattacaaagaaaagggcttcgcacaagccaacttatgaaaacttacagaagagtttagaggcaatgaagtctcattgtctgaagaatggagtcactgacctctccatgcccaggattggatgtggtcttgatcgtctgcaatgggaaaatgtatctgcgatgatcgaggaggtatttgaggcaacagacatcaaaattactgtgtacacactctgaaccagtgaacattttggatgtttccgtgttctcctgtgtcatctctactgggccataggaccgggcaaacctaccttaaaataggcagaggaaagtttcatgagaagtagtgtgtttaacaagacagactttggttgctgtattcaagtatttggattatgactgtggaggagggcttgcttaagatatgtggttgtgtttttttgtggaaaagtaaggagttaggtggcttgataataggcagggaaaccagattgtcgggactatgacctttttctccagtatgctacctgatttgtttggctggccactaggtggcagcattggttctacttctctgctttttaagagaaatttcaggaaggatgatcattccagttagtttggcattttttgtcgtttgtgcacataacttggtgttatccttatgtcatcagattcctcctaggggagagtttttgttttaattacaaaattaaattctacattgttaccaagaaatttgtggtgataaaaatggaaaaataaaaatttggggagttagtgaggttctgtgcttatgtctatttgttctggacatgggtaatggagggttcacctgcaacttaatttcaaacagtcagacaaagggtccaagcgggaggagaagcaaagtgagaaataagagataaaaatagacaagtcaaaaggcaggtttttagaatctcctcatggtgaactttttctctcttttgtccactgcatggtttctgtgattgaacctgcctgaatttaatcatgaaaacaagtgaaataatgtatgttaaatgcctggcagagtacttagcacagactagtgacccaataaatcagtgattgtc

SEQ ID NO: 161721 - DNA, 814 bp, Homo sapiens
  Payload ID: 11571
  Gene Symbol: OARD1
  Gene Name: O-acyl-ADP-ribose deacylase 1
  ENST ID: ENST00000488238
  CDS Start-End: 422-814
gctttcctgattgcagttttggttgagaaggttgttcttccctgctgagatggctggctgacttcaccagtcaagaggcctgcaggatgaactggtcttaagtgtgagaaagatttagctatgtgatgatgtggaggaaggtgaagtactacaaatcaagagagcataaaaacaagaacagaaatatttcagcatgtgaacagtggactaaacaggaaaaaaagcttggggccacactactttctctcaaaatgtcagacaaagaaattcttctgcagactggtggaagcttgtaaggtcaggacgcagtggctcatgcctgtaatcccaacgttttgggagaacaagaagggaggatggcttgagcccaggagttccagctgaagaaacacttaaattctggaaatagcgactcagtatcatggccagcagccttaatgaagatccagaaggaagcagaatcacttatgtgaaaggagacctttttgcatgcccgaaaacagactctttagcccactgtatcagtgaggattgtcgcatgggcgctgggatagctgtcctctttaagaagaaatttggaggggtgcaagaacttttaaatcaacaaaagaaatctggagaagtggctgttctgaagagagatgggcgatatatatattacttgattacaaagaaaagggcttcgcacaagccaacttatgaaaacttacagaagagtttagaggcaatgaagtctcattgtctgaagaatggagtcactgacctctccatgcccaggattggatgtggtcttgatcgtctgcaatgggaaaat

SEQ ID NO: 161722 - DNA, 1245 bp, Homo sapiens
  Payload ID: 11571
  Gene Symbol: OARD1
  Gene Name: O-acyl-ADP-ribose deacylase 1
  ENST ID: ENST00000482853
  CDS Start-End: 1-232
tatcagtgaggattgtcgcatgggcgctgggatagctgtcctctttaagaagaaatttggaggggtgcaagaacttttaaatcaacaaaagaaatctggagaagtggctgttctgaagagagatgggcgatatatatattacttggtgctgtttcaggtactgggaatatggcaaaagaacaaagcaaatgaaaatccctgctgtgatgatttgtggagcttgaggaactgaacaacaaataaggcctttggctttggctggcacaggggtgaaggagagccagcggcattgagtaaccaggcgaatgtgcccccaggagagttcattccaaccctcccagttcctactgctggtgggggtcccagtggcaagtgtcctccttctggcccaatgccttcgatggcactgccctagaaggctgctgggggcctgctggacactgaatggtcaagaggaaccagtgtcccagcctaccccccaactagaaaatgaggtctcaaggcagcacctgccagccacactgccagagatggttgccttctaccaggagctacacacacccactcaaggccagaccatggtccgccagttgatgcacaaactgttggtgttttcggctcgagaggtggatcaccgcggcggttgcctgatgctccaggatacaggcatctccttgctcatcccaccaggtgctgtggctgtgggccgccaggagcgggtgtctttgatcctggtgtgggacctgtcggacgccccatcgctgtcccaagcccaggggctggtaagccctgtggtggcatgtggcccccatggggcctccttcctgaagccttgcactctcacgttcaaacactgtgccgagcagcccagccatgctcgcacctacagcagcaacactaccctgctggatgccaaggtatggaggcccctggggcggccgggggcccacgcctcccgggatgagtgtcgcatccacctctcccacttcaggtaggcacatgccattggcctgtcttcccacacccatctctctgaggactgtctttcctgcccactttctctgtctgccttatcttcatctctctgtatagaagatggtctgcaaatcctttatcccctggtgtctctttctggcccctctgtcctaatgtttgtagcagtttttctcacatcaatcatgtccatgactgcaaatcccattgctgtctctctgtctgtctggaagtgtctgactcagcaccatc

SEQ ID NO: 161723 - DNA, 3330 bp, Homo sapiens
  Payload ID: 11571
  Gene Symbol: OARD1
  Gene Name: O-acyl-ADP-ribose deacylase 1
  Uniprot ID: Q9Y530
  ENST ID: ENST00000479950
  CDS Start-End: 315-773
ggcggcgggaaaccacggaatttactgccggaagttcggcggccttcgccaaagagtgtgggctcggctagcaagctagaggggctcgtttccgccccgctaccgggcgggggcggccatcttagatgcgtgcaattaagggctttggcgggattggctccgcgtttgggctggtccgctgctccccacctaccagggtcggatccggagcccttccccgcggggcggggacctccaaacaaccgactcctttccaggtgaagggtgacttggctgaagaaacacttaaattctggaaatagcgactcagtatcatggccagcagccttaatgaagatccagaaggaagcagaatcacttatgtgaaaggagacctttttgcatgcccgaaaacagactctttagcccactgtatcagtgaggattgtcgcatgggcgctgggatagctgtcctctttaagaagaaatttggaggggtgcaagaacttttaaatcaacaaaagaaatctggagaagtggctgttctgaagagagatgggcgatatatatattacttgattacaaagaaaagggcttcgcacaagccaacttatgaaaacttacagaagagtttagaggcaatgaagtctcattgtctgaagaatggagtcactgacctctccatgcccaggattggatgtggtcttgatcgtctgcaatgggaaaatgtatctgcgatgatcgaggaggtatttgaggcaacagacatcaaaattactgtgtacacactctgaaccagtgaacattttggatgtttccgtgttctcctgtgtcatctctactgggccataggaccgggcaaacctaccttaaaataggcagaggaaagtttcatgagaagtagtgtgtttaacaagacagactttggttgctgtattcaagtatttggattatgactgtggaggagggcttgcttaagatatgtggttgtgtttttttgtggaaaagtaaggagttaggtggcttgataataggcagggaaaccagattgtcgggactatgacctttttctccagtatgctacctgatttgtttggctggccactaggtggcagcattggttctacttctctgctttttaagagaaatttcaggaaggatgatcattccagttagtttggcattttttgtcgtttgtgcacataacttggtgttatccttatgtcatcagattcctcctaggggagagtttttgttttaattacaaaattaaattctacattgttaccaagaaatttgtggtgataaaaatggaaaaataaaaatttggggagttagtgaggttctgtgcttatgtctatttgttctggacatgggtaatggagggttcacctgcaacttaatttcaaacagtcagacaaagggtccaagcgggaggagaagcaaagtgagaaataagagataaaaatagacaagtcaaaaggcaggtttttagaatctcctcatggtgaactttttctctcttttgtccactgcatggtttctgtgattgaacctgcctgaatttaatcatgaaaacaagtgaaataatgtatgttaaatgcctggcagagtacttagcacagactagtgacccaataaatcagtgattgtcaaaaatccttatgagtcttctttaaaaaaataaaggccacttcctctcaaaaaattctcatacctgtcatctcagcactttgagaggctgagactggaggatgacttgagcccaggagtttgagacaaacctggttaacatagcgagaccctgtctctacaaaaaaaaaagaaattaaaaattagctgggcctggtggtgcaggcctgtagttccagctactctagaggttgaggcgggaggatggcttgagcctgggaggttgaagttgcattgagctgtgattgtgccactgcactccagtgtgggcaacagagcaagaccctatctcaattaaaaaaaaaaatttggtggtggagtgggatggccacttttgtgtttttaacctccatagaagatttggatgtgcagccagctggggtctaaatattagtcctcttttcttccgaagctgcaaagaccagtcgtctattgtggtcatggtaggaaaataaagttcatggatttagccaatggttcagtatcagagctattcgggaaactagacattttcttgttttcccttacagtggtgttgagagttaaaacagccagacttgctattgattttctccctagagtgactttgggtctgtcacaggacttgctgctttcccaagtataaaagaacaactgtattttagaaggggctggttaaaacaccaggaaagtactggttaaatataatctttgtactttagactgtgttcttatcacatatcagcctgataagaggcaacagtttcaaaaaagtatttcacttttgtatttctaggtggaacagacaagttcttcatgttgttggggtaggggcagtggagggtcaagttcattatcaaacttttagattgaggcttttcttgaagcattgcttttgtccacataaagttgaagggaaaaaggaaggagagattatctaaatacacaaaattgaaagtgagagtgggggataagaaacttaaagaaacttaaaatattttgcttaactctgcaattacagatgctcctcaacttaggtctatgtctgggtaaccccatcttaagttgagttcagttgaagggtgtactgaatgtgtatggcttttgcaccgttgtaaagtccaaaaattgcaagacaaaccattgtaaattgagtaccatctgtaaaccttaacacaagtcaaaacatggattttctaggcttcctttacttttaaagagattatggttattattattatttttttcttggcgtttgagccttgattctttagacaaaacctagtctcattcaggattggctgtaagtggaattctgggacttagcaggaatgtgataaagcactttgtcatttgccgatagtagtcttgggtcaaattccgacgacttatcacacttgaagcctgaggaaaggaggcatgccctggtaatcagagtgaacacattattcctggaaacctagttagagtttggcaaacacccggaaattcacctgtgaatttttgcttccacataggactcaaacaaacctttaaaaaaaaaaaaagagagacttgacatcatcctgccattaccatcaaacaccatgtattgaatacttttaaatgattgtatatctgaacattaaactactacttttcacccgctcctctctaataaagaagctagttgcttattaa

SEQ ID NO: 161724 - DNA, 819 bp, Homo sapiens
  Payload ID: 11571
  Gene Symbol: OARD1
  Gene Name: O-acyl-ADP-ribose deacylase 1
  Uniprot ID: Q9Y530
  ENST ID: ENST00000468811
  CDS Start-End: 207-665
ctctttgccccagaagggttttgtattacgtcccaggggccgaacaaactcacattcatcgataaacgttggggaaaaaagcctattaagtggttgtacagggcaatcagaatattatatactaaggctgcctaagcatttttacttccttttcccttctcatagctgaagaaacacttaaattctggaaatagcgactcagtatcatggccagcagccttaatgaagatccagaaggaagcagaatcacttatgtgaaaggagacctttttgcatgcccgaaaacagactctttagcccactgtatcagtgaggattgtcgcatgggcgctgggatagctgtcctctttaagaagaaatttggaggggtgcaagaacttttaaatcaacaaaagaaatctggagaagtggctgttctgaagagagatgggcgatatatatattacttgattacaaagaaaagggcttcgcacaagccaacttatgaaaacttacagaagagtttagaggcaatgaagtctcattgtctgaagaatggagtcactgacctctccatgcccaggattggatgtggtcttgatcgtctgcaatgggaaaatgtatctgcgatgatcgaggaggtatttgaggcaacagacatcaaaattactgtgtacacactctgaaccagtgaacattttggatgtttccgtgttctcctgtgtcatctctactgggccataggaccgggcaaacctaccttaaaataggcagaggaaagtttcatgagaagtagtgtgtttaacaagacagactttggttgctgtattcaagtatttg

SEQ ID NO: 161725 - DNA, 1188 bp, Homo sapiens
  Payload ID: 11571
  Gene Symbol: OARD1
  Gene Name: O-acyl-ADP-ribose deacylase 1
  ENST ID: ENST00000628419
  CDS Start-End: 301-561
acggaatttactgccggaagttcggcggccttcgccaaagagtgtgggctcggctagcaagctagaggggctcgtttccgccccgctaccgggcgggggcggccatcttagatgcgtgcaattaagggctttggcgggattggctccgcgtttgggctggtccgctgctccccacctaccagggtcggatccggagcccttccccgcggggcggggacctccaaacaaccgactcctttccaggtgaagggtgacttggctgaagaaacacttaaattctggaaatagcgactcagtatcatggccagcagccttaatgaagatccagaaggaagcagaatcacttatgtgaaaggagacctttttgcatgcccgaaaacagactctttagcccactgtatcagtgaggattgtcgcatgggcgctgggatagctgtcctctttaagaagaaatttggaggggtgcaagaacttttaaatcaacaaaagaaatctggagaagtggctgttctgaagagagatgggcgatatatatattacttggattggatgtggtcttgatcgtctgcaatgggaaaatgtatctgcgatgatcgaggaggtatttgaggcaacagacatcaaaattactgtgtacacactctgaaccagtgaacattttggatgtttccgtgttctcctgtgtcatctctactgggccataggaccgggcaaacctaccttaaaataggcagaggaaagtttcatgagaagtagtgtgtttaacaagacagactttggttgctgtattcaagtatttggattatgactgtggaggagggcttgcttaagatatgtggttgtgtttttttgtggaaaagtaaggagttaggtggcttgataataggcagggaaaccagattgtcgggactatgacctttttctccagtatgctacctgatttgtttggctggccactaggtggcagcattggttctacttctctgctttttaagagaaatttcaggaaggatgatcattccagttagtttggcattttttgtcgtttgtgcacataacttggtgttatccttatgtcatcagattcctcctaggggagagtttttgttttaattacaaaattaaattctacattgttaccaagaaatttgtggtgataaaaatggaaaaataaaaatttggggagtt

SEQ ID NO: 161726 - DNA, 4417 bp, Homo sapiens
  Payload ID: 11572
  Gene Symbol: OLA1
  Gene Name: Obg-like ATPase 1
  Uniprot ID: Q9NTK5
  ENST ID: ENST00000284719
  CDS Start-End: 248-1438
ccccggccggttaggccaatgggcgggacgcgcgggcaaggcggggaggggcggggcccatggtctgcgcgcaggtgccgctcggcgcccggcccgcccgttccgccgctgtcgccgccgtcgtgcgtgccgctcggcggaggggacgggcctgcgttctctcctccttcctccccgcctccagctgccggcaggacctttctctcgctgccgctgggaccccgtgtcatcgcccaggccgagcacgatgccccctaaaaagggaggtgatggaattaaaccacccccaatcattggaagatttggaacctcactgaaaattggtattgttggattgccaaatgttgggaaatctactttcttcaatgtgttaaccaatagtcaggcttcagcagaaaacttcccgttctgcactattgatcctaatgagagcagagtacctgtgccagatgaaaggtttgactttctttgtcaataccacaaaccagcaagcaaaattcctgcctttctaaatgtggtggatattgctggccttgtgaaaggagctcacaatgggcagggcctggggaatgcttttttatctcatattagtgcctgtgatggcatctttcatctaacacgtgcttttgaagatgatgatatcacgcacgttgaaggaagtgtagatcctattcgagatatagaaataatacatgaagagcttcagcttaaagatgaggaaatgattgggcccattatagataaactagaaaaggtggctgtgagaggaggagataaaaaactaaaacctgaatatgatataatgtgcaaagtaaaatcctgggttatagatcaaaagaaacctgttcgcttctatcatgattggaatgacaaagagattgaagtgttgaataaacacttatttttgacttcaaaaccaatggtctacttggttaatctttctgaaaaagactacattagaaagaaaaacaaatggttgataaaaattaaagagtgggtggacaagtatgacccaggtgctttggtcattccttttagtggggccttggaactcaagttgcaagaattgagtgctgaggagagacagaagtatctggaagcgaacatgacacaaagtgctttgccaaagatcattaaggctgggtttgcagcactccaactagaatactttttcactgcaggcccagatgaagtgcgtgcatggaccatcaggaaagggactaaggctcctcaggctgcaggaaagattcacacagattttgaaaagggattcattatggctgaagtaatgaaatacgaagattttaaagaggaaggttctgaaaatgcagtcaaggctgctggaaagtacagacaacaaggcagaaattatattgttgaagatggagatattatcttcttcaaatttaacacacctcaacaaccgaagaagaaataaaatttagttattgctcagataaacatacaacttccaaaaggcatctgatttttaaaaaattaaaatttctgaaaaccaatgcgacaaataaagttggggagatgggaatctttgacaaacaaattatttttatttgttttaaaattaaaatactgtgtacccccccccccccatgaaatgcaggttcactaaatgtgaacagctttgcttttcacgtgattaagaccctactccaaattgtagaagcttttcaggaaccatattactctcatgatacttcattaatctccatcatgtatgccaagcctgacacatttgacagtgaggacaatgtggcttgctcctttttgaatctacagataatgcatgttttacagtactccagatgtctacactcaataaaacatttgacaaaaccagccttggtgtgtttggggatgtctgtattgactgactgtggtgtgctgaatgcgatacggcacctggtggttgctgattacagaattttaaggcgtgtgtatgacacagtaactggcagtgtggggcagctgcaattgtatcttaaaagtgagtctttcatgggaatcagaagaatagtataccagggatttgtctcaaaaaagttaattaatttatagatcaacatttattgaaagatgatagcaatgatattatgagggatatgagataggtgactgaccacaaagaagaaaattctgtctcaaaaattaaagaattttgtttgttattgttgttctgaccatattgaaaagaggttcacttttaatctttcctttgaaattattaaattgtaaaaactgacccattgatgtctggtgggttatgttttgcttcaattcagcaatgtgtataaaagttcctacactgattttgaaatactaagatcagactttgaaaattttaaaaattctttcattcttacttttcagatatttgagagcagtcgaagtggtagtatgggtaagttaagcacttcttaacattgtagcagaaaattccaaaagaaagactagaacaaattggtaatttggagaccctttgccacttagccttctcttgtgatgatggcctgaaagctctctcggccctgagcctccctttctctcccatgtttccattcctgtgagacctcccttccttgtccttgtcctctgcccttttgtgctcttctgtgatcacaggaccatttccatggaatgcagattcatacccagccagcctttgcctctactgtatcgctttgggactttaaagatgcagaagtattagaacacacacaaacttaaaatggaaagttaccaaatgtagcactagaggcaagaaaaggggtgattttttaaagatttggctatacttaagatatttaaagaggatgaggttgagtcgtgagtataatttagaagctctccagtgagtatttttttagtatcaaatagtgatcttcttttgctaacataaaaatgagtaaactacagcagagaaataagaataaaactaatgaagggttttttaaaagaactaaataaaacaaataaaactaggctacaggtatagctgaccaagtttgctgtgaaaaatccttgttatatctatttctgtattggagtaatgtgtagattagtggattgttagggatttcagcagtataagaaagaatcaaatatcttgcttttgggtcttctccaaagtaaattgcatggacttcttaaagaagtttgaaatcagtaaaaagacattaggatcatgcaattttactttgtctagcttctaatgtggtaaattgcacattgtgcaacagaaccattaataaaagaaaggagttagttttgaggtaactgcattcattaggggctgaaaataaatgttaaaaatgtttaatttggttagaagttctacaacattgtatgtacatatacaaaatttcattttctctgaaagtcgagaattccaagaactgttacatataatcatatatatgcctatatctaaacgttttccctcctttaatattgataaagttaatatattttaggatgttatgtaaatatttttgcatgtatctgtagctccatcttaatcaaatttatggttaaaagagatttgaggccaggcgtggaggctcacacctataatcccaacactttgggaggccgaggtgggaggatcacttgagcacaggagtttgagaccagcctgtgcaacatcatgaaacatcatctctacataaaaaaatacatatatacaaaaattagctgggcatcatggcacacacctgtagtcccagctacttaggaggctgagatgggaggattgatcgatcgcttgagcctgggaggtggaggctactgtgagccatgatcatgccactgcactccagcctgggcaacagagtgagaccctgtctccaaagagaaagagaaacttgagaaggcttgtgcccaaagcttgaagaaagattgtaatagcatttagttgtgttttatcatgttatcttcataacatgcattttgcatatggctcagagcagagccggatctcccaaggaagcacaaatagtttttgtcgctaacttagttatgagtgaagcctctgttcacttataacttgccagtttcattggtggaataagtccccttactcatgattcatcaatattcctatattaaaattccagtttgatgtttgtctctagttgtctgtgtataatatttccaaagctcctttgtaaaccccgtctcctttcattcagagagtcagagacggtatctcctcctcctgcctcttctattgttctgattagtctacttaaattcacttgatgctctttttattttacaagagacttgagaaatgtcggttgttcctaatggcaaactactttagctgggaaaattcatttcaacttattttaagcttgtaaaatacactgtggtgataaaataaaagagctgggtttga

SEQ ID NO: 161727 - DNA, 1656 bp, Homo sapiens
  Payload ID: 11572
  Gene Symbol: OLA1
  Gene Name: Obg-like ATPase 1
  Uniprot ID: Q9NTK5
  ENST ID: ENST00000344357
  CDS Start-End: 522-1238
gttccgccgctgtcgccgccgtcgtgcgtgccgctcggcggaggggacgggcctgcgttctctcctccttcctccccgcctccagctgccggcaggacctttctctcgctgccgctgggaccccgtgtcatcgcccaggccgagcacggaaatctactttcttcaatgtgttaaccaatagtcaggcttcagcagaaaacttcccgttctgcactattgatcctaatgagagcagagtacctgtgccagatgaaaggtttgactttctttgtcaataccacaaaccagcaagcaaaattcctgcctttctaaatgtggtggatattgctggccttgtgaaaggagctcacaatgggcagggcctggggaatgcttttttatctcatattagtgcctgtgatggcatctttcatctaacacgtgcttttgaagatgatgatatcacgcacgttgaaggaagtgtagatcctattcgagatatagaaataatacatgaagagcttcagcttaaagatgaggaaatgattgggcccattatagataaactagaaaaggtggctgtgagaggaggagataaaaaactaaaacctgaatatgatataatgtgcaaagtaaaatcctgggttatagatcaaaagaaacctgttcgcttctatcatgattggaatgacaaagagattgaagtgttgaataaacacttatttttgacttcaaaaccaatggtctacttggttaatctttctgaaaaagactacattagaaagaaaaacaaatggttgataaaaattaaagagtgggtggacaagtatgacccaggtgctttggtcattccttttagtggggccttggaactcaagttgcaagaattgagtgctgaggagagacagaagtatctggaagcgaacatgacacaaagtgctttgccaaagatcattaaggctgggtttgcagcactccaactagaatactttttcactgcaggcccagatgaagtgcgtgcatggaccatcaggaaagggactaaggctcctcaggctgcaggaaagattcacacagattttgaaaagggattcattatggctgaagtaatgaaatacgaagattttaaagaggaaggttctgaaaatgcagtcaaggctgctggaaagtacagacaacaaggcagaaattatattgttgaagatggagatattatcttcttcaaatttaacacacctcaacaaccgaagaagaaataaaatttagttattgctcagataaacatacaacttccaaaaggcatctgatttttaaaaaattaaaatttctgaaaaccaatgcgacaaataaagttggggagatgggaatctttgacaaacaaattatttttatttgttttaaaattaaaatactgtgtacccccccccccccatgaaatgcaggttcactaaatgtgaacagctttgcttttcacgtgattaagaccctactccaaattgtagaagcttttcaggaaccatattactctcatgatacttcattaatctccatcatgtatgccaagcctgacacatttgacagtgaggacaatgtggcttgctcctttttgaatctacagataatgcatgttttacagtactccagatgtctacactcaataaaacatttgacaaaacc

SEQ ID NO: 161728 - DNA, 2071 bp, Homo sapiens
  Payload ID: 11572
  Gene Symbol: OLA1
  Gene Name: Obg-like ATPase 1
  ENST ID: ENST00000409546
  CDS Start-End: 632-1882
agtggccaagatggggccagggcagcgggtggcttggggatgtgtggatgaatgaggcgctgtcggactaggccgcgcgtcgggagatcggcctacgcctcacgcgggaaagccctggggaaagccttctcccgacgccaggacgcccggtggcccagtccggagaggaggatggggggtggggcccactttgggtgggctgccggccacctctctgtaggccagaggacccgacaggcgctgttcctgtatctgttctttggaggcctgggagttggccaggaacaggtgtcaggacgctgagaagggaaattcctggccctcggggtcagggatcagaggctggaatactactgcaagggcagggccccagcgtggtcctaggaggtacaactctcagccagaagactgggacagttttagttcccagcttctgagacgtgagcttagcggtctttgtgatttcactttgcagtccaagggtgggagtaattctgcacgcatgatttggagacagaactagtaagggacagagaaagtttcgacttgtaaataaaaaggttccgtcgattaatttaccattagaaatagtaaccataatgtagattttggaggttgcttatgaggactgatgagccgtaccttcagtgccaaaggtgggagggacttggtggaaggaccccagtacctgatgccccctaaaaagggaggtgatggaattaaaccacccccaatcattggaagatttggaacctcactgaaaattggtattgttggattgccaaatgttgggaaatctactttcttcaatgtgttaaccaatagtcaggcttcagcagaaaacttcccgttctgcactattgatcctaatgagagcagagtacctgtgccagatgaaaggtttgactttctttgtcaataccacaaaccagcaagcaaaattcctgcctttctaaatgtggtggatattgctggccttgtgaaaggagctcacaatgggcagggcctggggaatgcttttttatctcatattagtgcctgtgatggcatctttcatctaacacgtgcttttgaagatgatgatatcacgcacgttgaaggaagtgtagatcctattcgagatatagaaataatacatgaagagcttcagcttaaagatgaggaaatgattgggcccattatagataaactagaaaaggtggctgtgagaggaggagataaaaaactaaaacctgaatatgatataatgtgcaaagtaaaatcctgggttatagatcaaaagaaacctgttcgcttctatcatgattggaatgacaaagagattgaagtgttgaataaacacttatttttgacttcaaaaccaatggtctacttggttaatctttctgaaaaagactacattagaaagaaaaacaaatggttgataaaaattaaagagtgggtggacaagtatgacccaggtgctttggtcattccttttagtggggccttggaactcaagttgcaagaattgagtgctgaggagagacagaagtatctggaagcgaacatgacacaaagtgctttgccaaagatcattaaggctgggtttgcagcactccaactagaatactttttcactgcaggcccagatgaagtgcgtgcatggaccatcaggaaagggactaaggctcctcaggctgcaggaaagattcacacagattttgaaaagggattcattatggctgaagtaatgaaatacgaagattttaaagaggaaggttctgaaaatgcagtcaaggctgctggaaagtacagacaacaaggcagaaattatattgttgaagatggagatattatcttcttcaaatttaacacacctcaacaaccgaagaagaaataaaatttagttattgctcagataaacatacaacttccaaaaggcatctgatttttaaaaaattaaaatttctgaaaaccaatgcgacaaataaagttggggagatgggaatctttgacaaacaaattatttttatttgttttaaaattaaaatactgtgtacccccccccccccatgaaatgcaggttcac

SEQ ID NO: 161729 - DNA, 485 bp, Homo sapiens
  Payload ID: 11572
  Gene Symbol: OLA1
  Gene Name: Obg-like ATPase 1
  ENST ID: ENST00000429575
  CDS Start-End: 177-485
atatagctaattgaagattctcatcttgtgtgtaagcccagtttgcagcaaatgtggactaattttatatagcaggtgcttttgaagatgatgatatcacgcacgttgaaggaagtgtagatcctattcgagatatagaaataatacatgaagagcttcagcttaaagatgaggaaatgattgggcccattatagataaactagaaaaggtggctgtgagaggaggagataaaaaactaaaacctgaatatgatataatgtgcaaagtaaaatcctgggttatagatcaaaagaaacctgttcgcttctatcatgattggaatgacaaagagattgaagtgttgaataaacacttatttttgacttcaaaaccaatggtctacttggttaatctttctgaaaaagactacattagaaagaaaaacaaatggttgataaaaattaaagagtgggtggacaagtatgacccaggtgctttggtcatt

SEQ ID NO: 161730 - DNA, 1270 bp, Homo sapiens
  Payload ID: 11572
  Gene Symbol: OLA1
  Gene Name: Obg-like ATPase 1
  Uniprot ID: Q9NTK5
  ENST ID: ENST00000428402
  CDS Start-End: 25-861
gtgtcatcgcccaggccgagcacgatgccccctaaaaagggaggtgatggaattaaaccacccccaatcattggaagatttggaacctcactgaaaattggtattgttggattgccaaatgttgggaaatctactttcttcaatgtgttaaccaatagtcaggcttcagcagaaaacttcccgttctgcactattgatcctaatgagagcagagtacctgtgccagatgaaaggtttgactttctttgtcaataccacaaaccagcaagcaaaattcctgcctttctaaatgtggtggatattgctggccttgtgaaaggagctcacaatgggcagggcctggggaatgcttttttatctcatattagtgcctgtgatggcatctttcatctaacacgtgcttttgaagatgatgatatcacgcacgttgaaggaagtgtagatcctattcgagatatagaaataatacatgaagagcttcagcttaaagatgaggaaatgattgggcccattatagataaactagaaaaggtggctgtgagaggaggagataaaaaactaaaacctgaatatgatataatgtgcaaagtaaaatcctgggttatagatcaaaagaaacctgttcgcttctatcatgattggaatgacaaagagattgaagtgttgaataaacacttatttttgacttcaaaaccaatggtctacttggttaatctttctgaaaaagactacattagaaagaaaaacaaatggctgctggaaagtacagacaacaaggcagaaattatattgttgaagatggagatattatcttcttcaaatttaacacacctcaacaaccgaagaagaaataaaatttagttattgctcagataaacatacaacttccaaaaggcatctgatttttaaaaaattaaaatttctgaaaaccaatgcgacaaataaagttggggagatgggaatctttgacaaacaaattatttttatttgttttaaaattaaaatactgtgtacccccccccccccatgaaatgcaggttcactaaatgtgaacagctttgcttttcacgtgattaagaccctactccaaattgtagaagcttttcaggaaccatattactctcatgatacttcattaatctccatcatgtatgccaagcctgacacatttgacagtgaggacaatgtggcttgctcctttttgaatctacagataatgcatgttttacagtactccagatgtctacactcaataaaacatttgacaaaa

SEQ ID NO: 161731 - DNA, 709 bp, Homo sapiens
  Payload ID: 11572
  Gene Symbol: OLA1
  Gene Name: Obg-like ATPase 1
  ENST ID: ENST00000427472
  CDS Start-End: 361-709
agttctcgagcctcagcctcccgagtagctggaattacaggctgcgcgcctgatggccggctaatttttttgtatttgtttttctttttagtagagacggggtttctccgtgttggccaggctggtctcgactcctggtctcaagcagtctgcccacctcggcctccccctcccaaagtgctgggattacaggcctgagccaccgtgcccggcccaacaaatattgattttagatcagtctttctgggacttctcagcaatgactcttttgacaacggatatgtttacagaactttttaaacatttttgctgaaaaaaaagtggatttagctctgtgttagttttggatcgctatatacaatgccccctaaaaagggaggtgatggaattaaaccacccccaatcattggaagatttggaacctcactgaaaattggtattgttggattgccaaatgttgggaaatctactttcttcaatgtgttaaccaatagtcaggcttcagcagaaaacttcccgttctgcactattgatcctaatgagagcagagtacctgtgccagatgaaaggtttgactttctttgtcaataccacaaaccagcaagcaaaattcctgcctttctaaatgtggtggatattgctggccttgtgaaaggagctcacaatgggcagggcctggggaatgcttttttatctcatattagtgcct

SEQ ID NO: 161732 - DNA, 20432 bp, Homo sapiens
  Payload ID: 11573
  Gene Symbol: OBSCN
  Gene Name: obscurin, cytoskeletal calmodulin and titin-interacting RhoGEF
  Uniprot ID: Q5VST9
  ENST ID: ENST00000284548
  CDS Start-End: 75-19937
tgcctcccagcctgtgcccccagcctgcgtgctgcccagagcccccatagagagaggtccccgccgccaccctcatggatcagccacagttcagcggggcgccccgctttctcacccggcccaaggccttcgtggtgtcggtgggcaaggacgccaccctcagctgccagatcgtgggtaatcccacgccacaggtgagctgggagaaggaccagcagccggtggcggccggcgcgcgcttccgtctggcccaggacggcgacctctaccgcctcactatcctggacctggcgctgggcgacagtgggcaatacgtgtgccgcgcgcgcaatgccataggcgaggccttcgctgctgtgggcctgcaggtggacgcggaggccgcgtgcgccgagcaggcgccgcacttcctgctgcggcccacgtccatccgcgtgcgcgagggctcagaggccaccttccgctgccgcgtgggtggctccccgaggccggcagtgagctggtccaaggacgggcggcgcctgggtgagcccgacggcccccgcgtgcgcgtggaggagctcggcgaggcaagtgcgctgcgcattcgggcggcgcggccgcgcgacggcggcacttacgaggtccgcgccgagaacccgctgggcgctgccagcgccgccgcggcgctagtggtggactcggacgccgcggacacggccagccggcccgggacctccacggccgcgctcctggcgcacctgcagcggcggcgcgaggctatgcgcgccgagggcgcccccgcctcaccgcccagcaccggcacgcgcacctgcacggtgactgaaggcaagcacgcgcgcctcagctgctacgtgaccggcgagcccaagcccgagacggtgtggaagaaggacggccagctggtgaccgagggccggcgccacgtggtgtacgaggacgcgcaggagaacttcgtgctcaagatcctcttctgcaagcagtcggaccgcggcctctacacctgcacggcgtccaacctcgtgggccagacctacagctctgtgctggtcgtagtgcgcgagcccgcggttcccttcaaaaagcggctgcaagatctggaggtgcgggagaaggagtcggccacgttcctatgtgaggtgccccagccgtccactgaggccgcgtggttcaaggaggagacgcggttgtgggcgagcgccaagtacggcatcgaggaggagggcaccgagcgccgcctgaccgtgcgcaatgtctcggccgacgacgacgcggtgtacatctgcgagacgccagagggcagccgcacggtggcggagctcgcagtccaaggaaacctcctccgaaagctccctcggaagacggcggtgcgcgtgggcgacacggctatgttttgcgtggagctggcggtcccggtgggccccgtccactggctgcggaaccaggaggaagtggtggcggggggccgcgtggccatctccgcggagggcacgcgccacacactaaccatctcccagtgctgcctggaggatgtgggccaggtggcctttatggctggcgactgccagacgtccacccagttctgcgtgtcggcccccaggaagcctcccctgcaaccccctgtggatcctgtggtaaaggccaggatggagagttccgtgattctcagctggtccccaccaccccatggggaacgccctgtcactatcgacggctacctggtagagaagaagaagcttggcacctacacctggatcaggtgccacgaggctgaatgggtggctacacctgagctgaccgtggctgatgtggcggaggaggggaacttccagttccgagtgtccgctctcaacagctttggtcagagtccctacctcgagttcccggggactgtccacctggcccccaagctggccgtgaggacaccgctgaaggcggtgcaggcggtagagggtggcgaggtcactttctccgtggacctcacggtggcctcagcgggtgagtggttcctggatgggcaggccctgaaggccagcagtgtgtatgagatccactgtgatcgcacccggcacacgctcaccatccgggaggtgcccgccagcctgcacggggcgcagctgaagttcgtggccaacggcattgagagcagcatccggatggaggtccgggcggccccagggctgactgccaacaagccgccagccgcagctgcccgggaggtgctggctcggctgcacgaggaggcgcagctgctggctgagctgtcagatcaggctgcggctgtgacgtggctgaaggatggtcgcacactgtccccaggccccaagtatgaggtgcaggcatcggccgggcggcgggtgctccttgtgcgagatgtggcccgggacgatgcaggcctctacgagtgcgtcagccgcgggggccgcatcgcctaccagctctccgtgcaaggcctcgcgcgctttctgcacaaggacatggcgggcagctgtgtggatgccgtggctgggggcccggcgcagtttgagtgtgagacctccgaagcccacgtccacgtgcactggtacaaggatggcatggagctgggccactccggtgagcgcttcttgcaggaggatgtggggacgcggcaccggctggtggcagccacagtcaccaggcaggatgaaggcacctactcctgccgcgtgggcgaggactctgtggacttccggctccgcgtctctgagcccaaggtggtgtttgctaaggagcagctggcacgcaggaagctgcaggcagaggcaggagccagtgccacactgagctgcgaggtggcccaggcccagacggaggtgacgtggtacaaggatgggaagaagctgagctccagctcgaaagtgtgcatggaggccacaggctgcacgcgcaggctggttgtgcagcaggcaggccaggcggatgccggggagtatagctgcgaggctgggggccagcggctctccttccatctggatgtcaaagagcccaaggtggtgtttgccaaggaccaggtggcacacagtgaggtgcaggctgaggcaggggccagtgccacgctgagctgcgaggtggcccaggcccagacggaggtgatgtggtacaaagatgggaagaagctgagctccagcttgaaagtgcatgtagaggccaagggctgcagacggaggctggtggtgcagcaggcaggcaagacagatgccggggactacagctgcgaggccaggggccagagggtctccttccgcctgcacatcacagagcccaagatgatgtttgcaaaggagcagtcagtgcataatgaggtgcaggctgaggcgggggccagtgccatgctgagctgtgaggtggcccaggcccagacggaggtgacgtggtacaaggatgggaagaagctgagctccagctcaaaagtgggcatggaggtcaaagggtgcacacggaggctggtgctgccacaggcgggcaaagcagatgctggggagtacagctgtgaggctgggggccagagagtctccttccacctgcacatcacagagcccaagggggtgtttgcgaaggagcagtcagtgcataatgaggtgcaggctgaggcggggaccactgccatgctgagctgtgaggtggcccagccccagacagaggtgacgtggtacaaggacgggaagaagctgagctccagctcaaaagtacgcatggaggtcaagggctgcacacgaaggctggtagtgcagcaggtgggcaaagcagatgctggggagtacagctgcgaggctgggggccagagagtctcctttcaactgcacatcacagagcccaaggcagtgtttgccaaggagcagttggtgcataatgaggtgcggactgaggcaggggccagtgccacactgagctgtgaggtggcccaggcccagacagaggtgacgtggtacaaggatgggaagaagctgagctccagttcgaaagtgcgcatagaggctgcgggctgcatgcggcagctggtggtgcagcaggcaggccaggcagatgctggggagtacacctgtgaggctgggggccagcggctctccttccacctggatgtttcagagcccaaggcggtgtttgcaaaggagcagctggcacacaggaaggtgcaggccgaggcgggggccattgccacgctgagctgcgaggtggcccaggcccagacagaggtgacgtggtacaaggacgggaagaagctgagctccagctcgaaagttcgaatggaggctgtgggctgcacacggaggctggtggtgcagcaggcatgccaggcggacaccggggagtatagctgcgaggccgggggccagcggctctccttcagcctggacgtggcagagcccaaggtggtgtttgccaaggagcagccagtgcacagggaggtgcaggcccaggcgggggccagcaccacactcagctgcgaggtggctcaggcccagacggaggtgatgtggtacaaggacgggaagaagctgagcttcagctcgaaagtgcgcatggaggctgtgggctgcacacggaggctggtggtgcagcaggcgggccaggcggtcgccggggagtacagctgcgaggcggggagccagcggctctccttccacctgcacgtggcagagcccaaggcggtgtttgccaaggagcagccagcgagcagggaggtgcaggctgaggcggggaccagtgccacgctgagctgcgaggtggcccaggcccagacagaggtgacgtggtacaaggacgggaagaaactgagctccagctcgaaagtgcgaatggaggccgtgggctgcacacggaggctggtggtgcaggaggcaggccaggcggacgccggggagtacagctgcaaggccggggatcagcggctgtccttccacctgcacgtggcagagcccaaggtggtgtttgccaaggagcagccagcacacagggaggtgcaggctgaggcgggggccagtgccacgctgagctgcgaggtggcccaggcccagacagaggtgacgtggtacaaggatgggaagaagctgagttccagctcgaaagtgcgcgtggaggccgtgggctgcacacggaggctggtggtgcagcaggcgggccaggcagaggccggggagtacagctgcgaggcagggggtcagcagctctccttccgcctgcaggtggcagagctggagccccaaatttcagagagaccctgccgcagggagcctctggtggtcaaggagcatgaagacatcatcctgaccgccacactggccacaccctctgcggccacggtgacctggctcaaggatggtgtggagattcgccgcagcaagcggcatgagacagccagccagggggacacccacaccctgaccgtgcatggcgcccaggttctggacagcgccatctacagctgccgtgtgggcgcagaggggcaggacttcccagtgcaggtggaagaggtggccgccaagttctgccggctgctggagcctgtgtgcggcgagctgggtggcacggtgacactggcctgcgagctaagcccagcgtgtgcagaggtggtgtggcgctgcggcaacacgcagcttcgggtgggcaagcgcttccagatggtggccgaggggcccgtgcgctcactcactgtgttggggctgcgcgcagaggacgcaggggagtacgtgtgtgagagccgtgatgaccacaccagtgcgcagctcaccgtcagtgtgccccgagtggtgaagtttatgtctgggctgagcaccgtggtcgcagaggagggcggcgaggccaccttccagtgcgtggtgtcccccagtgatgtggcagtcgtgtggttccgggacggtgccctgcttcagcccagcgagaagtttgccatatcacagagtggcgccagccacagcctgaccatctcagacctggtgctggaggacgcgggccagatcaccgtggaggctgagggcgcctcatcctctgctgccctgagggtccgagaggcgcctgtgctgttcaaaaagaagctggagccgcagacggtggaggagcggagctcggtgaccctggaggtggagctgacgcggccgtggccggagctgaggtggacacggaacgcgacggccctggcgccgggaaagaacgtggagatccacgccgagggcgcccgccaccgcctggttctgcacaacgtaggttttgccgaccgtggcttctttggctgcgagacgccggatgacaagacacaggccaaactcaccgtggagatgcgccaggtacggctcgtacggggcctgcaggcagtggaggcacgggagcagggcacggctaccatggaggtgcagctgtcgcatgcggacgtggatggcagctggactcgtgacggtctgcggttccagcaggggcccacgtgccacctggctgtgcggggccccatgcacaccctcacactctcggggctgcggccagaggatagtggccttatggtcttcaaggccgaaggagtgcacacgtcggcgcggctcgtggtcaccgagcttcccgtgagcttcagccgcccgctgcaggacgtggtgaccactgagaaggagaaggttaccctggagtgcgagctgtcgcgtcctaatgtggatgtgcgctggctgaaggacggtgtggagctgcgggcaggcaagacgatggccatcgcagcccagggcgcctgcaggagcctcaccatttaccggtgcgagttcgcggatcagggagtgtatgtgtgtgatgcccatgatgcccagagctctgcctccgtgaaggtacaaggaaggacatacactctcatctaccggagagtcctggcggaagatgcaggagagatccaatttgtagccgaaaatgcagaatcgcgagcccagctccgagtgaaggagctgccagtgaccctcgtgcgcccgctgcgggacaagattgccatggagaagcaccgcggtgtgctggagtgtcaggtgtcccgggccagcgcccaggtgcggtggttcaagggcagtcaggagctgcagcccgggcccaagtacgagctggtcagtgatggcctctaccgcaagctgatcatcagtgatgtccacgcagaggacgaggacacctacacctgtgacgccggtgatgtcaagaccagtgcacagttcttcgtggaagagcaatccatcaccattgtgcggggtctgcaggacgtgacagtgatggagcccgctcctgcctggtttgagtgtgagacctccatcccctcagtgcggccacctaagtggctcctggggaagacggtgttgcaggctggggggaacgtgggcctggagcaggagggcacggtgcaccggctgatgctgcggcggacctgctccaccatgaccgggcccgtgcacttcaccgttggcaagtcgcgctcctctgcccgcctggtggtctcagacatccccgtagtcctcacacggccgttggagcccaagacagggcgtgagctgcagtcagtggtcctgtcctgcgacttccggccagcccccaaggctgtgcagtggtacaaggatgacacgcccctgtctccctctgagaagtttaagatgagcctggagggtcagatggctgagctgcgcatcctccggctcatgcctgctgatgctggtgtctaccggtgccaggcgggcagtgcccacagcagcactgaggtcactgtggaagcgcgggaggtgacagtgacagggccgctacaggatgcagaggccacggaggagggctgggccagcttctcctgtgagctgtcccacgaggatgaggaggtcgagtggtcgctcaacgggatgcccctgtacaacgacagcttccatgagatctcacacaagggccggcgccacacgctggtactgaagagcatccagcgggctgatgcgggcatagtacgcgcctcctccctgaaggtgtcgacctctgcccgcctggaggtccgagtgaagccggtggtgttcctgaaggcgctggatgacctgtccgcagaggagcgcggcaccctggccctgcagtgtgaagtctctgaccccgaggcccatgtggtgtggcgcaaagatggcgtgcagctgggccccagtgacaagtatgacttcctgcacacggcgggcacgcgggggctcgtggtgcatgacgtgagccctgaagacgccggcctgtacacctgccacgtgggctccgaggagacccgggcccgggtccgcgtgcacgatctgcacgtgggcatcaccaagaggctgaagacaatggaggtgctggaaggggaaagctgcagctttgagtgcgtcctgtcccacgagagtgccagcgacccggccatgtggacagtcggtgggaagacagtgggcagctccagccgcttccaggccacacgtcagggccgaaaatacatcctggtggtccgggaggctgcaccaagtgatgccggggaggtggtcttctctgtgcggggcctcacctccaaggcctcactcattgtcagagagaggccggccgccatcatcaagcccctggaagaccagtgggtggcgccaggggaggacgtggagctgcgctgtgagctgtcacgggcgggaacgcccgtgcactggctgaaggacaggaaggccatccgcaagagccagaagtatgatgtggtctgcgagggcacgatggccatgctggtcatccgcggggcctcgctcaaggacgcgggcgagtacacgtgtgaggtggaggcttccaagagcacagccagcctccatgtggaagaaaaagcaaactgcttcacagaggagctgaccaatctgcaggtggaggagaaaggcacagctgtgttcacgtgcaagacggagcaccccgcggccacagtgacctggcgcaagggcctcttggagctacgggcctcagggaagcaccagcccagccaggagggcctgaccctgcggctcaccatcagtgccctggagaaggcagacagcgacacctatacctgcgacattggccaggcccagtcccgggcccagctcctagtgcaaggccggagagtgcacatcatcgaggacctggaggatgtggatgtgcaggagggctcctcggccaccttccgttgccggatctccccggccaactacgagcctgtgcactggttcctggacaagacacccctgcatgccaacgagctcaatgagatcgatgcccagcccgggggctaccacgtgctgaccctgcggcagctggcgctcaaggactcgggcaccatctactttgaggcgggtgaccagcgggcctcggccgccctgcgggtcactgagaagccaagcgtcttctcccgggagctcacagatgccaccatcacagagggtgaggacttgaccctggtgtgcgagaccagcacctgcgacattcctgtgtgctggaccaaggatgggaagaccctgcgggggtctgcccggtgccagctgagccatgagggccaccgggcccagctgctcatcactggggccaccctgcaggacagtggacgctacaagtgtgaggctgggggcgcctgcagcagctccattgtcagggtgcatgcgcggccagtgcggttccaggaggccctgaaggacctggaggtgctggagggtggtgctgccacactgcgctgtgtgctgtcatctgtggctgcgcccgtgaagtggtgctatggaaacaacgtcctgaggccaggtgacaaatacagcctacgccaggagggtgccatgctggagctggtggtccggaacctccggccgcaggacagcgggcggtactcatgctccttcggggaccagactacttctgccaccctcacagtgactgccctgcctgcccagttcatcgggaaactgagaaacaaggaggccacagaaggggccacggccacgctgcggtgtgagctgagcaaggcagcccctgtggagtggagaaaggggtccgagaccctcagagatggggacagatactgtctgaggcaggacggggccatgtgtgagctgcagatccgtggcctggccatggtggatgccgcggagtactcgtgtgtgtgtggagaggagaggacctcagcctcactcaccatcaggcccatgcctgcccacttcataggaagactgagacaccaagagagcatagaaggggccacagccacgctgcggtgtgagctgagcaaggcggcccccgtggagtggaggaaggggcgtgagagcctcagagatggggacagacatagcctgaggcaggacggggctgtgtgcgagctgcagatctgtggcctggctgtggcagatgctggggagtactcctgtgtgtgtggggaggagaggacctctgccactctcaccgtgaaggccctgccagccaagttcacagagggtctgaggaatgaagaggccgtggaaggggccacagccatgttgtggtgtgaactgagcaaggtggcccctgtggagtggaggaaggggcccgagaacctcagagatggggacagatacatcctgaggcaggaggggaccaggtgtgagctgcagatctgtggcctggccatggcggacgccggggagtacttgtgtgtgtgcgggcaggagaggacctcagccacgctcaccatcagggctctgcctgccaggttcatagaagatgtgaaaaaccaggaggccagagaaggggccacagctgtgctgcagtgtgagctgaacagtgcagcccctgtggagtggagaaaggggtctgagacccttagagatggggacagatacagcctgaggcaggacgggactaaatgtgagctgcagattcgtggcctggccatggcagacactggggagtactcgtgcgtgtgcgggcaggagaggacctcggctatgctcaccgtcagggctctacccatcaagttcacagagggtctgaggaacgaagaggccacagaaggggcaacagccgtgctgcggtgtgagctgagcaagatggcccccgtggagtggtggaaggggcatgagaccctcagagatggagacagacacagcctgaggcaggacggggccaggtgtgagctgcagatccgcggcctcgtggcagaggacgctggggagtacctgtgcatgtgcgggaaggagaggacctcagccatgctcaccgtcagggccatgccttccaagttcatagagggtctgaggaatgaagaggccacagaaggggacacggccacgctgtggtgtgagctgagcaaggcggcaccggtggagtggaggaaggggcatgagaccctcagagatggggacagacacagcctgaggcaggacgggtccaggtgtgagctgcagatccgtggcctggctgtggtggatgccggggagtactcgtgtgtgtgcgggcaggagaggacctcagccacactcactgtcagggccctgcctgccagattcatagaagatgtgaaaaaccaggaggccagagaaggggccacggccgtgctgcaatgtgagctgagcaaggcggcccccgtggagtggaggaaggggtctgagaccctcagaggtggggacagatacagcctgaggcaggatgggaccagatgtgagctgcagattcatggcctgtctgtggcagacactggggagtactcgtgtgtgtgcgggcaggagaggacctcggccacactcaccgtcagggccccacagccagtgttccgggagccgctgcagagtctgcaggcggaggagggctccacggccaccctgcagtgtgagctgtctgagcccactgctacagtggtctggagcaagggtggcctgcagctgcaggccaatgggcgccgggagccacggcttcagggctgcaccgcggagctggtgttacaggacctacaacgtgaagacactggcgaatacacttgcacctgtggctcccaggccaccagtgccaccctcactgtcacagctgcgcctgtgcggttcctccgagagctgcagcaccaggaggtggatgagggaggcaccgcacacttatgctgcgagctgagccgggcgggtgcgagcgtggagtggcgcaagggctccctacagctcttcccttgtgccaagtaccagatggtgcaggatggtgcagctgcagagctgctggtacgcggagtggagcaggaggatgcgggtgactacacgtgtgacacgggccacacgcagagcatggccagcctctctgtccgtgtccccaggcccaagttcaagacccggcttcagagtctggagcaggagacaggtgacatagcccggctgtgctgtcagctgagtgatgcagagtcgggggccgtggtgcaatggctcaaggagggcgtggagctgcatgcgggccccaagtacgagatgcggagccagggggccacgcgggagctgctgatccaccaactggaggccaaggacacgggcgagtatgcctgtgtgacaggcggccagaaaaccgctgcctccctcagggtcacagagcctgaggtgaccattgtacgggggctggttgatgcggaggtgacggccgatgaggatgttgagttcagctgtgaggtgtccagggctggagccacaggcgtgcagtggtgcctacagggcctgccactgcaaagcaatgaggtgacagaggtggctgtgcgggatggccgcatccacaccctgcggctgaagggcgtgacgcccgaggacgctggcactgtctccttccatttgggaaaccatgcttcctctgcccagctcaccgtcagagctcctgaggtgaccatcctggagcccctgcaggacgtgcagctcagtgagggccaggatgccagcttccagtgccggctatccagagcttcaggccaggaggcccgctgggctttaggaggggtgcccctgcaggccaacgagatgaatgacatcactgtggagcagggcacactccacctgctcaccctgcacaaggtgacccttgaggatgctggaactgtcagtttccacgtgggcacgtgtagctctgaggcccagctgaaagtcacagccaagaacacggtggtgcgggggctggagaatgtggaggcgctggagggcggcgaggcgctgttcgagtgccagctgtcccagcccgaggtggccgcccacacctggctgctggacgacgaacccgtgcacacctcggagaacgccgaggtggtcttcttcgagaacggcctgcgccacctgctgctgctcaaaaacttgcggccacaagacagctgccgggtgaccttcctggctggggatatggtgacgtccgcattcctcacggtccgaggctggcgcctggagatcctggagcctctgaaaaacgcggcggtccgggccggcgcacaggcatgcttcacctgcacgctcagcgaggcggtgcccgtgggagaggcgtcctggtacatcaatggcgcggcagtgcagccggatgacagcgactggactgtcaccgccgacggcagtcaccacgccctactgctgcgcagcgcccagccccaccacgccggggaggtcaccttcgcttgccgcgacgccgtggcctctgcgcggctcaccgtgctgggcctccctgatcccccagaggatgctgaggtggtggctcgcagcagccacactgtgacactgtcttgggcagctcccatgagtgatggaggcggtggtctctgtggctaccgcgtggaggtgaaggagggggccacaggccagtggcggctgtgccacgagctggtgcctggacccgagtgtgtggtggatggcctggcccccggggagacctaccgcttccgtgtggcagctgtgggccctgtgggtgctggggaaccggttcacctgccccagacagtgcggcttgcagagccaccgaagcctgtgcctccccagccctcagcccctgagagccggcaggtggcagctggtgaagatgtctctctggagcttgaggtggtggctgaggctggtgaggtcatctggcacaagggaatggagcgcatccagcccggtgggcggttcgaggtggtctcccagggtcggcaacagatgctggtgatcaagggcttcacggcagaagaccagggcgagtaccactgtggcctggctcagggctccatctgccctgcggctgccaccttccaggtggcactgagcccagcctctgtggatgaggcccctcagcccagcttgccccccgaggcagcccaggagggtgacctgcacctactgtgggaggccctggctcggaaacgtcgcatgagccgtgagcccacgctggactccattagcgagctgccagaggaggacggccgctcgcagcgcctgccacaggaggcagaggaggtggcacctgatctctctgaaggctactccacggccgatgagctggcccgcactggagatgctgacctctcacacaccagctctgatgatgagtcccgggcaggcaccccttccctggtcacctacctcaagaaggctgggaggccaggcacctcaccactggccagcaaggttggggccccagcagccccctctgtgaagccacagcagcagcaggagccactggctgctgtgcgcccaccactgggagacctgagcaccaaagacctgggtgatccctcaatggacaaggcagctgtgaagatccaggctgcctttaagggctacaaggtccggaaggagatgaagcagcaggaagggcccatgttctcccacacatttggggacaccgaggcacaggtgggggatgccctgcggctggagtgtgtcgtggccagcaaggcagatgtgcgagcccgctggctgaaggatggtgtggagctgaccgatgggcggcaccatcacatcgaccagcttggggatggcacctgctctctgctgatcactggcctggaccgtgctgatgctggctgctacacctgtcaggtgagcaacaagtttggccaggtgacccacagtgcctgtgtggtggtcagtgggtcagagagtgaagccgagagctcctctgggggtgagctggacgatgccttccgccgggctgcccgtcggctgcaccggctcttccgcaccaaaagtccggctgaagtttcagatgaggagctcttcctgagtgcagacgagggccctgcagagccagaggagcccgcggactggcagacataccgcgaagatgagcatttcatctgcatccgttttgaggcgctcactgaggcccgccaggcggtaactcgcttccaggagatgtttgccacactgggcattggggtggagatcaagctggtggaacaggggcctcggagggtagagatgtgcatcagcaaagagactcctgcccctgtggtgcctccagagccattgcccagcctactgacttctgacgctgccccagtgttcctgactgagttgcagaaccaagaagtgcaggatgggtatcctgtgagctttgactgcgtggtgacaggtcagcccatgcccagtgtgcgctggttcaaggatgggaagttgttggaggaggatgatcactacatgattaatgaagaccaacagggtggccatcagctcatcatcacagccgtggtgccagcagacatgggcgtctaccgctgcctggccgagaacagcatgggtgtctcctccaccaaggctgagctccgtgtggacttgacaagcacagactatgacactgcagcagatgccacggagtcctcatcctacttcagtgcccaaggctacctgtccagccgggagcaggagggaacagagtccaccactgatgagggccagctgccccaggtggtggaggagctgagagacctccaggtggcccctggcacacgcctggccaagttccagctcaaggtgaaaggctaccctgctcccagattatactggttcaaagatggccagcccctgaccgcatctgcccacatccgcatgactgacaagaagatcctgcacaccctggagatcatctccgtcacccgggaggactctggccagtatgcagcctatatcagcaatgccatgggtgctgcctactcgtctgcccggctgctggttcgaggccctgatgagccagaagagaagcctgcatcagatgtgcatgagcagctggtgccgccccgaatgctggagaggttcacccccaagaaagtgaagaaaggctccagcatcaccttctctgtgaaggtagaaggacgcccggtgcccaccgtgcactggctcagggaggaggctgagagaggcgtgctgtggattggccctgacacaccgggctacaccgtggccagctctgcgcagcagcacagcctggtcctgctggacgtgggccggcagcaccagggcacctacacatgcattgccagcaacgctgccggccaggccctctgctccgccagcctgcacgtctcgggcctgcctaaggtggaggagcaggagaaagtgaaggaagcgctgatttccactttcctgcaggggaccacacaagccatctcagcacaggggttggaaactgcgagttttgctgaccttggtgggcagaggaaagaagagcctctggctgccaaggaggccctcggccacctgtccctcgctgaggtgggcacagaggagttcctgcagaaactgacctcccagatcactgagatggtatcggccaagatcacgcaggccaagctgcaggtgcccggaggtgacagtgatgaggactccaagacaccatctgcatccccccgccatggccgatcacggccatcctccagcatccaggagtcttcctcagagtcagaggacggcgatgcccgaggcgagatctttgacatctacgtggtcaccgctgactacctgcccctaggggctgagcaggatgccatcacgctgcgggaaggccagtatgtggaggtcctggatgcagcccacccactgcgctggcttgtccgcaccaagcccaccaagtccagcccctcacggcagggctgggtgtcaccagcctacctggacaggaggctcaagctgtcacctgagtggggggccgctgaggcccctgagttccctggggaggctgtgtctgaagacgaatacaaggcaaggctgagctctgtgatccaggagctgctgagttctgagcaggccttcgtggaggagctgcagttcctgcagagccaccacctgcagcacctggagcgctgcccccacgtgcccatagctgtggccggccagaaggcagtcatcttccgcaatgtgcgggacatcggccgcttccacagcagcttcctgcaggagttgcagcagtgcgacacggacgacgacgtggccatgtgcttcatcaagaaccaggcggcctttgagcagtacctggagttcctggtggggcgtgtgcaggctgagtcggtggtcgtcagcacggccatccaggagttctacaagaaatacgcggaggaggccctgttggcaggggacccctctcagcccccgccaccacctctgcagcactacctggagcagccagtggagcgggtgcagcgctaccaggccttgctgaaggagctgatccgcaacaaggcgcggaacagacagaactgcgcgctgctggagcaggcctatgccgtggtgtctgccctgccacagcgcgctgagaacaagctgcacgtgtccctcatggagaactacccaggcaccctgcaggccctgggcgagcccatccgccagggccacttcatcgtgtgggagggtgcaccgggggcccgcatgccctggaagggccacaaccgtcacgtgttcctcttccgcaaccacctggtaatctgcaagccccggcgagactcccgcaccgataccgtcagctacgtgttccggaacatgatgaagctgagcagcatcgacctgaacgaccaggtggagggggatgaccgcgccttcgaggtgtggcaggagcgggaggactcggtgcgcaagtacctgctgcaggcacggacagccattatcaagagctcgtgggtgaaggagatctgtggcatccagcagcgtctggccctgcctgtgtggcggcccccggactttgaagaggagctggccgactgcacagccgagctgggtgagacagtcaagctggcctgccgcgtgacgggcacacccaagcctgtcatcagctggtacaaagatgggaaagcagtgcaggtggacccccaccacatcctcattgaagaccctgatggctcgtgtgcactcatcctggacagcctgaccggtgtggactctggccagtacatgtgcttcgcggccagcgccgctggcaactgcagtaccctgggcaagatcctggtgcaagtcccaccacggttcgtgaacaaggtccgggcctcaccctttgtggagggagaggacgcccagttcacctgcaccatcgaaggcgccccgtacccgcagatcaggtggtacaaggacggggccctgctgaccactggcaacaagttccagacactgagtgagcctcgcagcggcctgctagtgctggtgatccgggcggccagcaaggaggacctggggctctacgagtgtgagctggtgaaccggctgggctccgcgcgggctagtgcggagctgcgcattcagagccccatgctgcaggcccaggagcagtgtcacagggagcagctcgtggctgcagtggaagtcactgagcaagagactaaagtccccaagaaaaccgtcatcatagaagagaccatcaccactgtggtgaagagcccacgtggccaacgacggtcccccagcaagtccccctcccgctcaccttcccgctgctctgccagcccgctgaggccaggcctactggcccccgacctgctgtacctgccaggtgctggccagccccgcaggccggaggcagaaccaggccagaagcccgtggtgcccacactgtatgtgacggaggccgaggcccactctccagctctgcccggactctcggggccccagcccaagtgggtggaggtggaggagaccattgaagtccgggtgaagaagatgggcccgcagggtgtgtctcccaccacagaggtgcccaggagctcatcggggcatctcttcacactgcccggtgcgacccccggaggggaccccaattccaacaactccaacaacaagctgctggcccaggaggcctgggcccagggcacagccatggtcggcgtcagagagccccttgtcttccgcgtggatgccagaggcagtgtggactgggctgcttctggcatgggcagcctggaggaggagggcaccatggaggaggcgggagaggaagagggggaagacggagacgcctttgtgacggaggagtcccaggacacacacagccttggggatcgtgaccccaagatcctcacgcacaacggccgcatgctgacactggctgacctggaagattacgtgcctggggaaggggagaccttccactgtggtggccctgggcctggcgcccctgatgaccctccctgcgaggtctcggtgatccagagagagatcggggagcccacggtggggcagcctgtgctgctcagcgtggggcatgcactgggtccccgaggccctctcggcctctttaggcctgagccccgtggggcgtcaccaccgggaccccaggtccgtagccttgagggcacctccttcctcttgcgggaggccccggctcggcctgtgggcagtgctccctggacgcagtctttctgcacccgcatccggcgttctgcggacagtggccagagcagcttcaccacagagctttccacccagaccgtcaacttcgggacagtgggggagacggtcacccttcacatctgcccagacagggatggggatgaggcggcacagccctgatgctgctgccatggtggcttggggcagcggggagaaaggagtgtccttgaggcctaggacgctgcccggcctcagcagcagccctgggagcctcctgagggccctccctgtccctggccacgggcccttcttacctcactcaacttcagccaggaggactgggtggtgcttgcaatgttggaatgaccggctcaaagacctcagctctgggctgtttcctgtcagcctggcaggagcctcaggactgtggacgaaggatgtggccttgggcatttgtcctgttcccacatgggcctggtccctccctcctggccccagccacagctgccaggcctgacatggccttgcctctcctgcagtcttggtgactgagacccttgggtggcgcttcccagctctgcaggccctcctggccttttctgcagggtggacacagggtctgtgtgtgggcagcagcccctgtctctcagcaagaataaagcagcttcctgtgca

SEQ ID NO: 161733 - DNA, 2983 bp, Homo sapiens
  Payload ID: 11573
  Gene Symbol: OBSCN
  Gene Name: obscurin, cytoskeletal calmodulin and titin-interacting RhoGEF
  ENST ID: ENST00000366706
  CDS Start-End: 1-2577
gcaggcaagacgatggccatcgcagcccagggcgcctgcaggagcctcaccatttaccggtgcgagttcgcggatcagggagtgtatgtgtgtgatgcccatgatgcccagagctctgcctccgtgaaggtacaaggccgcaacatccagatcgtgaggcccctggaggatgtggaagtgatggagaaggacggtgccaccttctcctgtgaggtctcccacgacgaagtgcctggccagtggttctgggagggcagtaaactgcggcccactgacaacgtgcgcatccgccaggaaggaaggacatacactctcatctaccggagagtcctggcggaagatgcaggagagatccaatttgtagccgaaaatgcagaatcgcgagcccagctccgagtgaaggagctgccagtgaccctcgtgcgcccgctgcgggacaagattgccatggagaagcaccgcggtgtgctggagtgtcaggtgtcccgggccagcgcccaggtgcggtggttcaagggcagtcaggagctgcagcccgggcccaagtacgagctggtcagtgatggcctctaccgcaagctgatcatcagtgatgtccacgcagaggacgaggacacctacacctgtgacgccggtgatgtcaagaccagtgcacagttcttcgtggaagagcaatccatcaccattgtgcggggtctgcaggacgtgacagtgatggagcccgctcctgcctggtttgagtgtgagacctccatcccctcagtgcggccacctaagtggctcctggggaagacggtgttgcaggctggggggaacgtgggcctggagcaggagggcacggtgcaccggctgatgctgcggcggacctgctccaccatgaccgggcccgtgcacttcaccgttggcaagtcgcgctcctctgcccgcctggtggtctcagacatccccgtagtcctcacacggccgttggagcccaagacagggcgtgagctgcagtcagtggtcctgtcctgcgacttccggccagcccccaaggctgtgcagtggtacaaggatgacacgcccctgtctccctctgagaagtttaagatgagcctggagggtcagatggctgagctgcgcatcctccggctcatgcctgctgatgctggtgtctaccggtgccaggcgggcagtgcccacagcagcactgaggtcactgtggaagcgcgggaggtgacagtgacagggccgctacaggatgcagaggccacggaggagggctgggccagcttctcctgtgagctgtcccacgaggatgaggaggtcgagtggtcgctcaacgggatgcccctgtacaacgacagcttccatgagatctcacacaagggccggcgccacacgctggtactgaagagcatccagcgggctgatgcgggcatagtacgcgcctcctccctgaaggtgtcgacctctgcccgcctggaggtccgagtgaagccggtggtgttcctgaaggcgctggatgacctgtccgcagaggagcgcggcaccctggccctgcagtgtgaagtctctgaccccgaggcccatgtggtgtggcgcaaagatggcgtgcagctgggccccagtgacaagtatgacttcctgcacacggcgggcacgcgggggctcgtggtgcatgacgtgagccctgaagacgccggcctgtacacctgccacgtgggctccgaggagacccgggcccgggtccgcgtgcacgatctgcacgtgggcatcaccaagaggctgaagacaatggaggtgctggaaggggaaagctgcagctttgagtgcgtcctgtcccacgagagtgccagcgacccggccatgtggacagtcggtgggaagacagtgggcagctccagccgcttccaggccacacgtcagggccgaaaatacatcctggtggtccgggaggctgcaccaagtgatgccggggaggtggtcttctctgtgcggggcctcacctccaaggcctcactcattgtcagagagaggccggccgccatcatcaagcccctggaagaccagtgggtggcgccaggggaggacgtggagctgcgctgtgagctgtcacgggcgggaacgcccgtgcactggctgaaggacaggaaggccatccgcaagagccagaagtatgatgtggtctgcgagggcacgatggccatgctggtcatccgcggggcctcgctcaaggacgcgggcgagtacacgtgtgaggtggaggcttccaagagcacagccagcctccatgtggaagaaaaagcaaactgcttcacagaggagctgaccaatctgcaggtggaggagaaaggcacagctgtgttcacgtgcaagacggagcaccccgcggccacagtgacctggcgcaagggcctcttggagctacgggcctcagggaagcaccagcccagccaggagggcctgaccctgcggctcaccatcagtgccctggagaaggcagacagcgacacctatacctgcgacattggccaggcccagtcccgggcccagctcctagtgcaaggtgaggcggccaagtgtgctcgggcctaggctttgaatggcacggagacttggaggtggacaggcccagcctcagtttcttatcatgagggtatagggggtgcaccctgggtggtcactgaggctccccagcatggctgtgaatgagctgctggtgctcacttactcgtgtgtttatttggtcactgtgtgtttctcccacatgccccgtgtgcctggcccccatgcgtaagctcagcgtgtatccgtacataaaacgtgtcacccttatcccagagggacagcctgactcagccgtgccaggcagcctcaggtgctcccagggaagaactgatggtcattagggttgtcattgagagttacagtggcattttagtctttttcttgttgtttacaacagaatacctgaaactgggtaatttataaaggaaataaa

SEQ ID NO: 161734 - DNA, 26933 bp, Homo sapiens
  Payload ID: 11573
  Gene Symbol: OBSCN
  Gene Name: obscurin, cytoskeletal calmodulin and titin-interacting RhoGEF
  ENST ID: ENST00000366707
  CDS Start-End: 75-26852
tgcctcccagcctgtgcccccagcctgcgtgctgcccagagcccccatagagagaggtccccgccgccaccctcatggatcagccacagttcagcggggcgccccgctttctcacccggcccaaggccttcgtggtgtcggtgggcaaggacgccaccctcagctgccagatcgtgggtaatcccacgccacaggtgagctgggagaaggaccagcagccggtggcggccggcgcgcgcttccgtctggcccaggacggcgacctctaccgcctcactatcctggacctggcgctgggcgacagtgggcaatacgtgtgccgcgcgcgcaatgccataggcgaggccttcgctgctgtgggcctgcaggtggacgcggaggccgcgtgcgccgagcaggcgccgcacttcctgctgcggcccacgtccatccgcgtgcgcgagggctcagaggccaccttccgctgccgcgtgggtggctccccgaggccggcagtgagctggtccaaggacgggcggcgcctgggtgagcccgacggcccccgcgtgcgcgtggaggagctcggcgaggcaagtgcgctgcgcattcgggcggcgcggccgcgcgacggcggcacttacgaggtccgcgccgagaacccgctgggcgctgccagcgccgccgcggcgctagtggtggactcggacgccgcggacacggccagccggcccgggacctccacggccgcgctcctggcgcacctgcagcggcggcgcgaggctatgcgcgccgagggcgcccccgcctcaccgcccagcaccggcacgcgcacctgcacggtgactgaaggcaagcacgcgcgcctcagctgctacgtgaccggcgagcccaagcccgagacggtgtggaagaaggacggccagctggtgaccgagggccggcgccacgtggtgtacgaggacgcgcaggagaacttcgtgctcaagatcctcttctgcaagcagtcggaccgcggcctctacacctgcacggcgtccaacctcgtgggccagacctacagctctgtgctggtcgtagtgcgcgagcccgcggttcccttcaaaaagcggctgcaagatctggaggtgcgggagaaggagtcggccacgttcctatgtgaggtgccccagccgtccactgaggccgcgtggttcaaggaggagacgcggttgtgggcgagcgccaagtacggcatcgaggaggagggcaccgagcgccgcctgaccgtgcgcaatgtctcggccgacgacgacgcggtgtacatctgcgagacgccagagggcagccgcacggtggcggagctcgcagtccaaggaaacctcctccgaaagctccctcggaagacggcggtgcgcgtgggcgacacggctatgttttgcgtggagctggcggtcccggtgggccccgtccactggctgcggaaccaggaggaagtggtggcggggggccgcgtggccatctccgcggagggcacgcgccacacactaaccatctcccagtgctgcctggaggatgtgggccaggtggcctttatggctggcgactgccagacgtccacccagttctgcgtgtcggcccccaggaagcctcccctgcaaccccctgtggatcctgtggtaaaggccaggatggagagttccgtgattctcagctggtccccaccaccccatggggaacgccctgtcactatcgacggctacctggtagagaagaagaagcttggcacctacacctggatcaggtgccacgaggctgaatgggtggctacacctgagctgaccgtggctgatgtggcggaggaggggaacttccagttccgagtgtccgctctcaacagctttggtcagagtccctacctcgagttcccggggactgtccacctggcccccaagctggccgtgaggacaccgctgaaggcggtgcaggcggtagagggtggcgaggtcactttctccgtggacctcacggtggcctcagcgggtgagtggttcctggatgggcaggccctgaaggccagcagtgtgtatgagatccactgtgatcgcacccggcacacgctcaccatccgggaggtgcccgccagcctgcacggggcgcagctgaagttcgtggccaacggcattgagagcagcatccggatggaggtccgggcggccccagggctgactgccaacaagccgccagccgcagctgcccgggaggtgctggctcggctgcacgaggaggcgcagctgctggctgagctgtcagatcaggctgcggctgtgacgtggctgaaggatggtcgcacactgtccccaggccccaagtatgaggtgcaggcatcggccgggcggcgggtgctccttgtgcgagatgtggcccgggacgatgcaggcctctacgagtgcgtcagccgcgggggccgcatcgcctaccagctctccgtgcaaggcctcgcgcgctttctgcacaaggacatggcgggcagctgtgtggatgccgtggctgggggcccggcgcagtttgagtgtgagacctccgaagcccacgtccacgtgcactggtacaaggatggcatggagctgggccactccggtgagcgcttcttgcaggaggatgtggggacgcggcaccggctggtggcagccacagtcaccaggcaggatgaaggcacctactcctgccgcgtgggcgaggactctgtggacttccggctccgcgtctctgagcccaaggcggtgtttgccaaggagcagccggcgtgcagggaggtgcaggctgaggtgggggccagcgccacgctgagctgtgaggtggcccaggaccagatggaggtgacgtggtacaaggacgggaagaagttgagctccagctcgaaagtgcacgtggaggctgtgggctgtatgcggaggctggtggtgcagcaggtgggccaggcagactccggagagtacagctgtgaggccaggggacagagggtctccttccgcctggacgttgcagagcccaaggtggtgtttgctaaggagcagctggcacgcaggaagctgcaggcagaggcaggagccagtgccacactgagctgcgaggtggcccaggcccagacggaggtgacgtggtacaaggatgggaagaagctgagctccagctcgaaagtgtgcatggaggccacaggctgcacgcgcaggctggttgtgcagcaggcaggccaggcggatgccggggagtatagctgcgaggctgggggccagcggctctccttccatctggatgtcaaagagcccaaggtggtgtttgccaaggaccaggtggcacacagtgaggtgcaggctgaggcaggggccagtgccacgctgagctgcgaggtggcccaggcccagacggaggtgatgtggtacaaagatgggaagaagctgagctccagcttgaaagtgcatgtagaggccaagggctgcagacggaggctggtggtgcagcaggcaggcaagacagatgccggggactacagctgcgaggccaggggccagagggtctccttccgcctgcacatcacagagcccaagatgatgtttgcaaaggagcagtcagtgcataatgaggtgcaggctgaggcgggggccagtgccatgctgagctgtgaggtggcccaggcccagacggaggtgacgtggtacaaggatgggaagaagctgagctccagctcaaaagtgggcatggaggtcaaagggtgcacacggaggctggtgctgccacaggcgggcaaagcagatgctggggagtacagctgtgaggctgggggccagagagtctccttccacctgcacatcacagagcccaagggggtgtttgcgaaggagcagtcagtgcataatgaggtgcaggctgaggcggggaccactgccatgctgagctgtgaggtggcccagccccagacagaggtgacgtggtacaaggacgggaagaagctgagctccagctcaaaagtacgcatggaggtcaagggctgcacacgaaggctggtagtgcagcaggtgggcaaagcagatgctggggagtacagctgcgaggctgggggccagagagtctcctttcaactgcacatcacagagcccaaggcagtgtttgccaaggagcagttggtgcataatgaggtgcggactgaggcaggggccagtgccacactgagctgtgaggtggcccaggcccagacagaggtgacgtggtacaaggatgggaagaagctgagctccagttcgaaagtgcgcatagaggctgcgggctgcatgcggcagctggtggtgcagcaggcaggccaggcagatgctggggagtacacctgtgaggctgggggccagcggctctccttccacctggatgtttcagagcccaaggcggtgtttgcaaaggagcagctggcacacaggaaggtgcaggccgaggcgggggccattgccacgctgagctgcgaggtggcccaggcccagacagaggtgacgtggtacaaggacgggaagaagctgagctccagctcgaaagttcgaatggaggctgtgggctgcacacggaggctggtggtgcagcaggcatgccaggcggacaccggggagtatagctgcgaggccgggggccagcggctctccttcagcctggacgtggcagagcccaaggtggtgtttgccaaggagcagccagtgcacagggaggtgcaggcccaggcgggggccagcaccacactcagctgcgaggtggctcaggcccagacggaggtgatgtggtacaaggacgggaagaagctgagcttcagctcgaaagtgcgcatggaggctgtgggctgcacacggaggctggtggtgcagcaggcgggccaggcggtcgccggggagtacagctgcgaggcggggagccagcggctctccttccacctgcacgtggcagagcccaaggcggtgtttgctaaggagcagccagcacacagggaggtgcaggctgaagcaggggctagcgccacactgagctgtgaggtggcccaggcccagacagaggtgacttggtacaaggacgggaagaagctgagctccagcttgaaagtgcatgtggaggctgcaggctgtacacggaggctggtggtgcagcaggcaggccaggcagacaccggagagtatagctgtgaggctgggggccagcagctctccttccgcctgcaagtggcagagcccaaggcggtgtttgccaaggagcagccagcgagcagggaggtgcaggctgaggcggggaccagtgccacgctgagctgcgaggtggcccaggcccagacagaggtgacgtggtacaaggacgggaagaaactgagctccagctcgaaagtgcgaatggaggccgtgggctgcacacggaggctggtggtgcaggaggcaggccaggcggacgccggggagtacagctgcaaggccggggatcagcggctgtccttccacctgcacgtggcagagcccaaggtggtgtttgccaaggagcagccagcacacagggaggtgcaggctgaggcgggggccagtgccacgctgagctgcgaggtggcccaggcccagacagaggtgacgtggtacaaggatgggaagaagctgagttccagctcgaaagtgcgcgtggaggccgtgggctgcacacggaggctggtggtgcagcaggcgggccaggcagaggccggggagtacagctgcgaggcagggggtcagcagctctccttccgcctgcaggtggcagagcccaaggcggtgtttgccaaggagcaggtggtgtttgccaaggatcagccggtgcacagggaggtgcaggctgaggcagggaccagcaccatgctgagctgcgaggtggcccaagcccagacggaggttatgtggtacaaggacgggaagaagctgagctccagctcgaaaatgcgtgtggaggccgtgggctgcacacggaggctggtggtgcaggaggcaggccaggcggacgccggggagtacagctgcgaggctgggggccagcggctctccttccatctgcatgtggctgagcccaaggtggtgtttgccaaggagcagccggcatgcagggaggtgcaggcggaggcgggggccagtgccacgctgagctgtgaggtggcccagggccagatggaggtgacatggtacaaggacgggaagaagctgagctccagctcaaaagtgcacatggaggccagcggctacacacggaggctggtagtgcagcaggcgggccaggcggatgctggggagtacagctgtgaggcggggggccaacggctgtccttccgcctgcacgtggcagagctggagccccaaatttcagagagaccctgccgcagggagcctctggtggtcaaggagcatgaagacatcatcctgaccgccacactggccacaccctctgcggccacggtgacctggctcaaggatggtgtggagattcgccgcagcaagcggcatgagacagccagccagggggacacccacaccctgaccgtgcatggcgcccaggttctggacagcgccatctacagctgccgtgtgggcgcagaggggcaggacttcccagtgcaggtggaagaggtggccgccaagttctgccggctgctggagcctgtgtgcggcgagctgggtggcacggtgacactggcctgcgagctaagcccagcgtgtgcagaggtggtgtggcgctgcggcaacacgcagcttcgggtgggcaagcgcttccagatggtggccgaggggcccgtgcgctcactcactgtgttggggctgcgcgcagaggacgcaggggagtacgtgtgtgagagccgtgatgaccacaccagtgcgcagctcaccgtcagtgtgccccgagtggtgaagtttatgtctgggctgagcaccgtggtcgcagaggagggcggcgaggccaccttccagtgcgtggtgtcccccagtgatgtggcagtcgtgtggttccgggacggtgccctgcttcagcccagcgagaagtttgccatatcacagagtggcgccagccacagcctgaccatctcagacctggtgctggaggacgcgggccagatcaccgtggaggctgagggcgcctcatcctctgctgccctgagggtccgagaggcgcctgtgctgttcaaaaagaagctggagccgcagacggtggaggagcggagctcggtgaccctggaggtggagctgacgcggccgtggccggagctgaggtggacacggaacgcgacggccctggcgccgggaaagaacgtggagatccacgccgagggcgcccgccaccgcctggttctgcacaacgtaggttttgccgaccgtggcttctttggctgcgagacgccggatgacaagacacaggccaaactcaccgtggagatgcgccaggtacggctcgtacggggcctgcaggcagtggaggcacgggagcagggcacggctaccatggaggtgcagctgtcgcatgcggacgtggatggcagctggactcgtgacggtctgcggttccagcaggggcccacgtgccacctggctgtgcggggccccatgcacaccctcacactctcggggctgcggccagaggatagtggccttatggtcttcaaggccgaaggagtgcacacgtcggcgcggctcgtggtcaccgagcttcccgtgagcttcagccgcccgctgcaggacgtggtgaccactgagaaggagaaggttaccctggagtgcgagctgtcgcgtcctaatgtggatgtgcgctggctgaaggacggtgtggagctgcgggcaggcaagacgatggccatcgcagcccagggcgcctgcaggagcctcaccatttaccggtgcgagttcgcggatcagggagtgtatgtgtgtgatgcccatgatgcccagagctctgcctccgtgaaggtacaaggccgcaacatccagatcgtgaggcccctggaggatgtggaagtgatggagaaggacggtgccaccttctcctgtgaggtctcccacgacgaagtgcctggccagtggttctgggagggcagtaaactgcggcccactgacaacgtgcgcatccgccaggaaggaaggacatacactctcatctaccggagagtcctggcggaagatgcaggagagatccaatttgtagccgaaaatgcagaatcgcgagcccagctccgagtgaaggagctgccagtgaccctcgtgcgcccgctgcgggacaagattgccatggagaagcaccgcggtgtgctggagtgtcaggtgtcccgggccagcgcccaggtgcggtggttcaagggcagtcaggagctgcagcccgggcccaagtacgagctggtcagtgatggcctctaccgcaagctgatcatcagtgatgtccacgcagaggacgaggacacctacacctgtgacgccggtgatgtcaagaccagtgcacagttcttcgtggaagagcaatccatcaccattgtgcggggtctgcaggacgtgacagtgatggagcccgctcctgcctggtttgagtgtgagacctccatcccctcagtgcggccacctaagtggctcctggggaagacggtgttgcaggctggggggaacgtgggcctggagcaggagggcacggtgcaccggctgatgctgcggcggacctgctccaccatgaccgggcccgtgcacttcaccgttggcaagtcgcgctcctctgcccgcctggtggtctcagacatccccgtagtcctcacacggccgttggagcccaagacagggcgtgagctgcagtcagtggtcctgtcctgcgacttccggccagcccccaaggctgtgcagtggtacaaggatgacacgcccctgtctccctctgagaagtttaagatgagcctggagggtcagatggctgagctgcgcatcctccggctcatgcctgctgatgctggtgtctaccggtgccaggcgggcagtgcccacagcagcactgaggtcactgtggaagcgcgggaggtgacagtgacagggccgctacaggatgcagaggccacggaggagggctgggccagcttctcctgtgagctgtcccacgaggatgaggaggtcgagtggtcgctcaacgggatgcccctgtacaacgacagcttccatgagatctcacacaagggccggcgccacacgctggtactgaagagcatccagcgggctgatgcgggcatagtacgcgcctcctccctgaaggtgtcgacctctgcccgcctggaggtccgagtgaagccggtggtgttcctgaaggcgctggatgacctgtccgcagaggagcgcggcaccctggccctgcagtgtgaagtctctgaccccgaggcccatgtggtgtggcgcaaagatggcgtgcagctgggccccagtgacaagtatgacttcctgcacacggcgggcacgcgggggctcgtggtgcatgacgtgagccctgaagacgccggcctgtacacctgccacgtgggctccgaggagacccgggcccgggtccgcgtgcacgatctgcacgtgggcatcaccaagaggctgaagacaatggaggtgctggaaggggaaagctgcagctttgagtgcgtcctgtcccacgagagtgccagcgacccggccatgtggacagtcggtgggaagacagtgggcagctccagccgcttccaggccacacgtcagggccgaaaatacatcctggtggtccgggaggctgcaccaagtgatgccggggaggtggtcttctctgtgcggggcctcacctccaaggcctcactcattgtcagagagaggccggccgccatcatcaagcccctggaagaccagtgggtggcgccaggggaggacgtggagctgcgctgtgagctgtcacgggcgggaacgcccgtgcactggctgaaggacaggaaggccatccgcaagagccagaagtatgatgtggtctgcgagggcacgatggccatgctggtcatccgcggggcctcgctcaaggacgcgggcgagtacacgtgtgaggtggaggcttccaagagcacagccagcctccatgtggaagaaaaagcaaactgcttcacagaggagctgaccaatctgcaggtggaggagaaaggcacagctgtgttcacgtgcaagacggagcaccccgcggccacagtgacctggcgcaagggcctcttggagctacgggcctcagggaagcaccagcccagccaggagggcctgaccctgcggctcaccatcagtgccctggagaaggcagacagcgacacctatacctgcgacattggccaggcccagtcccgggcccagctcctagtgcaaggccggagagtgcacatcatcgaggacctggaggatgtggatgtgcaggagggctcctcggccaccttccgttgccggatctccccggccaactacgagcctgtgcactggttcctggacaagacacccctgcatgccaacgagctcaatgagatcgatgcccagcccgggggctaccacgtgctgaccctgcggcagctggcgctcaaggactcgggcaccatctactttgaggcgggtgaccagcgggcctcggccgccctgcgggtcactgagaagccaagcgtcttctcccgggagctcacagatgccaccatcacagagggtgaggacttgaccctggtgtgcgagaccagcacctgcgacattcctgtgtgctggaccaaggatgggaagaccctgcgggggtctgcccggtgccagctgagccatgagggccaccgggcccagctgctcatcactggggccaccctgcaggacagtggacgctacaagtgtgaggctgggggcgcctgcagcagctccattgtcagggtgcatgcgcggccagtgcggttccaggaggccctgaaggacctggaggtgctggagggtggtgctgccacactgcgctgtgtgctgtcatctgtggctgcgcccgtgaagtggtgctatggaaacaacgtcctgaggccaggtgacaaatacagcctacgccaggagggtgccatgctggagctggtggtccggaacctccggccgcaggacagcgggcggtactcatgctccttcggggaccagactacttctgccaccctcacagtgactgccctgcctgcccagttcatcgggaaactgagaaacaaggaggccacagaaggggccacggccacgctgcggtgtgagctgagcaaggcagcccctgtggagtggagaaaggggtccgagaccctcagagatggggacagatactgtctgaggcaggacggggccatgtgtgagctgcagatccgtggcctggccatggtggatgccgcggagtactcgtgtgtgtgtggagaggagaggacctcagcctcactcaccatcaggcccatgcctgcccacttcataggaagactgagacaccaagagagcatagaaggggccacagccacgctgcggtgtgagctgagcaaggcggcccccgtggagtggaggaaggggcgtgagagcctcagagatggggacagacatagcctgaggcaggacggggctgtgtgcgagctgcagatctgtggcctggctgtggcagatgctggggagtactcctgtgtgtgtggggaggagaggacctctgccactctcaccgtgaaggccctgccagccaagttcacagagggtctgaggaatgaagaggccgtggaaggggccacagccatgttgtggtgtgaactgagcaaggtggcccctgtggagtggaggaaggggcccgagaacctcagagatggggacagatacatcctgaggcaggaggggaccaggtgtgagctgcagatctgtggcctggccatggcggacgccggggagtacttgtgtgtgtgcgggcaggagaggacctcagccacgctcaccatcagggctctgcctgccaggttcatagaagatgtgaaaaaccaggaggccagagaaggggccacagctgtgctgcagtgtgagctgaacagtgcagcccctgtggagtggagaaaggggtctgagacccttagagatggggacagatacagcctgaggcaggacgggactaaatgtgagctgcagattcgtggcctggccatggcagacactggggagtactcgtgcgtgtgcgggcaggagaggacctcggctatgctcaccgtcagggctctacccatcaagttcacagagggtctgaggaacgaagaggccacagaaggggcaacagccgtgctgcggtgtgagctgagcaagatggcccccgtggagtggtggaaggggcatgagaccctcagagatggagacagacacagcctgaggcaggacggggccaggtgtgagctgcagatccgcggcctcgtggcagaggacgctggggagtacctgtgcatgtgcgggaaggagaggacctcagccatgctcaccgtcagggccatgccttccaagttcatagagggtctgaggaatgaagaggccacagaaggggacacggccacgctgtggtgtgagctgagcaaggcggcaccggtggagtggaggaaggggcatgagaccctcagagatggggacagacacagcctgaggcaggacgggtccaggtgtgagctgcagatccgtggcctggctgtggtggatgccggggagtactcgtgtgtgtgcgggcaggagaggacctcagccacactcactgtcagggccctgcctgccagattcatagaagatgtgaaaaaccaggaggccagagaaggggccacggccgtgctgcaatgtgagctgagcaaggcggcccccgtggagtggaggaaggggtctgagaccctcagaggtggggacagatacagcctgaggcaggatgggaccagatgtgagctgcagattcatggcctgtctgtggcagacactggggagtactcgtgtgtgtgcgggcaggagaggacctcggccacactcaccgtcagggccctgcctgcacgattcactcaagatctgaagaccaaggaggcctcagaaggggccacagctacactgcagtgtgagctgagcaaggtggcccctgtggaatggaagaagggtcctgagaccctcagagatgggggcagatacagcctgaagcaggatgggacgaggtgtgagctgcagatccatgacctgtctgtggcggatgctggggaatactcatgcatgtgtggacaagagaggacctcggccacgctcactgtcagggccctgcctgccaggttcacagagggtctgaggaatgaagaggccatggaaggggccacagccacactgcaatgtgagctgagcaaggcagcccctgtggagtggaggaaaggccttgaggctctcagagatggggacaaatacagcctgagacaagacggggctgtgtgtgagctgcagattcatggcctggctatggcagataacggggtgtactcatgtgtgtgtgggcaggagaggacctcagctacactcactgtcagggccctgcctgccagattcatagaggatatgagaaaccagaaggccacagaaggggctacagtcacattgcaatgtaagctgagaaaggcggcccccgtggagtggagaaaggggcccaacaccctcaaagatggggacaggtacagcctgaagcaggatgggaccagttgtgagctgcagattcgtggcctggtcatagcagatgctggagaatactcgtgcatatgtgagcaggagaggacctcggccacgctcactgtcagggccctgccggccagattcatagaagatgtgagaaatcacgaggccacagaaggggccacagctgtgctgcagtgtgagctgagcaaggcggcccccgtggagtggcggaaggggtctgagaccctcagagatggggacagatatagcctgaggcaggacgggacgaggtgtgagctgcagattcgtggcctggctgtggaggacactggagagtatttgtgtgtgtgcgggcaggagagaacctcagctacactcactgtcagggccctgccagccagattcatagacaacatgacaaaccaggaggccagagaaggggccacggccacactgcactgtgaactgagcaaggtggcccctgtggagtggaggaagggacctgaaaccctccgagatggggacagacacagcctgaggcaggatgggaccaggtgtgagctgcagattcgtggcctgtctgtggcagatgccggggagtactcgtgcgtgtgtgggcaggagaggacctcagccacactcacgatcagggccctgcccgccaagttcacaaagggtctgaggaatgaagaggccacagaaggggccacggctatgttgcagtgtgagctgagcaaggtggcccctgttgagtggaggaagggacctgaaaccctcagagatggggacagatacaacctgaggcaggatgggaccagatgtgagctgcagattcatggcctgtccgtggcagacactggggagtactcatgtgtatgtggtcaggagaagacgtcggccactctcactgtcaaggccccacagccagtgttccgggagccgctgcagagtctgcaggcggaggagggctccacggccaccctgcagtgtgagctgtctgagcccactgctacagtggtctggagcaagggtggcctgcagctgcaggccaatgggcgccgggagccacggcttcagggctgcaccgcggagctggtgttacaggacctacaacgtgaagacactggcgaatacacttgcacctgtggctcccaggccaccagtgccaccctcactgtcacagctgcgcctgtgcggttcctccgagagctgcagcaccaggaggtggatgagggaggcaccgcacacttatgctgcgagctgagccgggcgggtgcgagcgtggagtggcgcaagggctccctacagctcttcccttgtgccaagtaccagatggtgcaggatggtgcagctgcagagctgctggtacgcggagtggagcaggaggatgcgggtgactacacgtgtgacacgggccacacgcagagcatggccagcctctctgtccgtgtccccaggcccaagttcaagacccggcttcagagtctggagcaggagacaggtgacatagcccggctgtgctgtcagctgagtgatgcagagtcgggggccgtggtgcaatggctcaaggagggcgtggagctgcatgcgggccccaagtacgagatgcggagccagggggccacgcgggagctgctgatccaccaactggaggccaaggacacgggcgagtatgcctgtgtgacaggcggccagaaaaccgctgcctccctcagggtcacagagcctgaggtgaccattgtacgggggctggttgatgcggaggtgacggccgatgaggatgttgagttcagctgtgaggtgtccagggctggagccacaggcgtgcagtggtgcctacagggcctgccactgcaaagcaatgaggtgacagaggtggctgtgcgggatggccgcatccacaccctgcggctgaagggcgtgacgcccgaggacgctggcactgtctccttccatttgggaaaccatgcttcctctgcccagctcaccgtcagagctcctgaggtgaccatcctggagcccctgcaggacgtgcagctcagtgagggccaggatgccagcttccagtgccggctatccagagcttcaggccaggaggcccgctgggctttaggaggggtgcccctgcaggccaacgagatgaatgacatcactgtggagcagggcacactccacctgctcaccctgcacaaggtgacccttgaggatgctggaactgtcagtttccacgtgggcacgtgtagctctgaggcccagctgaaagtcacagccaagaacacggtggtgcgggggctggagaatgtggaggcgctggagggcggcgaggcgctgttcgagtgccagctgtcccagcccgaggtggccgcccacacctggctgctggacgacgaacccgtgcacacctcggagaacgccgaggtggtcttcttcgagaacggcctgcgccacctgctgctgctcaaaaacttgcggccacaagacagctgccgggtgaccttcctggctggggatatggtgacgtccgcattcctcacggtccgaggctggcgcctggagatcctggagcctctgaaaaacgcggcggtccgggccggcgcacaggcatgcttcacctgcacgctcagcgaggcggtgcccgtgggagaggcgtcctggtacatcaatggcgcggcagtgcagccggatgacagcgactggactgtcaccgccgacggcagtcaccacgccctactgctgcgcagcgcccagccccaccacgccggggaggtcaccttcgcttgccgcgacgccgtggcctctgcgcggctcaccgtgctgggcctccctgatcccccagaggatgctgaggtggtggctcgcagcagccacactgtgacactgtcttgggcagctcccatgagtgatggaggcggtggtctctgtggctaccgcgtggaggtgaaggagggggccacaggccagtggcggctgtgccacgagctggtgcctggacccgagtgtgtggtggatggcctggcccccggggagacctaccgcttccgtgtggcagctgtgggccctgtgggtgctggggaaccggttcacctgccccagacagtgcggcttgcagagccaccgaagcctgtgcctccccagccctcagcccctgagagccggcaggtggcagctggtgaagatgtctctctggagcttgaggtggtggctgaggctggtgaggtcatctggcacaagggaatggagcgcatccagcccggtgggcggttcgaggtggtctcccagggtcggcaacagatgctggtgatcaagggcttcacggcagaagaccagggcgagtaccactgtggcctggctcagggctccatctgccctgcggctgccaccttccaggtggcactgagcccagcctctgtggatgaggcccctcagcccagcttgccccccgaggcagcccaggagggtgacctgcacctactgtgggaggccctggctcggaaacgtcgcatgagccgtgagcccacgctggactccattagcgagctgccagaggaggacggccgctcgcagcgcctgccacaggaggcagaggaggtggcacctgatctctctgaaggctactccacggccgatgagctggcccgcactggagatgctgacctctcacacaccagctctgatgatgagtcccgggcaggcaccccttccctggtcacctacctcaagaaggctgggaggccaggcacctcaccactggccagcaaggttggggccccagcagccccctctgtgaagccacagcagcagcaggagccactggctgctgtgcgcccaccactgggagacctgagcaccaaagacctgggtgatccctcaatggacaaggcagctgtgaagatccaggctgcctttaagggctacaaggtccggaaggagatgaagcagcaggaagggcccatgttctcccacacatttggggacaccgaggcacaggtgggggatgccctgcggctggagtgtgtcgtggccagcaaggcagatgtgcgagcccgctggctgaaggatggtgtggagctgaccgatgggcggcaccatcacatcgaccagcttggggatggcacctgctctctgctgatcactggcctggaccgtgctgatgctggctgctacacctgtcaggtgagcaacaagtttggccaggtgacccacagtgcctgtgtggtggtcagtgggtcagagagtgaagccgagagctcctctgggggtgagctggacgatgccttccgccgggctgcccgtcggctgcaccggctcttccgcaccaaaagtccggctgaagtttcagatgaggagctcttcctgagtgcagacgagggccctgcagagccagaggagcccgcggactggcagacataccgcgaagatgagcatttcatctgcatccgttttgaggcgctcactgaggcccgccaggcggtaactcgcttccaggagatgtttgccacactgggcattggggtggagatcaagctggtggaacaggggcctcggagggtagagatgtgcatcagcaaagagactcctgcccctgtggtgcctccagagccattgcccagcctactgacttctgacgctgccccagtgttcctgactgagttgcagaaccaagaagtgcaggatgggtatcctgtgagctttgactgcgtggtgacaggtcagcccatgcccagtgtgcgctggttcaaggatgggaagttgttggaggaggatgatcactacatgattaatgaagaccaacagggtggccatcagctcatcatcacagccgtggtgccagcagacatgggcgtctaccgctgcctggccgagaacagcatgggtgtctcctccaccaaggctgagctccgtgtggacttgacaagcacagactatgacactgcagcagatgccacggagtcctcatcctacttcagtgcccaaggctacctgtccagccgggagcaggagggaacagagtccaccactgatgagggccagctgccccaggtggtggaggagctgagagacctccaggtggcccctggcacacgcctggccaagttccagctcaaggtgaaaggctaccctgctcccagattatactggttcaaagatggccagcccctgaccgcatctgcccacatccgcatgactgacaagaagatcctgcacaccctggagatcatctccgtcacccgggaggactctggccagtatgcagcctatatcagcaatgccatgggtgctgcctactcgtctgcccggctgctggttcgaggccctgatgagccagaagagaagcctgcatcagatgtgcatgagcagctggtgccgccccgaatgctggagaggttcacccccaagaaagtgaagaaaggctccagcatcaccttctctgtgaaggtagaaggacgcccggtgcccaccgtgcactggctcagggaggaggctgagagaggcgtgctgtggattggccctgacacaccgggctacaccgtggccagctctgcgcagcagcacagcctggtcctgctggacgtgggccggcagcaccagggcacctacacatgcattgccagcaacgctgccggccaggccctctgctccgccagcctgcacgtctcgggcctgcctaaggtggaggagcaggagaaagtgaaggaagcgctgatttccactttcctgcaggggaccacacaagccatctcagcacaggggttggaaactgcgagttttgctgaccttggtgggcagaggaaagaagagcctctggctgccaaggaggccctcggccacctgtccctcgctgaggtgggcacagaggagttcctgcagaaactgacctcccagatcactgagatggtatcggccaagatcacgcaggccaagctgcaggtgcccggaggtgacagtgatgaggactccaagacaccatctgcatccccccgccatggccgatcacggccatcctccagcatccaggagtcttcctcagagtcagaggacggcgatgcccgaggcgagatctttgacatctacgtggtcaccgctgactacctgcccctaggggctgagcaggatgccatcacgctgcgggaaggccagtatgtggaggtcctggatgcagcccacccactgcgctggcttgtccgcaccaagcccaccaagtccagcccctcacggcagggctgggtgtcaccagcctacctggacaggaggctcaagctgtcacctgagtggggggccgctgaggcccctgagttccctggggaggctgtgtctgaagacgaatacaaggcaaggctgagctctgtgatccaggagctgctgagttctgagcaggccttcgtggaggagctgcagttcctgcagagccaccacctgcagcacctggagcgctgcccccacgtgcccatagctgtggccggccagaaggcagtcatcttccgcaatgtgcgggacatcggccgcttccacagcagcttcctgcaggagttgcagcagtgcgacacggacgacgacgtggccatgtgcttcatcaagaaccaggcggcctttgagcagtacctggagttcctggtggggcgtgtgcaggctgagtcggtggtcgtcagcacggccatccaggagttctacaagaaatacgcggaggaggccctgttggcaggggacccctctcagcccccgccaccacctctgcagcactacctggagcagccagtggagcgggtgcagcgctaccaggccttgctgaaggagctgatccgcaacaaggcgcggaacagacagaactgcgcgctgctggagcaggcctatgccgtggtgtctgccctgccacagcgcgctgagaacaagctgcacgtgtccctcatggagaactacccaggcaccctgcaggccctgggcgagcccatccgccagggccacttcatcgtgtgggagggtgcaccgggggcccgcatgccctggaagggccacaaccgtcacgtgttcctcttccgcaaccacctggtaatctgcaagccccggcgagactcccgcaccgataccgtcagctacgtgttccggaacatgatgaagctgagcagcatcgacctgaacgaccaggtggagggggatgaccgcgccttcgaggtgtggcaggagcgggaggactcggtgcgcaagtacctgctgcaggcacggacagccattatcaagagctcgtgggtgaaggagatctgtggcatccagcagcgtctggccctgcctgtgtggcggcccccggactttgaagaggagctggccgactgcacagccgagctgggtgagacagtcaagctggcctgccgcgtgacgggcacacccaagcctgtcatcagctggtacaaagatgggaaagcagtgcaggtggacccccaccacatcctcattgaagaccctgatggctcgtgtgcactcatcctggacagcctgaccggtgtggactctggccagtacatgtgcttcgcggccagcgccgctggcaactgcagtaccctgggcaagatcctggtgcaagtcccaccacggttcgtgaacaaggtccgggcctcaccctttgtggagggagaggacgcccagttcacctgcaccatcgaaggcgccccgtacccgcagatcaggtggtacaaggacggggccctgctgaccactggcaacaagttccagacactgagtgagcctcgcagcggcctgctagtgctggtgatccgggcggccagcaaggaggacctggggctctacgagtgtgagctggtgaaccggctgggctccgcgcgggctagtgcggagctgcgcattcagagccccatgctgcaggcccaggagcagtgtcacagggagcagctcgtggctgcagtggaagacaccaccctggagcgagcggaccaggaggtcacatctgtcctgaagagactgctgggccccaaggcgccaggcccctccacaggggacctcactggccctggcccctgccccaggggggcacccgcactccaggaaaccggctcccagcccccagtcaccggaacttcggaggcacctgccgtgcccccgagggtgccacagcccctcctccacgaaggcccagagcaggagccggaggccattgccagagcccaggaatggactgtgcccattcggatggagggtgcagcctggcccggggcaggcacaggggagctgctctgggacgtccacagccacgtggtcagagagaccacacagaggacctacacataccaggccatcgacacgcacaccgcacggcccccatccatgcaggtaaccatcgaggatgtgcaggcacagacaggcggaacggcccaattcgaggctatcattgagggcgacccacagccctcggtgacctggtacaaggacagcgtccagctggtggacagcacccggcttagccagcagcaagaaggcaccacatactccctggtgctgaggcatgtggcctcgaaggatgccggcgtttacacctgcctggcccaaaacactggtggccaggtgctctgcaaggcagagctgctggtgcttgggggggacaatgagccggactcagagaagcaaagccaccggaggaagctgcactccttctatgaggtcaaggaggagattggaaggggcgtgtttggcttcgtaaaaagagtgcagcacaaaggaaacaagatcttgtgcgctgccaagttcatccccctacggagcagaactcgggcccaggcatacagggagcgagacatcctggccgcgctgagccacccgctggtcacggggctgctggaccagtttgagacccgcaagaccctcatcctcatcctggagctgtgctcatccgaggagctgctggaccgcctgtacaggaagggcgtggtgacggaggccgaggtcaaggtctacatccagcagctggtggaggggctgcactacctgcacagccatggcgttctccacctggacataaagccctctaacatcctgatggtgcatcctgcccgggaagacattaaaatctgcgactttggctttgcccagaacatcaccccagcagagctgcagttcagccagtacggctcccctgagttcgtctcccccgagatcatccagcagaaccctgtgagcgaagcctccgacatttgggccatgggtgtcatctcctacctcagcctgacctgctcatccccatttgccggcgagagtgaccgtgccaccctcctgaacgtcctggaggggcgcgtgtcatggagcagccccatggctgcccacctcagcgaagacgccaaagacttcatcaaggctacgctgcagagagcccctcaggcccggcctagtgcggcccagtgcctctcccacccctggttcctgaaatccatgcctgcggaggaggcccacttcatcaacaccaagcagctcaagttcctcctggcccgaagtcgctggcagcgttccctgatgagctacaagtccatcctggtgatgcgctccatccctgagctgctgcggggcccacccgacagcccctccctcggcgtagcccggcacctctgcagggacactggtggctcctccagttcctcctcctcctctgacaacgagctcgccccatttgcccgggctaagtcactgccaccctccccggtgacacactcaccactgctgcacccccggggcttcctgcggccctcggccagcctgcctgaggaagccgaggccagtgagcgctccaccgaggccccagctccgcctgcatctcccgagggtgccgggccaccggccgcccagggctgcgtgccccggcacagcgtcatccgcagcctgttctaccaccaggcgggtgagagccctgagcacggggccctggccccggggagcaggcggcacccggcccggcggcggcacctgctgaagggcgggtacattgcgggggcgctgccaggcctgcgcgagccactgatggagcaccgcgtgctggaggaggaggccgccagggaggagcaggccaccctcctggccaaagccccctcattcgagactgccctccggctgcctgcctctggcacccacttggcccctggccacagccactccctggaacatgactctccgagcaccccccgcccctcctcggaggcctgcggtgaggcacagcgactgccttcagccccctccgggggggcccctatcagggacatggggcaccctcagggctccaagcagcttccatccactggtggccacccaggcactgctcagccagagaggccatccccggacagcccttgggggcagccagcccctttctgccaccccaagcagggttctgccccccaggagggctgcagcccccacccagcagttgccccatgccctcctggctccttccctccaggatcttgcaaagaggcccccttagtaccctcaagccccttcttgggacagccccaggcaccccctgcccctgccaaagcaagccccccattggactctaagatggggcctggagacatctctcttcctgggaggccaaaacccggcccctgcagttccccagggtcagcctcccaggcgagctcttcccaagtgagctccctcagggtgggctcctcccaggtgggcacagagcctggcccctccctggatgcggagggctggacccaggaggctgaggatctgtccgactccacacccaccttgcagcggcctcaggaacaggcgaccatgcgcaagttctccctgggtggtcgcgggggctacgcaggcgtggctggctatggcacctttgcctttggtggagatgcagggggcatgctggggcaggggcccatgtgggccaggatagcctgggctgtgtcccagtcagaggaggaggagcaggaggaggccagggctgagtcccagtcggaggagcagcaggaggccagggctgagagcccactgccccaggtcagtgcaaggcctgtgcctgaggtcggcagggctcccaccaggagctctccagagcccaccccatgggaggacatcgggcaggtctccctggtgcagatccgggacctgtcaggtgatgcggaggcggccgacacaatatccctggacatttccgaggtggaccccgcctacctcaacctctcagacctgtacgatatcaagtacctcccattcgagtttatgatcttcaggaaagtccccaagtccgctcagccagagccgccctcccccatggctgaggaggagctggccgagttcccggagcccacgtggccctggccaggtgaactgggcccccacgcaggcctggagatcacagaggagtcagaggatgtggacgcgctgctggcagaggctgccgtgggcaggaagcgcaagtggtcctcgccgtcacgcagcctcttccacttccctgggaggcacctgccgctggatgagcctgcagagctggggctgcgtgagagagtgaaggcctccgtggagcacatctcccggatcctgaagggcaggccggaaggtctggagaaggaggggccccccaggaagaagccaggccttgcttccttccggctctcaggtctgaagagctgggaccgagcgccgacattcctaagggagctctcagatgagactgtggtcctgggccagtcagtgacactggcctgccaggtgtcagcccagccagctgcccaggccacctggagcaaagacggagcccccctggagagcagcagccgtgtcctcatctctgccaccctcaagaacttccagcttctgaccatcctggtggtggtggctgaggacctgggtgtgtacacctgcagcgtgagcaatgcgctggggacagtgaccaccacgggcgtcctccggaaggcagagcgcccctcatcttcgccatgcccggatatcggggaggtgtacgcggatggggtgctgctggtctggaagcccgtggaatcctacggccctgtgacctacattgtgcagtgcagcctagaaggcggcagctggaccacactggcctccgacatctttgactgctgctacctgaccagcaagctctcccggggtggcacctacaccttccgcacggcatgtgtcagcaaggcaggaatgggtccctacagcagcccctcggagcaagtcctcctgggagggcccagccacctggcctctgaggaggagagccaggggcggtcagcccaacccctgcccagcacaaagaccttcgcattccagacacagatccagaggggccgcttcagcgtggtgcggcaatgctgggagaaggccagcgggcgggcgctggccgccaagatcatcccctaccaccccaaggacaagacagcagtgctgcgcgaatacgaggccctcaagggcctgcgccacccgcacctggcccagctgcacgcagcctacctcagcccccggcacctggtgctcatcttggagctgtgctctgggcccgagctgctcccctgcctggccgagagggcctcctactcagaatccgaggtgaaggactacctgtggcagatgttgagtgccacccagtacctgcacaaccagcacatcctgcacctggacctgaggtccgagaacatgatcatcaccgaatacaacctgctcaaggtcgtggacctgggcaatgcacagagcctcagccaggagaaggtgctgccctcagacaagttcaaggactacctagagaccatggctccagagctcctggagggccagggggctgttccacagacagacatctgggccatcggtgtgacagccttcatcatgctgagcgccgagtacccggtgagcagcgagggtgcacgcgacctgcagagaggactgcgcaaggggctggtccggctgagccgctgctacgcggggctgtccgggggcgccgtggccttcctgcgcagcactctgtgcgcccagccctggggccggccctgcgcgtccagctgcctgcagtgcccgtggctaacagaggagggcccggcctgttcgcggcccgcgcccgtgaccttccctaccgcgcggctgcgcgtcttcgtgcgcaatcgcgagaagagacgcgcgctgctgtacaagaggcacaacctggcccaggtgcgctgagggtcgccccggccacacccttggtctccccgctgggggtcgctgcagacgcgccaataaaaacgcacagccgggcgagaa

SEQ ID NO: 161735 - DNA, 24060 bp, Homo sapiens
  Payload ID: 11573
  Gene Symbol: OBSCN
  Gene Name: obscurin, cytoskeletal calmodulin and titin-interacting RhoGEF
  Uniprot ID: Q5VST9
  ENST ID: ENST00000422127
  CDS Start-End: 75-23981
tgcctcccagcctgtgcccccagcctgcgtgctgcccagagcccccatagagagaggtccccgccgccaccctcatggatcagccacagttcagcggggcgccccgctttctcacccggcccaaggccttcgtggtgtcggtgggcaaggacgccaccctcagctgccagatcgtgggtaatcccacgccacaggtgagctgggagaaggaccagcagccggtggcggccggcgcgcgcttccgtctggcccaggacggcgacctctaccgcctcactatcctggacctggcgctgggcgacagtgggcaatacgtgtgccgcgcgcgcaatgccataggcgaggccttcgctgctgtgggcctgcaggtggacgcggaggccgcgtgcgccgagcaggcgccgcacttcctgctgcggcccacgtccatccgcgtgcgcgagggctcagaggccaccttccgctgccgcgtgggtggctccccgaggccggcagtgagctggtccaaggacgggcggcgcctgggtgagcccgacggcccccgcgtgcgcgtggaggagctcggcgaggcaagtgcgctgcgcattcgggcggcgcggccgcgcgacggcggcacttacgaggtccgcgccgagaacccgctgggcgctgccagcgccgccgcggcgctagtggtggactcggacgccgcggacacggccagccggcccgggacctccacggccgcgctcctggcgcacctgcagcggcggcgcgaggctatgcgcgccgagggcgcccccgcctcaccgcccagcaccggcacgcgcacctgcacggtgactgaaggcaagcacgcgcgcctcagctgctacgtgaccggcgagcccaagcccgagacggtgtggaagaaggacggccagctggtgaccgagggccggcgccacgtggtgtacgaggacgcgcaggagaacttcgtgctcaagatcctcttctgcaagcagtcggaccgcggcctctacacctgcacggcgtccaacctcgtgggccagacctacagctctgtgctggtcgtagtgcgcgagcccgcggttcccttcaaaaagcggctgcaagatctggaggtgcgggagaaggagtcggccacgttcctatgtgaggtgccccagccgtccactgaggccgcgtggttcaaggaggagacgcggttgtgggcgagcgccaagtacggcatcgaggaggagggcaccgagcgccgcctgaccgtgcgcaatgtctcggccgacgacgacgcggtgtacatctgcgagacgccagagggcagccgcacggtggcggagctcgcagtccaaggaaacctcctccgaaagctccctcggaagacggcggtgcgcgtgggcgacacggctatgttttgcgtggagctggcggtcccggtgggccccgtccactggctgcggaaccaggaggaagtggtggcggggggccgcgtggccatctccgcggagggcacgcgccacacactaaccatctcccagtgctgcctggaggatgtgggccaggtggcctttatggctggcgactgccagacgtccacccagttctgcgtgtcggcccccaggaagcctcccctgcaaccccctgtggatcctgtggtaaaggccaggatggagagttccgtgattctcagctggtccccaccaccccatggggaacgccctgtcactatcgacggctacctggtagagaagaagaagcttggcacctacacctggatcaggtgccacgaggctgaatgggtggctacacctgagctgaccgtggctgatgtggcggaggaggggaacttccagttccgagtgtccgctctcaacagctttggtcagagtccctacctcgagttcccggggactgtccacctggcccccaagctggccgtgaggacaccgctgaaggcggtgcaggcggtagagggtggcgaggtcactttctccgtggacctcacggtggcctcagcgggtgagtggttcctggatgggcaggccctgaaggccagcagtgtgtatgagatccactgtgatcgcacccggcacacgctcaccatccgggaggtgcccgccagcctgcacggggcgcagctgaagttcgtggccaacggcattgagagcagcatccggatggaggtccgggcggccccagggctgactgccaacaagccgccagccgcagctgcccgggaggtgctggctcggctgcacgaggaggcgcagctgctggctgagctgtcagatcaggctgcggctgtgacgtggctgaaggatggtcgcacactgtccccaggccccaagtatgaggtgcaggcatcggccgggcggcgggtgctccttgtgcgagatgtggcccgggacgatgcaggcctctacgagtgcgtcagccgcgggggccgcatcgcctaccagctctccgtgcaaggcctcgcgcgctttctgcacaaggacatggcgggcagctgtgtggatgccgtggctgggggcccggcgcagtttgagtgtgagacctccgaagcccacgtccacgtgcactggtacaaggatggcatggagctgggccactccggtgagcgcttcttgcaggaggatgtggggacgcggcaccggctggtggcagccacagtcaccaggcaggatgaaggcacctactcctgccgcgtgggcgaggactctgtggacttccggctccgcgtctctgagcccaaggtggtgtttgctaaggagcagctggcacgcaggaagctgcaggcagaggcaggagccagtgccacactgagctgcgaggtggcccaggcccagacggaggtgacgtggtacaaggatgggaagaagctgagctccagctcgaaagtgtgcatggaggccacaggctgcacgcgcaggctggttgtgcagcaggcaggccaggcggatgccggggagtatagctgcgaggctgggggccagcggctctccttccatctggatgtcaaagagcccaaggtggtgtttgccaaggaccaggtggcacacagtgaggtgcaggctgaggcaggggccagtgccacgctgagctgcgaggtggcccaggcccagacggaggtgatgtggtacaaagatgggaagaagctgagctccagcttgaaagtgcatgtagaggccaagggctgcagacggaggctggtggtgcagcaggcaggcaagacagatgccggggactacagctgcgaggccaggggccagagggtctccttccgcctgcacatcacagagcccaagatgatgtttgcaaaggagcagtcagtgcataatgaggtgcaggctgaggcgggggccagtgccatgctgagctgtgaggtggcccaggcccagacggaggtgacgtggtacaaggatgggaagaagctgagctccagctcaaaagtgggcatggaggtcaaagggtgcacacggaggctggtgctgccacaggcgggcaaagcagatgctggggagtacagctgtgaggctgggggccagagagtctccttccacctgcacatcacagagcccaagggggtgtttgcgaaggagcagtcagtgcataatgaggtgcaggctgaggcggggaccactgccatgctgagctgtgaggtggcccagccccagacagaggtgacgtggtacaaggacgggaagaagctgagctccagctcaaaagtacgcatggaggtcaagggctgcacacgaaggctggtagtgcagcaggtgggcaaagcagatgctggggagtacagctgcgaggctgggggccagagagtctcctttcaactgcacatcacagagcccaaggcagtgtttgccaaggagcagttggtgcataatgaggtgcggactgaggcaggggccagtgccacactgagctgtgaggtggcccaggcccagacagaggtgacgtggtacaaggatgggaagaagctgagctccagttcgaaagtgcgcatagaggctgcgggctgcatgcggcagctggtggtgcagcaggcaggccaggcagatgctggggagtacacctgtgaggctgggggccagcggctctccttccacctggatgtttcagagcccaaggcggtgtttgcaaaggagcagctggcacacaggaaggtgcaggccgaggcgggggccattgccacgctgagctgcgaggtggcccaggcccagacagaggtgacgtggtacaaggacgggaagaagctgagctccagctcgaaagttcgaatggaggctgtgggctgcacacggaggctggtggtgcagcaggcatgccaggcggacaccggggagtatagctgcgaggccgggggccagcggctctccttcagcctggacgtggcagagcccaaggtggtgtttgccaaggagcagccagtgcacagggaggtgcaggcccaggcgggggccagcaccacactcagctgcgaggtggctcaggcccagacggaggtgatgtggtacaaggacgggaagaagctgagcttcagctcgaaagtgcgcatggaggctgtgggctgcacacggaggctggtggtgcagcaggcgggccaggcggtcgccggggagtacagctgcgaggcggggagccagcggctctccttccacctgcacgtggcagagcccaaggcggtgtttgccaaggagcagccagcgagcagggaggtgcaggctgaggcggggaccagtgccacgctgagctgcgaggtggcccaggcccagacagaggtgacgtggtacaaggacgggaagaaactgagctccagctcgaaagtgcgaatggaggccgtgggctgcacacggaggctggtggtgcaggaggcaggccaggcggacgccggggagtacagctgcaaggccggggatcagcggctgtccttccacctgcacgtggcagagcccaaggtggtgtttgccaaggagcagccagcacacagggaggtgcaggctgaggcgggggccagtgccacgctgagctgcgaggtggcccaggcccagacagaggtgacgtggtacaaggatgggaagaagctgagttccagctcgaaagtgcgcgtggaggccgtgggctgcacacggaggctggtggtgcagcaggcgggccaggcagaggccggggagtacagctgcgaggcagggggtcagcagctctccttccgcctgcaggtggcagagctggagccccaaatttcagagagaccctgccgcagggagcctctggtggtcaaggagcatgaagacatcatcctgaccgccacactggccacaccctctgcggccacggtgacctggctcaaggatggtgtggagattcgccgcagcaagcggcatgagacagccagccagggggacacccacaccctgaccgtgcatggcgcccaggttctggacagcgccatctacagctgccgtgtgggcgcagaggggcaggacttcccagtgcaggtggaagaggtggccgccaagttctgccggctgctggagcctgtgtgcggcgagctgggtggcacggtgacactggcctgcgagctaagcccagcgtgtgcagaggtggtgtggcgctgcggcaacacgcagcttcgggtgggcaagcgcttccagatggtggccgaggggcccgtgcgctcactcactgtgttggggctgcgcgcagaggacgcaggggagtacgtgtgtgagagccgtgatgaccacaccagtgcgcagctcaccgtcagtgtgccccgagtggtgaagtttatgtctgggctgagcaccgtggtcgcagaggagggcggcgaggccaccttccagtgcgtggtgtcccccagtgatgtggcagtcgtgtggttccgggacggtgccctgcttcagcccagcgagaagtttgccatatcacagagtggcgccagccacagcctgaccatctcagacctggtgctggaggacgcgggccagatcaccgtggaggctgagggcgcctcatcctctgctgccctgagggtccgagaggcgcctgtgctgttcaaaaagaagctggagccgcagacggtggaggagcggagctcggtgaccctggaggtggagctgacgcggccgtggccggagctgaggtggacacggaacgcgacggccctggcgccgggaaagaacgtggagatccacgccgagggcgcccgccaccgcctggttctgcacaacgtaggttttgccgaccgtggcttctttggctgcgagacgccggatgacaagacacaggccaaactcaccgtggagatgcgccaggtacggctcgtacggggcctgcaggcagtggaggcacgggagcagggcacggctaccatggaggtgcagctgtcgcatgcggacgtggatggcagctggactcgtgacggtctgcggttccagcaggggcccacgtgccacctggctgtgcggggccccatgcacaccctcacactctcggggctgcggccagaggatagtggccttatggtcttcaaggccgaaggagtgcacacgtcggcgcggctcgtggtcaccgagcttcccgtgagcttcagccgcccgctgcaggacgtggtgaccactgagaaggagaaggttaccctggagtgcgagctgtcgcgtcctaatgtggatgtgcgctggctgaaggacggtgtggagctgcgggcaggcaagacgatggccatcgcagcccagggcgcctgcaggagcctcaccatttaccggtgcgagttcgcggatcagggagtgtatgtgtgtgatgcccatgatgcccagagctctgcctccgtgaaggtacaaggaaggacatacactctcatctaccggagagtcctggcggaagatgcaggagagatccaatttgtagccgaaaatgcagaatcgcgagcccagctccgagtgaaggagctgccagtgaccctcgtgcgcccgctgcgggacaagattgccatggagaagcaccgcggtgtgctggagtgtcaggtgtcccgggccagcgcccaggtgcggtggttcaagggcagtcaggagctgcagcccgggcccaagtacgagctggtcagtgatggcctctaccgcaagctgatcatcagtgatgtccacgcagaggacgaggacacctacacctgtgacgccggtgatgtcaagaccagtgcacagttcttcgtggaagagcaatccatcaccattgtgcggggtctgcaggacgtgacagtgatggagcccgctcctgcctggtttgagtgtgagacctccatcccctcagtgcggccacctaagtggctcctggggaagacggtgttgcaggctggggggaacgtgggcctggagcaggagggcacggtgcaccggctgatgctgcggcggacctgctccaccatgaccgggcccgtgcacttcaccgttggcaagtcgcgctcctctgcccgcctggtggtctcagacatccccgtagtcctcacacggccgttggagcccaagacagggcgtgagctgcagtcagtggtcctgtcctgcgacttccggccagcccccaaggctgtgcagtggtacaaggatgacacgcccctgtctccctctgagaagtttaagatgagcctggagggtcagatggctgagctgcgcatcctccggctcatgcctgctgatgctggtgtctaccggtgccaggcgggcagtgcccacagcagcactgaggtcactgtggaagcgcgggaggtgacagtgacagggccgctacaggatgcagaggccacggaggagggctgggccagcttctcctgtgagctgtcccacgaggatgaggaggtcgagtggtcgctcaacgggatgcccctgtacaacgacagcttccatgagatctcacacaagggccggcgccacacgctggtactgaagagcatccagcgggctgatgcgggcatagtacgcgcctcctccctgaaggtgtcgacctctgcccgcctggaggtccgagtgaagccggtggtgttcctgaaggcgctggatgacctgtccgcagaggagcgcggcaccctggccctgcagtgtgaagtctctgaccccgaggcccatgtggtgtggcgcaaagatggcgtgcagctgggccccagtgacaagtatgacttcctgcacacggcgggcacgcgggggctcgtggtgcatgacgtgagccctgaagacgccggcctgtacacctgccacgtgggctccgaggagacccgggcccgggtccgcgtgcacgatctgcacgtgggcatcaccaagaggctgaagacaatggaggtgctggaaggggaaagctgcagctttgagtgcgtcctgtcccacgagagtgccagcgacccggccatgtggacagtcggtgggaagacagtgggcagctccagccgcttccaggccacacgtcagggccgaaaatacatcctggtggtccgggaggctgcaccaagtgatgccggggaggtggtcttctctgtgcggggcctcacctccaaggcctcactcattgtcagagagaggccggccgccatcatcaagcccctggaagaccagtgggtggcgccaggggaggacgtggagctgcgctgtgagctgtcacgggcgggaacgcccgtgcactggctgaaggacaggaaggccatccgcaagagccagaagtatgatgtggtctgcgagggcacgatggccatgctggtcatccgcggggcctcgctcaaggacgcgggcgagtacacgtgtgaggtggaggcttccaagagcacagccagcctccatgtggaagaaaaagcaaactgcttcacagaggagctgaccaatctgcaggtggaggagaaaggcacagctgtgttcacgtgcaagacggagcaccccgcggccacagtgacctggcgcaagggcctcttggagctacgggcctcagggaagcaccagcccagccaggagggcctgaccctgcggctcaccatcagtgccctggagaaggcagacagcgacacctatacctgcgacattggccaggcccagtcccgggcccagctcctagtgcaaggccggagagtgcacatcatcgaggacctggaggatgtggatgtgcaggagggctcctcggccaccttccgttgccggatctccccggccaactacgagcctgtgcactggttcctggacaagacacccctgcatgccaacgagctcaatgagatcgatgcccagcccgggggctaccacgtgctgaccctgcggcagctggcgctcaaggactcgggcaccatctactttgaggcgggtgaccagcgggcctcggccgccctgcgggtcactgagaagccaagcgtcttctcccgggagctcacagatgccaccatcacagagggtgaggacttgaccctggtgtgcgagaccagcacctgcgacattcctgtgtgctggaccaaggatgggaagaccctgcgggggtctgcccggtgccagctgagccatgagggccaccgggcccagctgctcatcactggggccaccctgcaggacagtggacgctacaagtgtgaggctgggggcgcctgcagcagctccattgtcagggtgcatgcgcggccagtgcggttccaggaggccctgaaggacctggaggtgctggagggtggtgctgccacactgcgctgtgtgctgtcatctgtggctgcgcccgtgaagtggtgctatggaaacaacgtcctgaggccaggtgacaaatacagcctacgccaggagggtgccatgctggagctggtggtccggaacctccggccgcaggacagcgggcggtactcatgctccttcggggaccagactacttctgccaccctcacagtgactgccctgcctgcccagttcatcgggaaactgagaaacaaggaggccacagaaggggccacggccacgctgcggtgtgagctgagcaaggcagcccctgtggagtggagaaaggggtccgagaccctcagagatggggacagatactgtctgaggcaggacggggccatgtgtgagctgcagatccgtggcctggccatggtggatgccgcggagtactcgtgtgtgtgtggagaggagaggacctcagcctcactcaccatcaggcccatgcctgcccacttcataggaagactgagacaccaagagagcatagaaggggccacagccacgctgcggtgtgagctgagcaaggcggcccccgtggagtggaggaaggggcgtgagagcctcagagatggggacagacatagcctgaggcaggacggggctgtgtgcgagctgcagatctgtggcctggctgtggcagatgctggggagtactcctgtgtgtgtggggaggagaggacctctgccactctcaccgtgaaggccctgccagccaagttcacagagggtctgaggaatgaagaggccgtggaaggggccacagccatgttgtggtgtgaactgagcaaggtggcccctgtggagtggaggaaggggcccgagaacctcagagatggggacagatacatcctgaggcaggaggggaccaggtgtgagctgcagatctgtggcctggccatggcggacgccggggagtacttgtgtgtgtgcgggcaggagaggacctcagccacgctcaccatcagggctctgcctgccaggttcatagaagatgtgaaaaaccaggaggccagagaaggggccacagctgtgctgcagtgtgagctgaacagtgcagcccctgtggagtggagaaaggggtctgagacccttagagatggggacagatacagcctgaggcaggacgggactaaatgtgagctgcagattcgtggcctggccatggcagacactggggagtactcgtgcgtgtgcgggcaggagaggacctcggctatgctcaccgtcagggctctacccatcaagttcacagagggtctgaggaacgaagaggccacagaaggggcaacagccgtgctgcggtgtgagctgagcaagatggcccccgtggagtggtggaaggggcatgagaccctcagagatggagacagacacagcctgaggcaggacggggccaggtgtgagctgcagatccgcggcctcgtggcagaggacgctggggagtacctgtgcatgtgcgggaaggagaggacctcagccatgctcaccgtcagggccatgccttccaagttcatagagggtctgaggaatgaagaggccacagaaggggacacggccacgctgtggtgtgagctgagcaaggcggcaccggtggagtggaggaaggggcatgagaccctcagagatggggacagacacagcctgaggcaggacgggtccaggtgtgagctgcagatccgtggcctggctgtggtggatgccggggagtactcgtgtgtgtgcgggcaggagaggacctcagccacactcactgtcagggccctgcctgccagattcatagaagatgtgaaaaaccaggaggccagagaaggggccacggccgtgctgcaatgtgagctgagcaaggcggcccccgtggagtggaggaaggggtctgagaccctcagaggtggggacagatacagcctgaggcaggatgggaccagatgtgagctgcagattcatggcctgtctgtggcagacactggggagtactcgtgtgtgtgcgggcaggagaggacctcggccacactcaccgtcagggccccacagccagtgttccgggagccgctgcagagtctgcaggcggaggagggctccacggccaccctgcagtgtgagctgtctgagcccactgctacagtggtctggagcaagggtggcctgcagctgcaggccaatgggcgccgggagccacggcttcagggctgcaccgcggagctggtgttacaggacctacaacgtgaagacactggcgaatacacttgcacctgtggctcccaggccaccagtgccaccctcactgtcacagctgcgcctgtgcggttcctccgagagctgcagcaccaggaggtggatgagggaggcaccgcacacttatgctgcgagctgagccgggcgggtgcgagcgtggagtggcgcaagggctccctacagctcttcccttgtgccaagtaccagatggtgcaggatggtgcagctgcagagctgctggtacgcggagtggagcaggaggatgcgggtgactacacgtgtgacacgggccacacgcagagcatggccagcctctctgtccgtgtccccaggcccaagttcaagacccggcttcagagtctggagcaggagacaggtgacatagcccggctgtgctgtcagctgagtgatgcagagtcgggggccgtggtgcaatggctcaaggagggcgtggagctgcatgcgggccccaagtacgagatgcggagccagggggccacgcgggagctgctgatccaccaactggaggccaaggacacgggcgagtatgcctgtgtgacaggcggccagaaaaccgctgcctccctcagggtcacagagcctgaggtgaccattgtacgggggctggttgatgcggaggtgacggccgatgaggatgttgagttcagctgtgaggtgtccagggctggagccacaggcgtgcagtggtgcctacagggcctgccactgcaaagcaatgaggtgacagaggtggctgtgcgggatggccgcatccacaccctgcggctgaagggcgtgacgcccgaggacgctggcactgtctccttccatttgggaaaccatgcttcctctgcccagctcaccgtcagagctcctgaggtgaccatcctggagcccctgcaggacgtgcagctcagtgagggccaggatgccagcttccagtgccggctatccagagcttcaggccaggaggcccgctgggctttaggaggggtgcccctgcaggccaacgagatgaatgacatcactgtggagcagggcacactccacctgctcaccctgcacaaggtgacccttgaggatgctggaactgtcagtttccacgtgggcacgtgtagctctgaggcccagctgaaagtcacagccaagaacacggtggtgcgggggctggagaatgtggaggcgctggagggcggcgaggcgctgttcgagtgccagctgtcccagcccgaggtggccgcccacacctggctgctggacgacgaacccgtgcacacctcggagaacgccgaggtggtcttcttcgagaacggcctgcgccacctgctgctgctcaaaaacttgcggccacaagacagctgccgggtgaccttcctggctggggatatggtgacgtccgcattcctcacggtccgaggctggcgcctggagatcctggagcctctgaaaaacgcggcggtccgggccggcgcacaggcatgcttcacctgcacgctcagcgaggcggtgcccgtgggagaggcgtcctggtacatcaatggcgcggcagtgcagccggatgacagcgactggactgtcaccgccgacggcagtcaccacgccctactgctgcgcagcgcccagccccaccacgccggggaggtcaccttcgcttgccgcgacgccgtggcctctgcgcggctcaccgtgctgggcctccctgatcccccagaggatgctgaggtggtggctcgcagcagccacactgtgacactgtcttgggcagctcccatgagtgatggaggcggtggtctctgtggctaccgcgtggaggtgaaggagggggccacaggccagtggcggctgtgccacgagctggtgcctggacccgagtgtgtggtggatggcctggcccccggggagacctaccgcttccgtgtggcagctgtgggccctgtgggtgctggggaaccggttcacctgccccagacagtgcggcttgcagagccaccgaagcctgtgcctccccagccctcagcccctgagagccggcaggtggcagctggtgaagatgtctctctggagcttgaggtggtggctgaggctggtgaggtcatctggcacaagggaatggagcgcatccagcccggtgggcggttcgaggtggtctcccagggtcggcaacagatgctggtgatcaagggcttcacggcagaagaccagggcgagtaccactgtggcctggctcagggctccatctgccctgcggctgccaccttccaggtggcactgagcccagcctctgtggatgaggcccctcagcccagcttgccccccgaggcagcccaggagggtgacctgcacctactgtgggaggccctggctcggaaacgtcgcatgagccgtgagcccacgctggactccattagcgagctgccagaggaggacggccgctcgcagcgcctgccacaggaggcagaggaggtggcacctgatctctctgaaggctactccacggccgatgagctggcccgcactggagatgctgacctctcacacaccagctctgatgatgagtcccgggcaggcaccccttccctggtcacctacctcaagaaggctgggaggccaggcacctcaccactggccagcaaggttggggccccagcagccccctctgtgaagccacagcagcagcaggagccactggctgctgtgcgcccaccactgggagacctgagcaccaaagacctgggtgatccctcaatggacaaggcagctgtgaagatccaggctgcctttaagggctacaaggtccggaaggagatgaagcagcaggaagggcccatgttctcccacacatttggggacaccgaggcacaggtgggggatgccctgcggctggagtgtgtcgtggccagcaaggcagatgtgcgagcccgctggctgaaggatggtgtggagctgaccgatgggcggcaccatcacatcgaccagcttggggatggcacctgctctctgctgatcactggcctggaccgtgctgatgctggctgctacacctgtcaggtgagcaacaagtttggccaggtgacccacagtgcctgtgtggtggtcagtgggtcagagagtgaagccgagagctcctctgggggtgagctggacgatgccttccgccgggctgcccgtcggctgcaccggctcttccgcaccaaaagtccggctgaagtttcagatgaggagctcttcctgagtgcagacgagggccctgcagagccagaggagcccgcggactggcagacataccgcgaagatgagcatttcatctgcatccgttttgaggcgctcactgaggcccgccaggcggtaactcgcttccaggagatgtttgccacactgggcattggggtggagatcaagctggtggaacaggggcctcggagggtagagatgtgcatcagcaaagagactcctgcccctgtggtgcctccagagccattgcccagcctactgacttctgacgctgccccagtgttcctgactgagttgcagaaccaagaagtgcaggatgggtatcctgtgagctttgactgcgtggtgacaggtcagcccatgcccagtgtgcgctggttcaaggatgggaagttgttggaggaggatgatcactacatgattaatgaagaccaacagggtggccatcagctcatcatcacagccgtggtgccagcagacatgggcgtctaccgctgcctggccgagaacagcatgggtgtctcctccaccaaggctgagctccgtgtggacttgacaagcacagactatgacactgcagcagatgccacggagtcctcatcctacttcagtgcccaaggctacctgtccagccgggagcaggagggaacagagtccaccactgatgagggccagctgccccaggtggtggaggagctgagagacctccaggtggcccctggcacacgcctggccaagttccagctcaaggtgaaaggctaccctgctcccagattatactggttcaaagatggccagcccctgaccgcatctgcccacatccgcatgactgacaagaagatcctgcacaccctggagatcatctccgtcacccgggaggactctggccagtatgcagcctatatcagcaatgccatgggtgctgcctactcgtctgcccggctgctggttcgaggccctgatgagccagaagagaagcctgcatcagatgtgcatgagcagctggtgccgccccgaatgctggagaggttcacccccaagaaagtgaagaaaggctccagcatcaccttctctgtgaaggtagaaggacgcccggtgcccaccgtgcactggctcagggaggaggctgagagaggcgtgctgtggattggccctgacacaccgggctacaccgtggccagctctgcgcagcagcacagcctggtcctgctggacgtgggccggcagcaccagggcacctacacatgcattgccagcaacgctgccggccaggccctctgctccgccagcctgcacgtctcgggcctgcctaaggtggaggagcaggagaaagtgaaggaagcgctgatttccactttcctgcaggggaccacacaagccatctcagcacaggggttggaaactgcgagttttgctgaccttggtgggcagaggaaagaagagcctctggctgccaaggaggccctcggccacctgtccctcgctgaggtgggcacagaggagttcctgcagaaactgacctcccagatcactgagatggtatcggccaagatcacgcaggccaagctgcaggtgcccggaggtgacagtgatgaggactccaagacaccatctgcatccccccgccatggccgatcacggccatcctccagcatccaggagtcttcctcagagtcagaggacggcgatgcccgaggcgagatctttgacatctacgtggtcaccgctgactacctgcccctaggggctgagcaggatgccatcacgctgcgggaaggccagtatgtggaggtcctggatgcagcccacccactgcgctggcttgtccgcaccaagcccaccaagtccagcccctcacggcagggctgggtgtcaccagcctacctggacaggaggctcaagctgtcacctgagtggggggccgctgaggcccctgagttccctggggaggctgtgtctgaagacgaatacaaggcaaggctgagctctgtgatccaggagctgctgagttctgagcaggccttcgtggaggagctgcagttcctgcagagccaccacctgcagcacctggagcgctgcccccacgtgcccatagctgtggccggccagaaggcagtcatcttccgcaatgtgcgggacatcggccgcttccacagcagcttcctgcaggagttgcagcagtgcgacacggacgacgacgtggccatgtgcttcatcaagaaccaggcggcctttgagcagtacctggagttcctggtggggcgtgtgcaggctgagtcggtggtcgtcagcacggccatccaggagttctacaagaaatacgcggaggaggccctgttggcaggggacccctctcagcccccgccaccacctctgcagcactacctggagcagccagtggagcgggtgcagcgctaccaggccttgctgaaggagctgatccgcaacaaggcgcggaacagacagaactgcgcgctgctggagcaggcctatgccgtggtgtctgccctgccacagcgcgctgagaacaagctgcacgtgtccctcatggagaactacccaggcaccctgcaggccctgggcgagcccatccgccagggccacttcatcgtgtgggagggtgcaccgggggcccgcatgccctggaagggccacaaccgtcacgtgttcctcttccgcaaccacctggtaatctgcaagccccggcgagactcccgcaccgataccgtcagctacgtgttccggaacatgatgaagctgagcagcatcgacctgaacgaccaggtggagggggatgaccgcgccttcgaggtgtggcaggagcgggaggactcggtgcgcaagtacctgctgcaggcacggacagccattatcaagagctcgtgggtgaaggagatctgtggcatccagcagcgtctggccctgcctgtgtggcggcccccggactttgaagaggagctggccgactgcacagccgagctgggtgagacagtcaagctggcctgccgcgtgacgggcacacccaagcctgtcatcagctggtacaaagatgggaaagcagtgcaggtggacccccaccacatcctcattgaagaccctgatggctcgtgtgcactcatcctggacagcctgaccggtgtggactctggccagtacatgtgcttcgcggccagcgccgctggcaactgcagtaccctgggcaagatcctggtgcaagtcccaccacggttcgtgaacaaggtccgggcctcaccctttgtggagggagaggacgcccagttcacctgcaccatcgaaggcgccccgtacccgcagatcaggtggtacaaggacggggccctgctgaccactggcaacaagttccagacactgagtgagcctcgcagcggcctgctagtgctggtgatccgggcggccagcaaggaggacctggggctctacgagtgtgagctggtgaaccggctgggctccgcgcgggctagtgcggagctgcgcattcagagccccatgctgcaggcccaggagcagtgtcacagggagcagctcgtggctgcagtggaagacaccaccctggagcgagcggaccaggaggtcacatctgtcctgaagagactgctgggccccaaggcgccaggcccctccacaggggacctcactggccctggcccctgccccaggggggcacccgcactccaggaaaccggctcccagcccccagtcaccggaacttcggaggcacctgccgtgcccccgagggtgccacagcccctcctccacgaaggcccagagcaggagccggaggccattgccagagcccaggaatggactgtgcccattcggatggagggtgcagcctggcccggggcaggcacaggggagctgctctgggacgtccacagccacgtggtcagagagaccacacagaggacctacacataccaggccatcgacacgcacaccgcacggcccccatccatgcaggtaaccatcgaggatgtgcaggcacagacaggcggaacggcccaattcgaggctatcattgagggcgacccacagccctcggtgacctggtacaaggacagcgtccagctggtggacagcacccggcttagccagcagcaagaaggcaccacatactccctggtgctgaggcatgtggcctcgaaggatgccggcgtttacacctgcctggcccaaaacactggtggccaggtgctctgcaaggcagagctgctggtgcttgggggggacaatgagccggactcagagaagcaaagccaccggaggaagctgcactccttctatgaggtcaaggaggagattggaaggggcgtgtttggcttcgtaaaaagagtgcagcacaaaggaaacaagatcttgtgcgctgccaagttcatccccctacggagcagaactcgggcccaggcatacagggagcgagacatcctggccgcgctgagccacccgctggtcacggggctgctggaccagtttgagacccgcaagaccctcatcctcatcctggagctgtgctcatccgaggagctgctggaccgcctgtacaggaagggcgtggtgacggaggccgaggtcaaggtctacatccagcagctggtggaggggctgcactacctgcacagccatggcgttctccacctggacataaagccctctaacatcctgatggtgcatcctgcccgggaagacattaaaatctgcgactttggctttgcccagaacatcaccccagcagagctgcagttcagccagtacggctcccctgagttcgtctcccccgagatcatccagcagaaccctgtgagcgaagcctccgacatttgggccatgggtgtcatctcctacctcagcctgacctgctcatccccatttgccggcgagagtgaccgtgccaccctcctgaacgtcctggaggggcgcgtgtcatggagcagccccatggctgcccacctcagcgaagacgccaaagacttcatcaaggctacgctgcagagagcccctcaggcccggcctagtgcggcccagtgcctctcccacccctggttcctgaaatccatgcctgcggaggaggcccacttcatcaacaccaagcagctcaagttcctcctggcccgaagtcgctggcagcgttccctgatgagctacaagtccatcctggtgatgcgctccatccctgagctgctgcggggcccacccgacagcccctccctcggcgtagcccggcacctctgcagggacactggtggctcctccagttcctcctcctcctctgacaacgagctcgccccatttgcccgggctaagtcactgccaccctccccggtgacacactcaccactgctgcacccccggggcttcctgcggccctcggccagcctgcctgaggaagccgaggccagtgagcgctccaccgaggccccagctccgcctgcatctcccgagggtgccgggccaccggccgcccagggctgcgtgccccggcacagcgtcatccgcagcctgttctaccaccaggcgggtgagagccctgagcacggggccctggccccggggagcaggcggcacccggcccggcggcggcacctgctgaagggcgggtacattgcgggggcgctgccaggcctgcgcgagccactgatggagcaccgcgtgctggaggaggaggccgccagggaggagcaggccaccctcctggccaaagccccctcattcgagactgccctccggctgcctgcctctggcacccacttggcccctggccacagccactccctggaacatgactctccgagcaccccccgcccctcctcggaggcctgcggtgaggcacagcgactgccttcagccccctccgggggggcccctatcagggacatggggcaccctcagggctccaagcagcttccatccactggtggccacccaggcactgctcagccagagaggccatccccggacagcccttgggggcagccagcccctttctgccaccccaagcagggttctgccccccaggagggctgcagcccccacccagcagttgccccatgccctcctggctccttccctccaggatcttgcaaagaggcccccttagtaccctcaagccccttcttgggacagccccaggcaccccctgcccctgccaaagcaagccccccattggactctaagatggggcctggagacatctctcttcctgggaggccaaaacccggcccctgcagttccccagggtcagcctcccaggcgagctcttcccaagtgagctccctcagggtgggctcctcccaggtgggcacagagcctggcccctccctggatgcggagggctggacccaggaggctgaggatctgtccgactccacacccaccttgcagcggcctcaggaacaggcgaccatgcgcaagttctccctgggtggtcgcgggggctacgcaggcgtggctggctatggcacctttgcctttggtggagatgcagggggcatgctggggcaggggcccatgtgggccaggatagcctgggctgtgtcccagtcagaggaggaggagcaggaggaggccagggctgagtcccagtcggaggagcagcaggaggccagggctgagagcccactgccccaggtcagtgcaaggcctgtgcctgaggtcggcagggctcccaccaggagctctccagagcccaccccatgggaggacatcgggcaggtctccctggtgcagatccgggacctgtcaggtgatgcggaggcggccgacacaatatccctggacatttccgaggtggaccccgcctacctcaacctctcagacctgtacgatatcaagtacctcccattcgagtttatgatcttcaggaaagtccccaagtccgctcagccagagccgccctcccccatggctgaggaggagctggccgagttcccggagcccacgtggccctggccaggtgaactgggcccccacgcaggcctggagatcacagaggagtcagaggatgtggacgcgctgctggcagaggctgccgtgggcaggaagcgcaagtggtcctcgccgtcacgcagcctcttccacttccctgggaggcacctgccgctggatgagcctgcagagctggggctgcgtgagagagtgaaggcctccgtggagcacatctcccggatcctgaagggcaggccggaaggtctggagaaggaggggccccccaggaagaagccaggccttgcttccttccggctctcaggtctgaagagctgggaccgagcgccgacattcctaagggagctctcagatgagactgtggtcctgggccagtcagtgacactggcctgccaggtgtcagcccagccagctgcccaggccacctggagcaaagacggagcccccctggagagcagcagccgtgtcctcatctctgccaccctcaagaacttccagcttctgaccatcctggtggtggtggctgaggacctgggtgtgtacacctgcagcgtgagcaatgcgctggggacagtgaccaccacgggcgtcctccggaaggcagagcgcccctcatcttcgccatgcccggatatcggggaggtgtacgcggatggggtgctgctggtctggaagcccgtggaatcctacggccctgtgacctacattgtgcagtgcagcctagaaggcggcagctggaccacactggcctccgacatctttgactgctgctacctgaccagcaagctctcccggggtggcacctacaccttccgcacggcatgtgtcagcaaggcaggaatgggtccctacagcagcccctcggagcaagtcctcctgggagggcccagccacctggcctctgaggaggagagccaggggcggtcagcccaacccctgcccagcacaaagaccttcgcattccagacacagatccagaggggccgcttcagcgtggtgcggcaatgctgggagaaggccagcgggcgggcgctggccgccaagatcatcccctaccaccccaaggacaagacagcagtgctgcgcgaatacgaggccctcaagggcctgcgccacccgcacctggcccagctgcacgcagcctacctcagcccccggcacctggtgctcatcttggagctgtgctctgggcccgagctgctcccctgcctggccgagagggcctcctactcagaatccgaggtgaaggactacctgtggcagatgttgagtgccacccagtacctgcacaaccagcacatcctgcacctggacctgaggtccgagaacatgatcatcaccgaatacaacctgctcaaggtcgtggacctgggcaatgcacagagcctcagccaggagaaggtgctgccctcagacaagttcaaggactacctagagaccatggctccagagctcctggagggccagggggctgttccacagacagacatctgggccatcggtgtgacagccttcatcatgctgagcgccgagtacccggtgagcagcgagggtgcacgcgacctgcagagaggactgcgcaaggggctggtccggctgagccgctgctacgcggggctgtccgggggcgccgtggccttcctgcgcagcactctgtgcgcccagccctggggccggccctgcgcgtccagctgcctgcagtgcccgtggctaacagaggagggcccggcctgttcgcggcccgcgcccgtgaccttccctaccgcgcggctgcgcgtcttcgtgcgcaatcgcgagaagagacgcgcgctgctgtacaagaggcacaacctggcccaggtgcgctgagggtcgccccggccacacccttggtctccccgctgggggtcgctgcagacgcgccaataaaaacgcacagccgggcgag

SEQ ID NO: 161736 - DNA, 1877 bp, Homo sapiens
  Payload ID: 11573
  Gene Symbol: OBSCN
  Gene Name: obscurin, cytoskeletal calmodulin and titin-interacting RhoGEF
  ENST ID: ENST00000474237
  CDS Start-End: 1-206
cagggagcagctcgtggctgcagtggaagtcactgagcaagagactaaagtccccaagaaaaccgtcatcatgtaagtgcaggcgtgttcctaaccttccttctgactgcagtgcctcctgcatgccactgacctgcctggatcatgcctgtgtggcccagccacctgcttgctgcctgtctgctcacataacatgcaccctctgactgccagcaccttacagagaagagaccatcaccactgtggtgaagagcccacgtggccaacgacggtcccccagcaagtccccctcccgctcaccttcccgctgctctgccagcccgctgaggccaggcctactggcccccgacctgctgtacctgccaggtgctggccagccccgcaggccggaggcagaaccaggccagaagcccgtggtgcccacactgtatgtgacggaggccgaggcccactctccagctctgcccggactctcggggccccagcccaagtgggtggaggtggaggagaccattgaagtccgggtgaagaagatgggcccgcagggtgtgtctcccaccacagaggtgcccaggagctcatcggggcatctcttcacactgcccggtgcgacccccggaggggaccccaattccaacaactccaacaacaagctgctggcccaggaggcctgggcccagggcacagccatggtcggcgtcagagagccccttgtcttccgcgtggatgccagaggcagtgtggactgggctgcttctggcatgggcagcctggaggaggagggcaccatggaggaggcgggagaggaagagggggaagacggagacgcctttgtgacggaggagtcccaggacacacacagccttggggatcgtgaccccaagatcctcacgcacaacggccgcatgctgacactggctgacctggaagattacgtgcctggggaaggggagaccttccactgtggtggccctgggcctggcgcccctgatgaccctccctgcgaggtctcggtgatccagagagagatcggggagcccacggtggggcagcctgtgctgctcagcgtggggcatgcactgggtccccgaggccctctcggcctctttaggcctgagccccgtggggcgtcaccaccgggaccccaggtccgtagccttgagggcacctccttcctcttgcgggaggccccggctcggcctgtgggcagtgctccctggacgcagtctttctgcacccgcatccggcgttctgcggacagtggccagagcagcttcaccacagagctttccacccagaccgtcaacttcgggacagtgggggagacggtcacccttcacatctgcccagacagggatggggatgaggcggcacagccctgatgctgctgccatggtggcttggggcagcggggagaaaggagtgtccttgaggcctaggacgctgcccggcctcagcagcagccctgggagcctcctgagggccctccctgtccctggccacgggcccttcttacctcactcaacttcagccaggaggactgggtggtgcttgcaatgttggaatgaccggctcaaagacctcagctctgggctgtttcctgtcagcctggcaggagcctcaggactgtggacgaaggatgtggccttgggcatttgtcctgttcccacatgggcctggtccctccctcctggccccagccacagctgccaggcctgacatggccttgcctctcctgcagtcttggtgactgagacccttgggtggcgcttcccagctctgcaggccctcctggccttttctgcagggtggacacagggtctgtgtgtgggcagcagcccctgtctctcagcaagaataaagcagcttcctgtgca

SEQ ID NO: 161737 - DNA, 26925 bp, Homo sapiens
  Payload ID: 11573
  Gene Symbol: OBSCN
  Gene Name: obscurin, cytoskeletal calmodulin and titin-interacting RhoGEF
  ENST ID: ENST00000570156
  CDS Start-End: 75-26846
tgcctcccagcctgtgcccccagcctgcgtgctgcccagagcccccatagagagaggtccccgccgccaccctcatggatcagccacagttcagcggggcgccccgctttctcacccggcccaaggccttcgtggtgtcggtgggcaaggacgccaccctcagctgccagatcgtgggtaatcccacgccacaggtgagctgggagaaggaccagcagccggtggcggccggcgcgcgcttccgtctggcccaggacggcgacctctaccgcctcactatcctggacctggcgctgggcgacagtgggcaatacgtgtgccgcgcgcgcaatgccataggcgaggccttcgctgctgtgggcctgcaggtggacgcggaggccgcgtgcgccgagcaggcgccgcacttcctgctgcggcccacgtccatccgcgtgcgcgagggctcagaggccaccttccgctgccgcgtgggtggctccccgaggccggcagtgagctggtccaaggacgggcggcgcctgggtgagcccgacggcccccgcgtgcgcgtggaggagctcggcgaggcaagtgcgctgcgcattcgggcggcgcggccgcgcgacggcggcacttacgaggtccgcgccgagaacccgctgggcgctgccagcgccgccgcggcgctagtggtggactcggacgccgcggacacggccagccggcccgggacctccacggccgcgctcctggcgcacctgcagcggcggcgcgaggctatgcgcgccgagggcgcccccgcctcaccgcccagcaccggcacgcgcacctgcacggtgactgaaggcaagcacgcgcgcctcagctgctacgtgaccggcgagcccaagcccgagacggtgtggaagaaggacggccagctggtgaccgagggccggcgccacgtggtgtacgaggacgcgcaggagaacttcgtgctcaagatcctcttctgcaagcagtcggaccgcggcctctacacctgcacggcgtccaacctcgtgggccagacctacagctctgtgctggtcgtagtgcgcgagcccgcggttcccttcaaaaagcggctgcaagatctggaggtgcgggagaaggagtcggccacgttcctatgtgaggtgccccagccgtccactgaggccgcgtggttcaaggaggagacgcggttgtgggcgagcgccaagtacggcatcgaggaggagggcaccgagcgccgcctgaccgtgcgcaatgtctcggccgacgacgacgcggtgtacatctgcgagacgccagagggcagccgcacggtggcggagctcgcagtccaaggaaacctcctccgaaagctccctcggaagacggcggtgcgcgtgggcgacacggctatgttttgcgtggagctggcggtcccggtgggccccgtccactggctgcggaaccaggaggaagtggtggcggggggccgcgtggccatctccgcggagggcacgcgccacacactaaccatctcccagtgctgcctggaggatgtgggccaggtggcctttatggctggcgactgccagacgtccacccagttctgcgtgtcggcccccaggaagcctcccctgcaaccccctgtggatcctgtggtaaaggccaggatggagagttccgtgattctcagctggtccccaccaccccatggggaacgccctgtcactatcgacggctacctggtagagaagaagaagcttggcacctacacctggatcaggtgccacgaggctgaatgggtggctacacctgagctgaccgtggctgatgtggcggaggaggggaacttccagttccgagtgtccgctctcaacagctttggtcagagtccctacctcgagttcccggggactgtccacctggcccccaagctggccgtgaggacaccgctgaaggcggtgcaggcggtagagggtggcgaggtcactttctccgtggacctcacggtggcctcagcgggtgagtggttcctggatgggcaggccctgaaggccagcagtgtgtatgagatccactgtgatcgcacccggcacacgctcaccatccgggaggtgcccgccagcctgcacggggcgcagctgaagttcgtggccaacggcattgagagcagcatccggatggaggtccgggcggccccagggctgactgccaacaagccgccagccgcagctgcccgggaggtgctggctcggctgcacgaggaggcgcagctgctggctgagctgtcagatcaggctgcggctgtgacgtggctgaaggatggtcgcacactgtccccaggccccaagtatgaggtgcaggcatcggccgggcggcgggtgctccttgtgcgagatgtggcccgggacgatgcaggcctctacgagtgcgtcagccgcgggggccgcatcgcctaccagctctccgtgcaaggcctcgcgcgctttctgcacaaggacatggcgggcagctgtgtggatgccgtggctgggggcccggcgcagtttgagtgtgagacctccgaagcccacgtccacgtgcactggtacaaggatggcatggagctgggccactccggtgagcgcttcttgcaggaggatgtggggacgcggcaccggctggtggcagccacagtcaccaggcaggatgaaggcacctactcctgccgcgtgggcgaggactctgtggacttccggctccgcgtctctgagcccaaggcggtgtttgccaaggagcagccggcgtgcagggaggtgcaggctgaggtgggggccagcgccacgctgagctgtgaggtggcccaggaccagatggaggtgacgtggtacaaggacgggaagaagttgagctccagctcgaaagtgcacgtggaggctgtgggctgtatgcggaggctggtggtgcagcaggtgggccaggcagactccggagagtacagctgtgaggccaggggacagagggtctccttccgcctggacgttgcagagcccaaggtggtgtttgctaaggagcagctggcacgcaggaagctgcaggcagaggcaggagccagtgccacactgagctgcgaggtggcccaggcccagacggaggtgacgtggtacaaggatgggaagaagctgagctccagctcgaaagtgtgcatggaggccacaggctgcacgcgcaggctggttgtgcagcaggcaggccaggcggatgccggggagtatagctgcgaggctgggggccagcggctctccttccatctggatgtcaaagagcccaaggtggtgtttgccaaggaccaggtggcacacagtgaggtgcaggctgaggcaggggccagtgccacgctgagctgcgaggtggcccaggcccagacggaggtgatgtggtacaaagatgggaagaagctgagctccagcttgaaagtgcatgtagaggccaagggctgcagacggaggctggtggtgcagcaggcaggcaagacagatgccggggactacagctgcgaggccaggggccagagggtctccttccgcctgcacatcacagagcccaagatgatgtttgcaaaggagcagtcagtgcataatgaggtgcaggctgaggcgggggccagtgccatgctgagctgtgaggtggcccaggcccagacggaggtgacgtggtacaaggatgggaagaagctgagctccagctcaaaagtgggcatggaggtcaaagggtgcacacggaggctggtgctgccacaggcgggcaaagcagatgctggggagtacagctgtgaggctgggggccagagagtctccttccacctgcacatcacagagcccaagggggtgtttgcgaaggagcagtcagtgcataatgaggtgcaggctgaggcggggaccactgccatgctgagctgtgaggtggcccagccccagacagaggtgacgtggtacaaggacgggaagaagctgagctccagctcaaaagtacgcatggaggtcaagggctgcacacgaaggctggtagtgcagcaggtgggcaaagcagatgctggggagtacagctgcgaggctgggggccagagagtctcctttcaactgcacatcacagagcccaaggcagtgtttgccaaggagcagttggtgcataatgaggtgcggactgaggcaggggccagtgccacactgagctgtgaggtggcccaggcccagacagaggtgacgtggtacaaggatgggaagaagctgagctccagttcgaaagtgcgcatagaggctgcgggctgcatgcggcagctggtggtgcagcaggcaggccaggcagatgctggggagtacacctgtgaggctgggggccagcggctctccttccacctggatgtttcagagcccaaggcggtgtttgcaaaggagcagctggcacacaggaaggtgcaggccgaggcgggggccattgccacgctgagctgcgaggtggcccaggcccagacagaggtgacgtggtacaaggacgggaagaagctgagctccagctcgaaagttcgaatggaggctgtgggctgcacacggaggctggtggtgcagcaggcatgccaggcggacaccggggagtatagctgcgaggccgggggccagcggctctccttcagcctggacgtggcagagcccaaggtggtgtttgccaaggagcagccagtgcacagggaggtgcaggcccaggcgggggccagcaccacactcagctgcgaggtggctcaggcccagacggaggtgatgtggtacaaggacgggaagaagctgagcttcagctcgaaagtgcgcatggaggctgtgggctgcacacggaggctggtggtgcagcaggcgggccaggcggtcgccggggagtacagctgcgaggcggggagccagcggctctccttccacctgcacgtggcagagcccaaggcggtgtttgctaaggagcagccagcacacagggaggtgcaggctgaagcaggggctagcgccacactgagctgtgaggtggcccaggcccagacagaggtgacttggtacaaggacgggaagaagctgagctccagcttgaaagtgcatgtggaggctgcaggctgtacacggaggctggtggtgcagcaggcaggccaggcagacaccggagagtatagctgtgaggctgggggccagcagctctccttccgcctgcaagtggcagagcccaaggcggtgtttgccaaggagcagccagcgagcagggaggtgcaggctgaggcggggaccagtgccacgctgagctgcgaggtggcccaggcccagacagaggtgacgtggtacaaggacgggaagaaactgagctccagctcgaaagtgcgaatggaggccgtgggctgcacacggaggctggtggtgcaggaggcaggccaggcggacgccggggagtacagctgcaaggccggggatcagcggctgtccttccacctgcacgtggcagagcccaaggtggtgtttgccaaggagcagccagcacacagggaggtgcaggctgaggcgggggccagtgccacgctgagctgcgaggtggcccaggcccagacagaggtgacgtggtacaaggatgggaagaagctgagttccagctcgaaagtgcgcgtggaggccgtgggctgcacacggaggctggtggtgcagcaggcgggccaggcagaggccggggagtacagctgcgaggcagggggtcagcagctctccttccgcctgcaggtggcagagcccaaggcggtgtttgccaaggagcaggtggtgtttgccaaggatcagccggtgcacagggaggtgcaggctgaggcagggaccagcaccatgctgagctgcgaggtggcccaagcccagacggaggttatgtggtacaaggacgggaagaagctgagctccagctcgaaaatgcgtgtggaggccgtgggctgcacacggaggctggtggtgcaggaggcaggccaggcggacgccggggagtacagctgcgaggctgggggccagcggctctccttccatctgcatgtggctgagcccaaggtggtgtttgccaaggagcagccggcatgcagggaggtgcaggcggaggcgggggccagtgccacgctgagctgtgaggtggcccagggccagatggaggtgacatggtacaaggacgggaagaagctgagctccagctcaaaagtgcacatggaggccagcggctacacacggaggctggtagtgcagcaggcgggccaggcggatgctggggagtacagctgtgaggcggggggccaacggctgtccttccgcctgcacgtggcagagctggagccccaaatttcagagagaccctgccgcagggagcctctggtggtcaaggagcatgaagacatcatcctgaccgccacactggccacaccctctgcggccacggtgacctggctcaaggatggtgtggagattcgccgcagcaagcggcatgagacagccagccagggggacacccacaccctgaccgtgcatggcgcccaggttctggacagcgccatctacagctgccgtgtgggcgcagaggggcaggacttcccagtgcaggtggaagaggtggccgccaagttctgccggctgctggagcctgtgtgcggcgagctgggtggcacggtgacactggcctgcgagctaagcccagcgtgtgcagaggtggtgtggcgctgcggcaacacgcagcttcgggtgggcaagcgcttccagatggtggccgaggggcccgtgcgctcactcactgtgttggggctgcgcgcagaggacgcaggggagtacgtgtgtgagagccgtgatgaccacaccagtgcgcagctcaccgtcagtgtgccccgagtggtgaagtttatgtctgggctgagcaccgtggtcgcagaggagggcggcgaggccaccttccagtgcgtggtgtcccccagtgatgtggcagtcgtgtggttccgggacggtgccctgcttcagcccagcgagaagtttgccatatcacagagtggcgccagccacagcctgaccatctcagacctggtgctggaggacgcgggccagatcaccgtggaggctgagggcgcctcatcctctgctgccctgagggtccgagaggcgcctgtgctgttcaaaaagaagctggagccgcagacggtggaggagcggagctcggtgaccctggaggtggagctgacgcggccgtggccggagctgaggtggacacggaacgcgacggccctggcgccgggaaagaacgtggagatccacgccgagggcgcccgccaccgcctggttctgcacaacgtaggttttgccgaccgtggcttctttggctgcgagacgccggatgacaagacacaggccaaactcaccgtggagatgcgccaggtacggctcgtacggggcctgcaggcagtggaggcacgggagcagggcacggctaccatggaggtgcagctgtcgcatgcggacgtggatggcagctggactcgtgacggtctgcggttccagcaggggcccacgtgccacctggctgtgcggggccccatgcacaccctcacactctcggggctgcggccagaggatagtggccttatggtcttcaaggccgaaggagtgcacacgtcggcgcggctcgtggtcaccgagcttcccgtgagcttcagccgcccgctgcaggacgtggtgaccactgagaaggagaaggttaccctggagtgcgagctgtcgcgtcctaatgtggatgtgcgctggctgaaggacggtgtggagctgcgggcaggcaagacgatggccatcgcagcccagggcgcctgcaggagcctcaccatttaccggtgcgagttcgcggatcagggagtgtatgtgtgtgatgcccatgatgcccagagctctgcctccgtgaaggtacaaggccgcaacatccagatcgtgaggcccctggaggatgtggaagtgatggagaaggacggtgccaccttctcctgtgaggtctcccacgacgaagtgcctggccagtggttctgggagggcagtaaactgcggcccactgacaacgtgcgcatccgccaggaaggaaggacatacactctcatctaccggagagtcctggcggaagatgcaggagagatccaatttgtagccgaaaatgcagaatcgcgagcccagctccgagtgaaggagctgccagtgaccctcgtgcgcccgctgcgggacaagattgccatggagaagcaccgcggtgtgctggagtgtcaggtgtcccgggccagcgcccaggtgcggtggttcaagggcagtcaggagctgcagcccgggcccaagtacgagctggtcagtgatggcctctaccgcaagctgatcatcagtgatgtccacgcagaggacgaggacacctacacctgtgacgccggtgatgtcaagaccagtgcacagttcttcgtggaagagcaatccatcaccattgtgcggggtctgcaggacgtgacagtgatggagcccgctcctgcctggtttgagtgtgagacctccatcccctcagtgcggccacctaagtggctcctggggaagacggtgttgcaggctggggggaacgtgggcctggagcaggagggcacggtgcaccggctgatgctgcggcggacctgctccaccatgaccgggcccgtgcacttcaccgttggcaagtcgcgctcctctgcccgcctggtggtctcagacatccccgtagtcctcacacggccgttggagcccaagacagggcgtgagctgcagtcagtggtcctgtcctgcgacttccggccagcccccaaggctgtgcagtggtacaaggatgacacgcccctgtctccctctgagaagtttaagatgagcctggagggtcagatggctgagctgcgcatcctccggctcatgcctgctgatgctggtgtctaccggtgccaggcgggcagtgcccacagcagcactgaggtcactgtggaagcgcgggaggtgacagtgacagggccgctacaggatgcagaggccacggaggagggctgggccagcttctcctgtgagctgtcccacgaggatgaggaggtcgagtggtcgctcaacgggatgcccctgtacaacgacagcttccatgagatctcacacaagggccggcgccacacgctggtactgaagagcatccagcgggctgatgcgggcatagtacgcgcctcctccctgaaggtgtcgacctctgcccgcctggaggtccgagtgaagccggtggtgttcctgaaggcgctggatgacctgtccgcagaggagcgcggcaccctggccctgcagtgtgaagtctctgaccccgaggcccatgtggtgtggcgcaaagatggcgtgcagctgggccccagtgacaagtatgacttcctgcacacggcgggcacgcgggggctcgtggtgcatgacgtgagccctgaagacgccggcctgtacacctgccacgtgggctccgaggagacccgggcccgggtccgcgtgcacgatctgcacgtgggcatcaccaagaggctgaagacaatggaggtgctggaaggggaaagctgcagctttgagtgcgtcctgtcccacgagagtgccagcgacccggccatgtggacagtcggtgggaagacagtgggcagctccagccgcttccaggccacacgtcagggccgaaaatacatcctggtggtccgggaggctgcaccaagtgatgccggggaggtggtcttctctgtgcggggcctcacctccaaggcctcactcattgtcagagagaggccggccgccatcatcaagcccctggaagaccagtgggtggcgccaggggaggacgtggagctgcgctgtgagctgtcacgggcgggaacgcccgtgcactggctgaaggacaggaaggccatccgcaagagccagaagtatgatgtggtctgcgagggcacgatggccatgctggtcatccgcggggcctcgctcaaggacgcgggcgagtacacgtgtgaggtggaggcttccaagagcacagccagcctccatgtggaagaaaaagcaaactgcttcacagaggagctgaccaatctgcaggtggaggagaaaggcacagctgtgttcacgtgcaagacggagcaccccgcggccacagtgacctggcgcaagggcctcttggagctacgggcctcagggaagcaccagcccagccaggagggcctgaccctgcggctcaccatcagtgccctggagaaggcagacagcgacacctatacctgcgacattggccaggcccagtcccgggcccagctcctagtgcaaggccggagagtgcacatcatcgaggacctggaggatgtggatgtgcaggagggctcctcggccaccttccgttgccggatctccccggccaactacgagcctgtgcactggttcctggacaagacacccctgcatgccaacgagctcaatgagatcgatgcccagcccgggggctaccacgtgctgaccctgcggcagctggcgctcaaggactcgggcaccatctactttgaggcgggtgaccagcgggcctcggccgccctgcgggtcactgagaagccaagcgtcttctcccgggagctcacagatgccaccatcacagagggtgaggacttgaccctggtgtgcgagaccagcacctgcgacattcctgtgtgctggaccaaggatgggaagaccctgcgggggtctgcccggtgccagctgagccatgagggccaccgggcccagctgctcatcactggggccaccctgcaggacagtggacgctacaagtgtgaggctgggggcgcctgcagcagctccattgtcagggtgcatgcgcggccagtgcggttccaggaggccctgaaggacctggaggtgctggagggtggtgctgccacactgcgctgtgtgctgtcatctgtggctgcgcccgtgaagtggtgctatggaaacaacgtcctgaggccaggtgacaaatacagcctacgccaggagggtgccatgctggagctggtggtccggaacctccggccgcaggacagcgggcggtactcatgctccttcggggaccagactacttctgccaccctcacagtgactgccctgcctgcccagttcatcgggaaactgagaaacaaggaggccacagaaggggccacggccacgctgcggtgtgagctgagcaaggcagcccctgtggagtggagaaaggggtccgagaccctcagagatggggacagatactgtctgaggcaggacggggccatgtgtgagctgcagatccgtggcctggccatggtggatgccgcggagtactcgtgtgtgtgtggagaggagaggacctcagcctcactcaccatcaggcccatgcctgcccacttcataggaagactgagacaccaagagagcatagaaggggccacagccacgctgcggtgtgagctgagcaaggcggcccccgtggagtggaggaaggggcgtgagagcctcagagatggggacagacatagcctgaggcaggacggggctgtgtgcgagctgcagatctgtggcctggctgtggcagatgctggggagtactcctgtgtgtgtggggaggagaggacctctgccactctcaccgtgaaggccctgccagccaagttcacagagggtctgaggaatgaagaggccgtggaaggggccacagccatgttgtggtgtgaactgagcaaggtggcccctgtggagtggaggaaggggcccgagaacctcagagatggggacagatacatcctgaggcaggaggggaccaggtgtgagctgcagatctgtggcctggccatggcggacgccggggagtacttgtgtgtgtgcgggcaggagaggacctcagccacgctcaccatcagggctctgcctgccaggttcatagaagatgtgaaaaaccaggaggccagagaaggggccacagctgtgctgcagtgtgagctgaacagtgcagcccctgtggagtggagaaaggggtctgagacccttagagatggggacagatacagcctgaggcaggacgggactaaatgtgagctgcagattcgtggcctggccatggcagacactggggagtactcgtgcgtgtgcgggcaggagaggacctcggctatgctcaccgtcagggctctacccatcaagttcacagagggtctgaggaacgaagaggccacagaaggggcaacagccgtgctgcggtgtgagctgagcaagatggcccccgtggagtggtggaaggggcatgagaccctcagagatggagacagacacagcctgaggcaggacggggccaggtgtgagctgcagatccgcggcctcgtggcagaggacgctggggagtacctgtgcatgtgcgggaaggagaggacctcagccatgctcaccgtcagggccatgccttccaagttcatagagggtctgaggaatgaagaggccacagaaggggacacggccacgctgtggtgtgagctgagcaaggcggcaccggtggagtggaggaaggggcatgagaccctcagagatggggacagacacagcctgaggcaggacgggtccaggtgtgagctgcagatccgtggcctggctgtggtggatgccggggagtactcgtgtgtgtgcgggcaggagaggacctcagccacactcactgtcagggccctgcctgccagattcatagaagatgtgaaaaaccaggaggccagagaaggggccacggccgtgctgcaatgtgagctgagcaaggcggcccccgtggagtggaggaaggggtctgagaccctcagaggtggggacagatacagcctgaggcaggatgggaccagatgtgagctgcagattcatggcctgtctgtggcagacactggggagtactcgtgtgtgtgcgggcaggagaggacctcggccacactcaccgtcagggccctgcctgcacgattcactcaagatctgaagaccaaggaggcctcagaaggggccacagctacactgcagtgtgagctgagcaaggtggcccctgtggaatggaagaagggtcctgagaccctcagagatgggggcagatacagcctgaagcaggatgggacgaggtgtgagctgcagatccatgacctgtctgtggcggatgctggggaatactcatgcatgtgtggacaagagaggacctcggccacgctcactgtcagggccctgcctgccaggttcacagagggtctgaggaatgaagaggccatggaaggggccacagccacactgcaatgtgagctgagcaaggcagcccctgtggagtggaggaaaggccttgaggctctcagagatggggacaaatacagcctgagacaagacggggctgtgtgtgagctgcagattcatggcctggctatggcagataacggggtgtactcatgtgtgtgtgggcaggagaggacctcagctacactcactgtcagggccctgcctgccagattcatagaggatatgagaaaccagaaggccacagaaggggctacagtcacattgcaatgtaagctgagaaaggcggcccccgtggagtggagaaaggggcccaacaccctcaaagatggggacaggtacagcctgaagcaggatgggaccagttgtgagctgcagattcgtggcctggtcatagcagatgctggagaatactcgtgcatatgtgagcaggagaggacctcggccacgctcactgtcagggccctgccggccagattcatagaagatgtgagaaatcacgaggccacagaaggggccacagctgtgctgcagtgtgagctgagcaaggcggcccccgtggagtggcggaaggggtctgagaccctcagagatggggacagatatagcctgaggcaggacgggacgaggtgtgagctgcagattcgtggcctggctgtggaggacactggagagtatttgtgtgtgtgcgggcaggagagaacctcagctacactcactgtcagggccctgccagccagattcatagacaacatgacaaaccaggaggccagagaaggggccacggccacactgcactgtgaactgagcaaggtggcccctgtggagtggaggaagggacctgaaaccctccgagatggggacagacacagcctgaggcaggatgggaccaggtgtgagctgcagattcgtggcctgtctgtggcagatgccggggagtactcgtgcgtgtgtgggcaggagaggacctcagccacactcacgatcagggccctgcccgccaagttcacaaagggtctgaggaatgaagaggccacagaaggggccacggctatgttgcagtgtgagctgagcaaggtggcccctgttgagtggaggaagggacctgaaaccctcagagatggggacagatacaacctgaggcaggatgggaccagatgtgagctgcagattcatggcctgtccgtggcagacactggggagtactcatgtgtatgtggtcaggagaagacgtcggccactctcactgtcaaggccccacagccagtgttccgggagccgctgcagagtctgcaggcggaggagggctccacggccaccctgcagtgtgagctgtctgagcccactgctacagtggtctggagcaagggtggcctgcagctgcaggccaatgggcgccgggagccacggcttcagggctgcaccgcggagctggtgttacaggacctacaacgtgaagacactggcgaatacacttgcacctgtggctcccaggccaccagtgccaccctcactgtcacagctgcgcctgtgcggttcctccgagagctgcagcaccaggaggtggatgagggaggcaccgcacacttatgctgcgagctgagccgggcgggtgcgagcgtggagtggcgcaagggctccctacagctcttcccttgtgccaagtaccagatggtgcaggatggtgcagctgcagagctgctggtacgcggagtggagcaggaggatgcgggtgactacacgtgtgacacgggccacacgcagagcatggccagcctctctgtccgtgtccccaggcccaagttcaagacccggcttcagagtctggagcaggagacaggtgacatagcccggctgtgctgtcagctgagtgatgcagagtcgggggccgtggtgcaatggctcaaggagggcgtggagctgcatgcgggccccaagtacgagatgcggagccagggggccacgcgggagctgctgatccaccaactggaggccaaggacacgggcgagtatgcctgtgtgacaggcggccagaaaaccgctgcctccctcagggtcacagagcctgaggtgaccattgtacgggggctggttgatgcggaggtgacggccgatgaggatgttgagttcagctgtgaggtgtccagggctggagccacaggcgtgcagtggtgcctacagggcctgccactgcaaagcaatgaggtgacagaggtggctgtgcgggatggccgcatccacaccctgcggctgaagggcgtgacgcccgaggacgctggcactgtctccttccatttgggaaaccatgcttcctctgcccagctcaccgtcagagctcctgaggtgaccatcctggagcccctgcaggacgtgcagctcagtgagggccaggatgccagcttccagtgccggctatccagagcttcaggccaggaggcccgctgggctttaggaggggtgcccctgcaggccaacgagatgaatgacatcactgtggagcagggcacactccacctgctcaccctgcacaaggtgacccttgaggatgctggaactgtcagtttccacgtgggcacgtgtagctctgaggcccagctgaaagtcacagccaagaacacggtggtgcgggggctggagaatgtggaggcgctggagggcggcgaggcgctgttcgagtgccagctgtcccagcccgaggtggccgcccacacctggctgctggacgacgaacccgtgcacacctcggagaacgccgaggtggtcttcttcgagaacggcctgcgccacctgctgctgctcaaaaacttgcggccacaagacagctgccgggtgaccttcctggctggggatatggtgacgtccgcattcctcacggtccgaggctggcgcctggagatcctggagcctctgaaaaacgcggcggtccgggccggcgcacaggcatgcttcacctgcacgctcagcgaggcggtgcccgtgggagaggcgtcctggtacatcaatggcgcggcagtgcagccggatgacagcgactggactgtcaccgccgacggcagtcaccacgccctactgctgcgcagcgcccagccccaccacgccggggaggtcaccttcgcttgccgcgacgccgtggcctctgcgcggctcaccgtgctgggcctccctgatcccccagaggatgctgaggtggtggctcgcagcagccacactgtgacactgtcttgggcagctcccatgagtgatggaggcggtggtctctgtggctaccgcgtggaggtgaaggagggggccacaggccagtggcggctgtgccacgagctggtgcctggacccgagtgtgtggtggatggcctggcccccggggagacctaccgcttccgtgtggcagctgtgggccctgtgggtgctggggaaccggttcacctgccccagacagtgcggcttgcagagccaccgaagcctgtgcctccccagccctcagcccctgagagccggcaggtggcagctggtgaagatgtctctctggagcttgaggtggtggctgaggctggtgaggtcatctggcacaagggaatggagcgcatccagcccggtgggcggttcgaggtggtctcccagggtcggcaacagatgctggtgatcaagggcttcacggcagaagaccagggcgagtaccactgtggcctggctcagggctccatctgccctgcggctgccaccttccaggtggcactgagcccagcctctgtggatgaggcccctcagcccagcttgccccccgaggcagcccaggagggtgacctgcacctactgtgggaggccctggctcggaaacgtcgcatgagccgtgagcccacgctggactccattagcgagctgccagaggaggacggccgctcgcagcgcctgccacaggaggcagaggaggtggcacctgatctctctgaaggctactccacggccgatgagctggcccgcactggagatgctgacctctcacacaccagctctgatgatgagtcccgggcaggcaccccttccctggtcacctacctcaagaaggctgggaggccaggcacctcaccactggccagcaaggttggggccccagcagccccctctgtgaagccacagcagcagcaggagccactggctgctgtgcgcccaccactgggagacctgagcaccaaagacctgggtgatccctcaatggacaaggcagctgtgaagatccaggctgcctttaagggctacaaggtccggaaggagatgaagcagcaggaagggcccatgttctcccacacatttggggacaccgaggcacaggtgggggatgccctgcggctggagtgtgtcgtggccagcaaggcagatgtgcgagcccgctggctgaaggatggtgtggagctgaccgatgggcggcaccatcacatcgaccagcttggggatggcacctgctctctgctgatcactggcctggaccgtgctgatgctggctgctacacctgtcaggtgagcaacaagtttggccaggtgacccacagtgcctgtgtggtggtcagtgggtcagagagtgaagccgagagctcctctgggggtgagctggacgatgccttccgccgggctgcccgtcggctgcaccggctcttccgcaccaaaagtccggctgaagtttcagatgaggagctcttcctgagtgcagacgagggccctgcagagccagaggagcccgcggactggcagacataccgcgaagatgagcatttcatctgcatccgttttgaggcgctcactgaggcccgccaggcggtaactcgcttccaggagatgtttgccacactgggcattggggtggagatcaagctggtggaacaggggcctcggagggtagagatgtgcatcagcaaagagactcctgcccctgtggtgcctccagagccattgcccagcctactgacttctgacgctgccccagtgttcctgactgagttgcagaaccaagaagtgcaggatgggtatcctgtgagctttgactgcgtggtgacaggtcagcccatgcccagtgtgcgctggttcaaggatgggaagttgttggaggaggatgatcactacatgattaatgaagaccaacagggtggccatcagctcatcatcacagccgtggtgccagcagacatgggcgtctaccgctgcctggccgagaacagcatgggtgtctcctccaccaaggctgagctccgtgtggacttgacaagcacagactatgacactgcagcagatgccacggagtcctcatcctacttcagtgcccaaggctacctgtccagccgggagcaggagggaacagagtccaccactgatgagggccagctgccccaggtggtggaggagctgagagacctccaggtggcccctggcacacgcctggccaagttccagctcaaggtgaaaggctaccctgctcccagattatactggttcaaagatggccagcccctgaccgcatctgcccacatccgcatgactgacaagaagatcctgcacaccctggagatcatctccgtcacccgggaggactctggccagtatgcagcctatatcagcaatgccatgggtgctgcctactcgtctgcccggctgctggttcgaggccctgatgagccagaagagaagcctgcatcagatgtgcatgagcagctggtgccgccccgaatgctggagaggttcacccccaagaaagtgaagaaaggctccagcatcaccttctctgtgaaggtagaaggacgcccggtgcccaccgtgcactggctcagggaggaggctgagagaggcgtgctgtggattggccctgacacaccgggctacaccgtggccagctctgcgcagcagcacagcctggtcctgctggacgtgggccggcagcaccagggcacctacacatgcattgccagcaacgctgccggccaggccctctgctccgccagcctgcacgtctcgggcctgcctaaggtggaggagcaggagaaagtgaaggaagcgctgatttccactttcctgcaggggaccacacaagccatctcagcacaggggttggaaactgcgagttttgctgaccttggtgggcagaggaaagaagagcctctggctgccaaggaggccctcggccacctgtccctcgctgaggtgggcacagaggagttcctgcagaaactgacctcccagatcactgagatggtatcggccaagatcacgcaggccaagctgcaggtgcccggaggtgacagtgatgaggactccaagacaccatctgcatccccccgccatggccgatcacggccatcctccagcatccaggagtcttcctcagagtcagaggacggcgatgcccgaggcgagatctttgacatctacgtggtcaccgctgactacctgcccctaggggctgagcaggatgccatcacgctgcgggaaggccagtatgtggaggtcctggatgcagcccacccactgcgctggcttgtccgcaccaagcccaccaagtccagcccctcacggcagggctgggtgtcaccagcctacctggacaggaggctcaagctgtcacctgagtggggggccgctgaggcccctgagttccctggggaggctgtgtctgaagacgaatacaaggcaaggctgagctctgtgatccaggagctgctgagttctgagcaggccttcgtggaggagctgcagttcctgcagagccaccacctgcagcacctggagcgctgcccccacgtgcccatagctgtggccggccagaaggcagtcatcttccgcaatgtgcgggacatcggccgcttccacagcagcttcctgcaggagttgcagcagtgcgacacggacgacgacgtggccatgtgcttcatcaagaaccaggcggcctttgagcagtacctggagttcctggtggggcgtgtgcaggctgagtcggtggtcgtcagcacggccatccaggagttctacaagaaatacgcggaggaggccctgttggcaggggacccctctcagcccccgccaccacctctgcagcactacctggagcagccagtggagcgggtgcagcgctaccaggccttgctgaaggagctgatccgcaacaaggcgcggaacagacagaactgcgcgctgctggagcaggcctatgccgtggtgtctgccctgccacagcgcgctgagaacaagctgcacgtgtccctcatggagaactacccaggcaccctgcaggccctgggcgagcccatccgccagggccacttcatcgtgtgggagggtgcaccgggggcccgcatgccctggaagggccacaaccgtcacgtgttcctcttccgcaaccacctggtaatctgcaagccccggcgagactcccgcaccgataccgtcagctacgtgttccggaacatgatgaagctgagcagcatcgacctgaacgaccaggtggagggggatgaccgcgccttcgaggtgtggcaggagcgggaggactcggtgcgcaagtacctgctgcaggcacggacagccattatcaagagctcgtgggtgaaggagatctgtggcatccagcagcgtctggccctgcctgtgtggcggcccccggactttgaagaggagctggccgactgcacagccgagctgggtgagacagtcaagctggcctgccgcgtgacgggcacacccaagcctgtcatcagctggtacaaagatgggaaagcagtgcaggtggacccccaccacatcctcattgaagaccctgatggctcgtgtgcactcatcctggacagcctgaccggtgtggactctggccagtacatgtgcttcgcggccagcgccgctggcaactgcagtaccctgggcaagatcctggtgcaagtcccaccacggttcgtgaacaaggtccgggcctcaccctttgtggagggagaggacgcccagttcacctgcaccatcgaaggcgccccgtacccgcagatcaggtggtacaaggacggggccctgctgaccactggcaacaagttccagacactgagtgagcctcgcagcggcctgctagtgctggtgatccgggcggccagcaaggaggacctggggctctacgagtgtgagctggtgaaccggctgggctccgcgcgggctagtgcggagctgcgcattcagagccccatgctgcaggcccaggagcagtgtcacagggagcagctcgtggctgcagtggaagacaccaccctggagcgagcggaccaggaggtcacatctgtcctgaagagactgctgggccccaaggcgccaggcccctccacaggggacctcactggccctggcccctgccccaggggggcacccgcactccaggaaaccggctcccagcccccagtcaccggaacttcggaggcacctgccgtgcccccgagggtgccacagcccctcctccacgaaggcccagagcaggagccggaggccattgccagagcccaggaatggactgtgcccattcggatggagggtgcagcctggcccggggcaggcacaggggagctgctctgggacgtccacagccacgtggtcagagagaccacacagaggacctacacataccaggccatcgacacgcacaccgcacggcccccatccatgcaggtaaccatcgaggatgtgcaggcacagacaggcggaacggcccaattcgaggctatcattgagggcgacccacagccctcggtgacctggtacaaggacagcgtccagctggtggacagcacccggcttagccagcagcaagaaggcaccacatactccctggtgctgaggcatgtggcctcgaaggatgccggcgtttacacctgcctggcccaaaacactggtggccaggtgctctgcaaggcagagctgctggtgcttgggggggacaatgagccggactcagagaagcaaagccaccggaggaagctgcactccttctatgaggtcaaggaggagattggaaggggcgtgtttggcttcgtaaaaagagtgcagcacaaaggaaacaagatcttgtgcgctgccaagttcatccccctacggagcagaactcgggcccaggcatacagggagcgagacatcctggccgcgctgagccacccgctggtcacggggctgctggaccagtttgagacccgcaagaccctcatcctcatcctggagctgtgctcatccgaggagctgctggaccgcctgtacaggaagggcgtggtgacggaggccgaggtcaaggtctacatccagcagctggtggaggggctgcactacctgcacagccatggcgttctccacctggacataaagccctctaacatcctgatggtgcatcctgcccgggaagacattaaaatctgcgactttggctttgcccagaacatcaccccagcagagctgcagttcagccagtacggctcccctgagttcgtctcccccgagatcatccagcagaaccctgtgagcgaagcctccgacatttgggccatgggtgtcatctcctacctcagcctgacctgctcatccccatttgccggcgagagtgaccgtgccaccctcctgaacgtcctggaggggcgcgtgtcatggagcagccccatggctgcccacctcagcgaagacgccaaagacttcatcaaggctacgctgcagagagcccctcaggcccggcctagtgcggcccagtgcctctcccacccctggttcctgaaatccatgcctgcggaggaggcccacttcatcaacaccaagcagctcaagttcctcctggcccgaagtcgctggcagcgttccctgatgagctacaagtccatcctggtgatgcgctccatccctgagctgctgcggggcccacccgacagcccctccctcggcgtagcccggcacctctgcagggacactggtggctcctccagttcctcctcctcctctgacaacgagctcgccccatttgcccgggctaagtcactgccaccctccccggtgacacactcaccactgctgcacccccggggcttcctgcggccctcggccagcctgcctgaggaagccgaggccagtgagcgctccaccgaggccccagctccgcctgcatctcccgagggtgccgggccaccggccgcccagggctgcgtgccccggcacagcgtcatccgcagcctgttctaccaccaggcgggtgagagccctgagcacggggccctggccccggggagcaggcggcacccggcccggcggcggcacctgctgaagggcgggtacattgcgggggcgctgccaggcctgcgcgagccactgatggagcaccgcgtgctggaggaggaggccgccagggaggagcaggccaccctcctggccaaagccccctcattcgagactgccctccggctgcctgcctctggcacccacttggcccctggccacagccactccctggaacatgactctccgagcaccccccgcccctcctcggaggcctgcggtgaggcacagcgactgccttcagccccctccgggggggcccctatcagggacatggggcaccctcagggctccaagcagcttccatccactggtggccacccaggcactgctcagccagagaggccatccccggacagcccttgggggcagccagcccctttctgccaccccaagcagggttctgccccccaggagggctgcagcccccacccagcagttgccccatgccctcctggctccttccctccaggatcttgcaaagaggcccccttagtaccctcaagccccttcttgggacagccccaggcaccccctgcccctgccaaagcaagccccccattggactctaagatggggcctggagacatctctcttcctgggaggccaaaacccggcccctgcagttccccagggtcagcctcccaggcgagctcttcccaagtgagctccctcagggtgggctcctcccaggtgggcacagagcctggcccctccctggatgcggagggctggacccaggaggctgaggatctgtccgactccacacccaccttgcagcggcctcaggaacaggcgaccatgcgcaagttctccctgggtggtcgcgggggctacgcaggcgtggctggctatggcacctttgcctttggtggagatgcagggggcatgctggggcaggggcccatgtgggccaggatagcctgggctgtgtcccagtcagaggaggaggagcaggaggaggccagggctgagtcccagtcggaggagcagcaggaggccagggctgagagcccactgccccaggtcagtgcaaggcctgtgcctgaggtcggcagggctcccaccaggagctctccagagcccaccccatgggaggacatcgggcaggtctccctggtgcagatccgggacctgtcaggtgatgcggaggcggccgacacaatatccctggacatttccgaggtggaccccgcctacctcaacctctcagacctgtacgatatcaagtacctcccattcgagtttatgatcttcaggaaagtccccaagtccgctcagccagagccgccctcccccatggctgaggaggagctggccgagttcccggagcccacgtggccctggccaggtgaactgggcccccacgcaggcctggagatcacagaggagtcagaggatgtggacgcgctgctggcagaggctgccgtgggcaggaagcgcaagtggtcctcgccgtcacgcagcctcttccacttccctgggaggcacctgccgctggatgagcctgcagagctggggctgcgtgagagagtgaaggcctccgtggagcacatctcccggatcctgaagggcaggccggaaggtctggagaaggaggggccccccaggaagaagccaggccttgcttccttccggctctcaggtctgaagagctgggaccgagcgccgacattcctaagggagctctcagatgagactgtggtcctgggccagtcagtgacactggcctgccaggtgtcagcccagccagctgcccaggccacctggagcaaagacggagcccccctggagagcagcagccgtgtcctcatctctgccaccctcaagaacttccagcttctgaccatcctggtggtggtggctgaggacctgggtgtgtacacctgcagcgtgagcaatgcgctggggacagtgaccaccacgggcgtcctccggaaggcagagcgcccctcatcttcgccatgcccggatatcggggaggtgtacgcggatggggtgctgctggtctggaagcccgtggaatcctacggccctgtgacctacattgtgcagtgcagcctagaaggcggcagctggaccacactggcctccgacatctttgactgctgctacctgaccagcaagctctcccggggtggcacctacaccttccgcacggcatgtgtcagcaaggcaggaatgggtccctacagcagcccctcggagcaagtcctcctgggagggcccagccacctggcctctgaggaggagagccaggggcggtcagcccaacccctgcccagcacaaagaccttcgcattccagacacagatccagaggggccgcttcagcgtggtgcggcaatgctgggagaaggccagcgggcgggcgctggccgccaagatcatcccctaccaccccaaggacaagacagcagtgctgcgcgaatacgaggccctcaagggcctgcgccacccgcacctggcccagctgcacgcagcctacctcagcccccggcacctggtgctcatcttggagctgtgctctgggcccgagctgctcccctgcctggccgagagggcctcctactcagaatccgaggtgaaggactacctgtggcagatgttgagtgccacccagtacctgcacaaccagcacatcctgcacctggacctgaggtccgagaacatgatcatcaccgaatacaacctgctcaaggtcgtggacctgggcaatgcacagagcctcagccaggagaaggtgctgccctcagacaagttcaaggactacctagagaccatggagctcctggagggccagggggctgttccacagacagacatctgggccatcggtgtgacagccttcatcatgctgagcgccgagtacccggtgagcagcgagggtgcacgcgacctgcagagaggactgcgcaaggggctggtccggctgagccgctgctacgcggggctgtccgggggcgccgtggccttcctgcgcagcactctgtgcgcccagccctggggccggccctgcgcgtccagctgcctgcagtgcccgtggctaacagaggagggcccggcctgttcgcggcccgcgcccgtgaccttccctaccgcgcggctgcgcgtcttcgtgcgcaatcgcgagaagagacgcgcgctgctgtacaagaggcacaacctggcccaggtgcgctgagggtcgccccggccacacccttggtctccccgctgggggtcgctgcagacgcgccaataaaaacgcacagccgggcgag

SEQ ID NO: 161738 - DNA, 4779 bp, Homo sapiens
  Payload ID: 11573
  Gene Symbol: OBSCN
  Gene Name: obscurin, cytoskeletal calmodulin and titin-interacting RhoGEF
  ENST ID: ENST00000483539
  CDS Start-End: 1-4779
cccgggcccgggtccgcgtgcacgatctgcacgtgggcatcaccaagaggctgaagacaatggaggtgctggaaggggaaagctgcagctttgagtgcgtcctgtcccacgagagtgccagcgacccggccatgtggacagtcggtgggaagacagtgggcagctccagccgcttccaggccacacgtcagggccgaaaatacatcctggtggtccgggaggctgcaccaagtgatgccggggaggtggtcttctctgtgcggggcctcacctccaaggcctcactcattgtcagagagaggccggccgccatcatcaagcccctggaagaccagtgggtggcgccaggggaggacgtggagctgcgctgtgagctgtcacgggcgggaacgcccgtgcactggctgaaggacaggaaggccatccgcaagagccagaagtatgatgtggtctgcgagggcacgatggccatgctggtcatccgcggggcctcgctcaaggacgcgggcgagtacacgtgtgaggtggaggcttccaagagcacagccagcctccatgtggaagaaaaagcaaactgcttcacagaggagctgaccaatctgcaggtggaggagaaaggcacagctgtgttcacgtgcaagacggagcaccccgcggccacagtgacctggcgcaagggcctcttggagctacgggcctcagggaagcaccagcccagccaggagggcctgaccctgcggctcaccatcagtgccctggagaaggcagacagcgacacctatacctgcgacattggccaggcccagtcccgggcccagctcctagtgcaaggccggagagtgcacatcatcgaggacctggaggatgtggatgtgcaggagggctcctcggccaccttccgttgccggatctccccggccaactacgagcctgtgcactggttcctggacaagacacccctgcatgccaacgagctcaatgagatcgatgcccagcccgggggctaccacgtgctgaccctgcggcagctggcgctcaaggactcgggcaccatctactttgaggcgggtgaccagcgggcctcggccgccctgcgggtcactgagaagccaagcgtcttctcccgggagctcacagatgccaccatcacagagggtgaggacttgaccctggtgtgcgagaccagcacctgcgacattcctgtgtgctggaccaaggatgggaagaccctgcgggggtctgcccggtgccagctgagccatgagggccaccgggcccagctgctcatcactggggccaccctgcaggacagtggacgctacaagtgtgaggctgggggcgcctgcagcagctccattgtcagggtgcatgcgcggccagtgcggttccaggaggccctgaaggacctggaggtgctggagggtggtgctgccacactgcgctgtgtgctgtcatctgtggctgcgcccgtgaagtggtgctatggaaacaacgtcctgaggccaggtgacaaatacagcctacgccaggagggtgccatgctggagctggtggtccggaacctccggccgcaggacagcgggcggtactcatgctccttcggggaccagactacttctgccaccctcacagtgactgccctgcctgcccagttcatcgggaaactgagaaacaaggaggccacagaaggggccacggccacgctgcggtgtgagctgagcaaggcagcccctgtggagtggagaaaggggtccgagaccctcagagatggggacagatactgtctgaggcaggacggggccatgtgtgagctgcagatccgtggcctggccatggtggatgccgcggagtactcgtgtgtgtgtggagaggagaggacctcagcctcactcaccatcaggcccatgcctgcccacttcataggaagactgagacaccaagagagcatagaaggggccacagccacgctgcggtgtgagctgagcaaggcggcccccgtggagtggaggaaggggcgtgagagcctcagagatggggacagacatagcctgaggcaggacggggctgtgtgcgagctgcagatctgtggcctggctgtggcagatgctggggagtactcctgtgtgtgtggggaggagaggacctctgccactctcaccgtgaaggccctgccagccaagttcacagagggtctgaggaatgaagaggccgtggaaggggccacagccatgttgtggtgtgaactgagcaaggtggcccctgtggagtggaggaaggggcccgagaacctcagagatggggacagatacatcctgaggcaggaggggaccaggtgtgagctgcagatctgtggcctggccatggcggacgccggggagtacttgtgtgtgtgcgggcaggagaggacctcagccacgctcaccatcagggctctgcctgccaggttcatagaagatgtgaaaaaccaggaggccagagaaggggccacagctgtgctgcagtgtgagctgaacagtgcagcccctgtggagtggagaaaggggtctgagacccttagagatggggacagatacagcctgaggcaggacgggactaaatgtgagctgcagattcgtggcctggccatggcagacactggggagtactcgtgcgtgtgcgggcaggagaggacctcggctatgctcaccgtcagggctctacccatcaagttcacagagggtctgaggaacgaagaggccacagaaggggcaacagccgtgctgcggtgtgagctgagcaagatggcccccgtggagtggtggaaggggcatgagaccctcagagatggagacagacacagcctgaggcaggacggggccaggtgtgagctgcagatccgcggcctcgtggcagaggacgctggggagtacctgtgcatgtgcgggaaggagaggacctcagccatgctcaccgtcagggccatgccttccaagttcatagagggtctgaggaatgaagaggccacagaaggggacacggccacgctgtggtgtgagctgagcaaggcggcaccggtggagtggaggaaggggcatgagaccctcagagatggggacagacacagcctgaggcaggacgggtccaggtgtgagctgcagatccgtggcctggctgtggtggatgccggggagtactcgtgtgtgtgcgggcaggagaggacctcagccacactcactgtcagggccctgcctgccagattcatagaagatgtgaaaaaccaggaggccagagaaggggccacggccgtgctgcaatgtgagctgagcaaggcggcccccgtggagtggaggaaggggtctgagaccctcagaggtggggacagatacagcctgaggcaggatgggaccagatgtgagctgcagattcatggcctgtctgtggcagacactggggagtactcgtgtgtgtgcgggcaggagaggacctcggccacactcaccgtcagggccctgcctgcacgattcactcaagatctgaagaccaaggaggcctcagaaggggccacagctacactgcagtgtgagctgagcaaggtggcccctgtggaatggaagaagggtcctgagaccctcagagatgggggcagatacagcctgaagcaggatgggacgaggtgtgagctgcagatccatgacctgtctgtggcggatgctggggaatactcatgcatgtgtggacaagagaggacctcggccacgctcactgtcagggccctgcctgccaggttcacagagggtctgaggaatgaagaggccatggaaggggccacagccacactgcaatgtgagctgagcaaggcagcccctgtggagtggaggaaaggccttgaggctctcagagatggggacaaatacagcctgagacaagacggggctgtgtgtgagctgcagattcatggcctggctatggcagataacggggtgtactcatgtgtgtgtgggcaggagaggacctcagctacactcactgtcagggccctgcctgccagattcatagaggatatgagaaaccagaaggccacagaaggggctacagtcacattgcaatgtaagctgagaaaggcggcccccgtggagtggagaaaggggcccaacaccctcaaagatggggacaggtacagcctgaagcaggatgggaccagttgtgagctgcagattcgtggcctggtcatagcagatgctggagaatactcgtgcatatgtgagcaggagaggacctcggccacgctcactgtcagggccctgccggccagattcatagaagatgtgagaaatcacgaggccacagaaggggccacagctgtgctgcagtgtgagctgagcaaggcggcccccgtggagtggcggaaggggtctgagaccctcagagatggggacagatatagcctgaggcaggacgggacgaggtgtgagctgcagattcgtggcctggctgtggaggacactggagagtatttgtgtgtgtgcgggcaggagagaacctcagctacactcactgtcagggccctgccagccagattcatagacaacatgacaaaccaggaggccagagaaggggccacggccacactgcactgtgaactgagcaaggtggcccctgtggagtggaggaagggacctgaaaccctccgagatggggacagacacagcctgaggcaggagaattgcttgaacccgggaggcagaggttgcagtgagccaagatcgtgccactgcactccagcctgggtaatagagcaag

SEQ ID NO: 161739 - DNA, 2274 bp, Homo sapiens
  Payload ID: 11574
  Gene Symbol: OBSL1
  Gene Name: obscurin-like 1
  ENST ID: ENST00000289656
  CDS Start-End: 299-2137
ccctgagcgccaggcttcgggcccgggaatcgccgccgccgccgccgcagagctgcagctcggggccgaggagccccgcctccggttcacacggcccctgcaggacgtggagggccgtgagcacgggattgccgtgctggaatgtaaagtacccaactcccgcatccccacggcctggttccgtgaggaccagcggctgctgccctgccgcaagtacgagcagatcgaagagggcactgtccggcgcctcatcatccacaggctgaaggcagacgatgatggtatctacctgtgcgagatgcggggccgggtgcgcaccgtggccaacgtcacagtcaaagggcccatcctgaagcgcctgccccggaagctcgacgtcctggaaggagagaatgctgtgctgctagtggaaactctagaggccggggtcgagggacgctggagccgtgatggggaggagctgccggtcatctgccagagcagctcaggccacatgcatgccctggtccttccaggggtcacccgagaggatgctggcgaggtcacctttagcctgggcaactcccgtaccactacgcttctcagagtaaaatgtgtcaagcacagtcccccaggaccccccatattggcagagatgttcaagggccacaagaacacggtcctgttgacctggaagcctcccgagccagctcccgagaccccattcatctaccggctggagcggcaggaagtgggctctgaagactggattcagtgcttcagcatcgagaaagccggagccgtggaggtgccgggcgactgtgtgccctccgagggtgactaccgcttccgcatctgcacagtcagcggacatggccgtagtccccacgtggtgttccacggttctgctcaccttgtgcccacagctcgcctggtggcaggtctggaggatgtgcaggtatacgacggggaagatgccgtcttctccctcgatctctccaccatcatccagggtacctggttccttaatggggaagagctcaagagtaacgagccggagggccaggtggaacctggggccctgcggtaccgtatagagcagaagggtctgcagcacagactcatcctgcatgccgtcaagcaccaggacagcggtgccctggtcggcttcagctgccccggcgtgcaggactcagctgccctcacaatccaagagagcccggtgcacatcctgagcccccaggacagggtgtcgttgaccttcacaacctcagagcgggtggtgctgacttgtgagctctcaagggtggacttcccggcaacctggtacaaggatgggcagaaggtggaggagagcgagttgctggtggtgaagatggatgggcgcaaacaccgtctgatcctgcctgaggccaaagtccaggacagtggcgagtttgagtgcaggacagaaggggtctcggccttcttcggcgtcactgtccaagatcctcccgtgcacatcgtggacccccgagaacatgtgttcgtgcatgccataacttccgagtgtgtcatgctggcctgtgaggtggaccgagaggacgcccctgtgcgttggtacaaggacgggcaggaggtggaggagagtgacttcgtggtgctggagaatgaggggccccatcgccgcctggtgctgcccgccacccagccctcagacgggggcgagtttcagtgcgtcgctggagatgagtgtgcctacttcactgtcaccatcacagacgtctcctcgtggatcgtgtatcccagcggcaaggtgtatgtggcagccgtgcgcctggagcgtgtggtgctgacctgtgagctatgccggccctgggcagaggtgcgctggaccaaggatggagaggaggtggtggagagccccgcgctgctcctgcagaaggaagacactgtccgccgcctggtgctgcccgctgtccagctcgaggactccggcgagtacttgtgtgaaattgacgatgagtcggcctccttcactgtcaccgtcacagagtcttaccaaagtcaggacagttcaaataacaatccggagttatgcgtcctcttgaaaaagccgaagacccggcggctctggtcccgcttccccccatggcgacgaacagctggcactgagtagcagctgcccccatagtttggggcccacattcctctgtcccacctccctgccattgctttttgcctctccccagactgcttcagccgctaacctaacctggcccctgtgggcatttgagtttgcgacccctgtgttaa

SEQ ID NO: 161740 - DNA, 3297 bp, Homo sapiens
  Payload ID: 11574
  Gene Symbol: OBSL1
  Gene Name: obscurin-like 1
  Uniprot ID: O75147
  ENST ID: ENST00000373873
  CDS Start-End: 58-3135
ctccgcacccccccctgcccccccaccgttcgccgctgcaggcggtcggccgccgcgatgaaggcgagctcgggggatcaggggagccccccgtgcttcctgcgcttcccgcggcctgtgcgggtggtaagtggcgccgaggccgagctcaagtgcgtggtcctgggggagccgccgcctgtagtggtgtgggagaagggcgggcagcagctggcggcctcggaacgcctgagcttcccggcggacggcgcggagcacggcctgctgctgaccgccgcactgcccaccgacgcgggggtctacgtgtgccgcgcccgcaacgcggccggcgaggcctacgcggcggccgccgtcaccgtgctggagccgccggcctccgaccccgagctgcagcccgccgagcgcccgctgccatcgccggggtccggggagggcgccccggtcttcctcacggggcctcgatcccagtgggtgctgcggggggcggaggtggtgctgacgtgccgggcggggggcctccccgagcccacactgtactgggagaaggacgggatggccctggacgaagtgtgggacagcagccacttcgcgctccagccgggccgcgccgaggacggccccggcgcgagcctggcactgcgcatcctggcggctcggctgccggattccggcgtctacgtgtgccacgcccgcaacgcgcacggccacgcgcaggcgggggcgctgctccaggtgcaccagccccccgagagcccgcccgcggaccccgacgaggcccccgcgccggtggtggagccgctcaagtgcgcgcctaagaccttctgggtgaacgagggcaagcacgccaagttccgctgctacgtgatgggcaagcccgagcccgagatcgaatggcactgggagggccgcccgctgctcccggaccgccgccgcctcatgtaccgcgaccgcgacggcggcttcgtgctcaaggtgctttactgccaggccaaggatcgtgggctctacgtctgcgccgcgcgcaactcggcgggccagacgctcagtgccgtgcagctgcacgtgaaagagccccgcctccggttcacacggcccctgcaggacgtggagggccgtgagcacgggattgccgtgctggaatgtaaagtacccaactcccgcatccccacggcctggttccgtgaggaccagcggctgctgccctgccgcaagtacgagcagatcgaagagggcactgtccggcgcctcatcatccacaggctgaaggcagacgatgatggtatctacctgtgcgagatgcggggccgggtgcgcaccgtggccaacgtcacagtcaaagggcccatcctgaagcgcctgccccggaagctcgacgtcctggaaggagagaatgctgtgctgctagtggaaactctagaggccggggtcgagggacgctggagccgtgatggggaggagctgccggtcatctgccagagcagctcaggccacatgcatgccctggtccttccaggggtcacccgagaggatgctggcgaggtcacctttagcctgggcaactcccgtaccactacgcttctcagagtaaaatgtgtcaagcacagtcccccaggaccccccatattggcagagatgttcaagggccacaagaacacggtcctgttgacctggaagcctcccgagccagctcccgagaccccattcatctaccggctggagcggcaggaagtgggctctgaagactggattcagtgcttcagcatcgagaaagccggagccgtggaggtgccgggcgactgtgtgccctccgagggtgactaccgcttccgcatctgcacagtcagcggacatggccgtagtccccacgtggtgttccacggttctgctcaccttgtgcccacagctcgcctggtggcaggtctggaggatgtgcaggtatacgacggggaagatgccgtcttctccctcgatctctccaccatcatccagggtacctggttccttaatggggaagagctcaagagtaacgagccggagggccaggtggaacctggggccctgcggtaccgtatagagcagaagggtctgcagcacagactcatcctgcatgccgtcaagcaccaggacagcggtgccctggtcggcttcagctgccccggcgtgcaggactcagctgccctcacaatccaagagagcccggtgcacatcctgagcccccaggacagggtgtcgttgaccttcacaacctcagagcgggtggtgctgacttgtgagctctcaagggtggacttcccggcaacctggtacaaggatgggcagaaggtggaggagagcgagttgctggtggtgaagatggatgggcgcaaacaccgtctgatcctgcctgaggccaaagtccaggacagtggcgagtttgagtgcaggacagaaggggtctcggccttcttcggcgtcactgtccaagatcctcccgtgcacatcgtggacccccgagaacatgtgttcgtgcatgccataacttccgagtgtgtcatgctggcctgtgaggtggaccgagaggacgcccctgtgcgttggtacaaggacgggcaggaggtggaggagagtgacttcgtggtgctggagaatgaggggccccatcgccgcctggtgctgcccgccacccagccctcagacgggggcgagtttcagtgcgtcgctggagatgagtgtgcctacttcactgtcaccatcacagacgtctcctcgtggatcgtgtatcccagcggcaaggtgtatgtggcagccgtgcgcctggagcgtgtggtgctgacctgtgagctatgccggccctgggcagaggtgcgctggaccaaggatggagaggaggtggtggagagccccgcgctgctcctgcagaaggaagacactgtccgccgcctggtgctgcccgctgtccagctcgaggactccggcgagtacttgtgtgaaattgacgatgagtcggcctccttcactgtcaccgtcacagagtcttaccaaagtcaggacagttcaaataacaatccggagttatgcgtcctcttgaaaaagccgaagacccggcggctctggtcccgcttccccccatggcgacgaacagctggcactgagtagcagctgcccccatagtttggggcccacattcctctgtcccacctccctgccattgctttttgcctctccccagactgcttcagccgctaacctaacctggcccctgtgggcatttgagtttgcgacccctgtgttaaaccaataaacatgcaaataaatgta

SEQ ID NO: 161741 - DNA, 5503 bp, Homo sapiens
  Payload ID: 11574
  Gene Symbol: OBSL1
  Gene Name: obscurin-like 1
  ENST ID: ENST00000373876
  CDS Start-End: 10-5424
gccgccgcgatgaaggcgagctcgggggatcaggggagccccccgtgcttcctgcgcttcccgcggcctgtgcgggtggtaagtggcgccgaggccgagctcaagtgcgtggtcctgggggagccgccgcctgtagtggtgtgggagaagggcgggcagcagctggcggcctcggaacgcctgagcttcccggcggacggcgcggagcacggcctgctgctgaccgccgcactgcccaccgacgcgggggtctacgtgtgccgcgcccgcaacgcggccggcgaggcctacgcggcggccgccgtcaccgtgctggagccgccggcctccgaccccgagctgcagcccgccgagcgcccgctgccatcgccggggtccggggagggcgccccggtcttcctcacggggcctcgatcccagtgggtgctgcggggggcggaggtggtgctgacgtgccgggcggggggcctccccgagcccacactgtactgggagaaggacgggatggccctggacgaagtgtgggacagcagccacttcgcgctccagccgggccgcgccgaggacggccccggcgcgagcctggcactgcgcatcctggcggctcggctgccggattccggcgtctacgtgtgccacgcccgcaacgcgcacggccacgcgcaggcgggggcgctgctccaggtgcaccagccccccgagagcccgcccgcggaccccgacgaggcccccgcgccggtggtggagccgctcaagtgcgcgcctaagaccttctgggtgaacgagggcaagcacgccaagttccgctgctacgtgatgggcaagcccgagcccgagatcgaatggcactgggagggccgcccgctgctcccggaccgccgccgcctcatgtaccgcgaccgcgacggcggcttcgtgctcaaggtgctttactgccaggccaaggatcgtgggctctacgtctgcgccgcgcgcaactcggcgggccagacgctcagtgccgtgcagctgcacgtgaaagagccccgcctccggttcacacggcccctgcaggacgtggagggccgtgagcacgggattgccgtgctggaatgtaaagtacccaactcccgcatccccacggcctggttccgtgaggaccagcggctgctgccctgccgcaagtacgagcagatcgaagagggcactgtccggcgcctcatcatccacaggctgaaggcagacgatgatggtatctacctgtgcgagatgcggggccgggtgcgcaccgtggccaacgtcacagtcaaagggcccatcctgaagcgcctgccccggaagctcgacgtcctggaaggagagaatgctgtgctgctagtggaaactctagaggccggggtcgagggacgctggagccgtgatggggaggagctgccggtcatctgccagagcagctcaggccacatgcatgccctggtccttccaggggtcacccgagaggatgctggcgaggtcacctttagcctgggcaactcccgtaccactacgcttctcagagtaaaatgtgtcaagcacagtcccccaggaccccccatattggcagagatgttcaagggccacaagaacacggtcctgttgacctggaagcctcccgagccagctcccgagaccccattcatctaccggctggagcggcaggaagtgggctctgaagactggattcagtgcttcagcatcgagaaagccggagccgtggaggtgccgggcgactgtgtgccctccgagggtgactaccgcttccgcatctgcacagtcagcggacatggccgtagtccccacgtggtgttccacggttctgctcaccttgtgcccacagctcgcctggtggcaggtctggaggatgtgcaggtatacgacggggaagatgccgtcttctccctcgatctctccaccatcatccagggtacctggttccttaatggggaagagctcaagagtaacgagccggagggccaggtggaacctggggccctgcggtaccgtatagagcagaagggtctgcagcacagactcatcctgcatgccgtcaagcaccaggacagcggtgccctggtcggcttcagctgccccggcgtgcaggactcagctgccctcacaatccaagagagcccggtgcacatcctgagcccccaggacagggtgtcgttgaccttcacaacctcagagcgggtggtgctgacttgtgagctctcaagggtggacttcccggcaacctggtacaaggatgggcagaaggtggaggagagcgagttgctggtggtgaagatggatgggcgcaaacaccgtctgatcctgcctgaggccaaagtccaggacagtggcgagtttgagtgcaggacagaaggggtctcggccttcttcggcgtcactgtccaagatcctcccgtgcacatcgtggacccccgagaacatgtgttcgtgcatgccataacttccgagtgtgtcatgctggcctgtgaggtggaccgagaggacgcccctgtgcgttggtacaaggacgggcaggaggtggaggagagtgacttcgtggtgctggagaatgaggggccccatcgccgcctggtgctgcccgccacccagccctcagacgggggcgagtttcagtgcgtcgctggagatgagtgtgcctacttcactgtcaccatcacagacgtctcctcgtggatcgtgtatcccagcggcaaggtgtatgtggcagccgtgcgcctggagcgtgtggtgctgacctgtgagctatgccggccctgggcagaggtgcgctggaccaaggatggagaggaggtggtggagagccccgcgctgctcctgcagaaggaagacactgtccgccgcctggtgctgcccgctgtccagctcgaggactccggcgagtacttgtgtgaaattgacgatgagtcggcctccttcactgtcaccgtcacagaacccccagtgcggatcatataccctcgcgatgaggtgaccttgatcgccgtgaccttggagtgtgtggtgctgatgtgtgaactgtctcgggaggatgcccctgtgcgctggtacaaggatgggctggaagtggaggagagcgaggccctggtgctggagagggatgggccacgctgccgcctggtgctacctgctgctcagcccgaggacgggggcgagtttgtatgtgatgctggagatgactcggccttcttcactgtcactgtcacagccccaccagagaggattgtgcacccggcagcccgctccctggatctgcattttggggctccagggcgcgtggagctgcgctgtgaggtggccccagctgggtctcaggtgcgctggtacaaggacgggctggaagtggaggcatcagatgccctgcagctgggtgccgaggggcccacccgcaccctgaccctgccccacgcccagcctgaggacgccggggagtatgtgtgtgagacccggcatgaggccatcaccttcaatgtcatcctggctgagcctccagtgcagttccttgctctagagacaactccaagcccgctctgtgtggcccctggggagccagtggtgctgagctgtgaactgtcccgggctggcgcccccgtggtctggagccacaatgggaggcccgtgcaggagggcgagggcctagagctccatgccgagggcccccgccgagtcctctgcatccaggctgcaggcccagcccatgcagggctctacacctgccagtctggagcagcccccggagccccaagcctcagcttcaccgtccaggtggctgagccactgctggtgaagctggtctcggagctgacaccactcactgtccacgagggcgatgatgccacgttccggtgtgaagtctccccaccagatgccgatgtcacctggctgcgcaatggggccgtcgtcactccagggccccaggtggagatggcccagaatggttcaagccgcatcttaaccttgcgaggctgccaactgggggatgcagggaccgtgactttgcgggcagggagcacggccacaagtgcccggctccatgttcgagagacagagctgctgttcctacggcggttgcaggatgtgcgggcagaggaaggccaggatgtgtgtctcgaagtggagacaggccgagtgggtgcagcgggggccgtgcgctgggtgcgaggtgggcagcccctgccccacgactctcgcctgtccatggcccaggatgggcacatccaccgcctcttcatccatggtgtcatactggccgaccagggcacctacggctgcgagagccaccacgatcgcaccctggccaggctcagcgtgaggccgaggcagctgagggtgctgcggcctctggaggacgtgaccatcagtgaggggggcagtgccaccttccagctggagctgtcccaggaaggtgtgaccggggagtgggcccggggtggagtacagctgtatccaggacccaagtgtcacatccactcggacggccaccgtcaccgactggtactcaatggcctgggcctggccgactcaggctgtgtctccttcacagcggattccctgcgctgcgcagccagactcattgtgagagaggtcccagtgaccatcgtgcgggggccacacgacctagaggtgaccgagggcgacacagctacgttcgagtgcgagctttcccaagctttggctgatgttacctgggagaaggacgggaacgcgcttacgcctagcccgcggctccggctccaggccctcggcacgcgccgccttctccagctgcgacgctgcggcccctcggacgccgggacctacagctgcgcggtggggacggcccgcgccggaccggtccgcctgaccgtgcgcgagcgtactgtggcggtactctccgagctgcggtcggtgagcgcccgcgaaggcgacggcgctacgttcgagtgcaccgtgtcggaggtcgagaccacggggcgctgggagctcggaggccgcccgctgagacccggagcccgcgtccgcatccgacaggaagggaagaaacacattctggtgcttagcgagctgcgcgccgaggacgccggtgaagtccgcttccaggcggggcccgcccagtccctggctctactggaagtggaggcattgcctctccagatgtgccgccacccccctcgcgagaagaccgttctggtgggccgccgggcggtgctggaggtgactgtgtcccgctcggggggccacgtgtgctggctgcgggagggggccgagctgtgcccgggagataagtatgagatgcgcagccacggccccacccacagcctggtcatccatgacgttcgacctgaggaccaaggcacttactgctgccaggccggccaggacagcacccacacacggctgctggtagagggcaactaggagaacctaaccaggccaggcgggtgcccttggacagcttggaaggcgtttgcccttaccctgggcaggggtagagaga

SEQ ID NO: 161742 - DNA, 5841 bp, Homo sapiens
  Payload ID: 11574
  Gene Symbol: OBSL1
  Gene Name: obscurin-like 1
  Uniprot ID: O75147
  ENST ID: ENST00000404537
  CDS Start-End: 58-5748
ctccgcacccccccctgcccccccaccgttcgccgctgcaggcggtcggccgccgcgatgaaggcgagctcgggggatcaggggagccccccgtgcttcctgcgcttcccgcggcctgtgcgggtggtaagtggcgccgaggccgagctcaagtgcgtggtcctgggggagccgccgcctgtagtggtgtgggagaagggcgggcagcagctggcggcctcggaacgcctgagcttcccggcggacggcgcggagcacggcctgctgctgaccgccgcactgcccaccgacgcgggggtctacgtgtgccgcgcccgcaacgcggccggcgaggcctacgcggcggccgccgtcaccgtgctggagccgccggcctccgaccccgagctgcagcccgccgagcgcccgctgccatcgccggggtccggggagggcgccccggtcttcctcacggggcctcgatcccagtgggtgctgcggggggcggaggtggtgctgacgtgccgggcggggggcctccccgagcccacactgtactgggagaaggacgggatggccctggacgaagtgtgggacagcagccacttcgcgctccagccgggccgcgccgaggacggccccggcgcgagcctggcactgcgcatcctggcggctcggctgccggattccggcgtctacgtgtgccacgcccgcaacgcgcacggccacgcgcaggcgggggcgctgctccaggtgcaccagccccccgagagcccgcccgcggaccccgacgaggcccccgcgccggtggtggagccgctcaagtgcgcgcctaagaccttctgggtgaacgagggcaagcacgccaagttccgctgctacgtgatgggcaagcccgagcccgagatcgaatggcactgggagggccgcccgctgctcccggaccgccgccgcctcatgtaccgcgaccgcgacggcggcttcgtgctcaaggtgctttactgccaggccaaggatcgtgggctctacgtctgcgccgcgcgcaactcggcgggccagacgctcagtgccgtgcagctgcacgtgaaagagccccgcctccggttcacacggcccctgcaggacgtggagggccgtgagcacgggattgccgtgctggaatgtaaagtacccaactcccgcatccccacggcctggttccgtgaggaccagcggctgctgccctgccgcaagtacgagcagatcgaagagggcactgtccggcgcctcatcatccacaggctgaaggcagacgatgatggtatctacctgtgcgagatgcggggccgggtgcgcaccgtggccaacgtcacagtcaaagggcccatcctgaagcgcctgccccggaagctcgacgtcctggaaggagagaatgctgtgctgctagtggaaactctagaggccggggtcgagggacgctggagccgtgatggggaggagctgccggtcatctgccagagcagctcaggccacatgcatgccctggtccttccaggggtcacccgagaggatgctggcgaggtcacctttagcctgggcaactcccgtaccactacgcttctcagagtaaaatgtgtcaagcacagtcccccaggaccccccatattggcagagatgttcaagggccacaagaacacggtcctgttgacctggaagcctcccgagccagctcccgagaccccattcatctaccggctggagcggcaggaagtgggctctgaagactggattcagtgcttcagcatcgagaaagccggagccgtggaggtgccgggcgactgtgtgccctccgagggtgactaccgcttccgcatctgcacagtcagcggacatggccgtagtccccacgtggtgttccacggttctgctcaccttgtgcccacagctcgcctggtggcaggtctggaggatgtgcaggtatacgacggggaagatgccgtcttctccctcgatctctccaccatcatccagggtacctggttccttaatggggaagagctcaagagtaacgagccggagggccaggtggaacctggggccctgcggtaccgtatagagcagaagggtctgcagcacagactcatcctgcatgccgtcaagcaccaggacagcggtgccctggtcggcttcagctgccccggcgtgcaggactcagctgccctcacaatccaagagagcccggtgcacatcctgagcccccaggacagggtgtcgttgaccttcacaacctcagagcgggtggtgctgacttgtgagctctcaagggtggacttcccggcaacctggtacaaggatgggcagaaggtggaggagagcgagttgctggtggtgaagatggatgggcgcaaacaccgtctgatcctgcctgaggccaaagtccaggacagtggcgagtttgagtgcaggacagaaggggtctcggccttcttcggcgtcactgtccaagatcctcccgtgcacatcgtggacccccgagaacatgtgttcgtgcatgccataacttccgagtgtgtcatgctggcctgtgaggtggaccgagaggacgcccctgtgcgttggtacaaggacgggcaggaggtggaggagagtgacttcgtggtgctggagaatgaggggccccatcgccgcctggtgctgcccgccacccagccctcagacgggggcgagtttcagtgcgtcgctggagatgagtgtgcctacttcactgtcaccatcacagacgtctcctcgtggatcgtgtatcccagcggcaaggtgtatgtggcagccgtgcgcctggagcgtgtggtgctgacctgtgagctatgccggccctgggcagaggtgcgctggaccaaggatggagaggaggtggtggagagccccgcgctgctcctgcagaaggaagacactgtccgccgcctggtgctgcccgctgtccagctcgaggactccggcgagtacttgtgtgaaattgacgatgagtcggcctccttcactgtcaccgtcacagaacccccagtgcggatcatataccctcgcgatgaggtgaccttgatcgccgtgaccttggagtgtgtggtgctgatgtgtgaactgtctcgggaggatgcccctgtgcgctggtacaaggatgggctggaagtggaggagagcgaggccctggtgctggagagggatgggccacgctgccgcctggtgctacctgctgctcagcccgaggacgggggcgagtttgtatgtgatgctggagatgactcggccttcttcactgtcactgtcacagccccaccagagaggattgtgcacccggcagcccgctccctggatctgcattttggggctccagggcgcgtggagctgcgctgtgaggtggccccagctgggtctcaggtgcgctggtacaaggacgggctggaagtggaggcatcagatgccctgcagctgggtgccgaggggcccacccgcaccctgaccctgccccacgcccagcctgaggacgccggggagtatgtgtgtgagacccggcatgaggccatcaccttcaatgtcatcctggctgagcctccagtgcagttccttgctctagagacaactccaagcccgctctgtgtggcccctggggagccagtggtgctgagctgtgaactgtcccgggctggcgcccccgtggtctggagccacaatgggaggcccgtgcaggagggcgagggcctagagctccatgccgagggcccccgccgagtcctctgcatccaggctgcaggcccagcccatgcagggctctacacctgccagtctggagcagcccccggagccccaagcctcagcttcaccgtccaggtggctgagccccctgtgcgggtggtagctcccgaggcagcccagacgagggttcggagcaccccaggcggggacctagagctggtggtgcacctctccgggccagggggccctgtacgctggtacaaggacggggagcgactggcaagccaggggcgggtgcagctggagcaggccggggccaggcaggtgctgcgggtgcagggggcacggagcggggacgctggggagtacctgtgcgatgcgccccaggacagccgcatcttccttgtcagcgtggaagagccactgctggtgaagctggtctcggagctgacaccactcactgtccacgagggcgatgatgccacgttccggtgtgaagtctccccaccagatgccgatgtcacctggctgcgcaatggggccgtcgtcactccagggccccaggtggagatggcccagaatggttcaagccgcatcttaaccttgcgaggctgccaactgggggatgcagggaccgtgactttgcgggcagggagcacggccacaagtgcccggctccatgttcgagagacagagctgctgttcctacggcggttgcaggatgtgcgggcagaggaaggccaggatgtgtgtctcgaagtggagacaggccgagtgggtgcagcgggggccgtgcgctgggtgcgaggtgggcagcccctgccccacgactctcgcctgtccatggcccaggatgggcacatccaccgcctcttcatccatggtgtcatactggccgaccagggcacctacggctgcgagagccaccacgatcgcaccctggccaggctcagcgtgaggccgaggcagctgagggtgctgcggcctctggaggacgtgaccatcagtgaggggggcagtgccaccttccagctggagctgtcccaggaaggtgtgaccggggagtgggcccggggtggagtacagctgtatccaggacccaagtgtcacatccactcggacggccaccgtcaccgactggtactcaatggcctgggcctggccgactcaggctgtgtctccttcacagcggattccctgcgctgcgcagccagactcattgtgagagaggtcccagtgaccatcgtgcgggggccacacgacctagaggtgaccgagggcgacacagctacgttcgagtgcgagctttcccaagctttggctgatgttacctgggagaaggacgggaacgcgcttacgcctagcccgcggctccggctccaggccctcggcacgcgccgccttctccagctgcgacgctgcggcccctcggacgccgggacctacagctgcgcggtggggacggcccgcgccggaccggtccgcctgaccgtgcgcgagcgtactgtggcggtactctccgagctgcggtcggtgagcgcccgcgaaggcgacggcgctacgttcgagtgcaccgtgtcggaggtcgagaccacggggcgctgggagctcggaggccgcccgctgagacccggagcccgcgtccgcatccgacaggaagggaagaaacacattctggtgcttagcgagctgcgcgccgaggacgccggtgaagtccgcttccaggcggggcccgcccagtccctggctctactggaagtggaggcattgcctctccagatgtgccgccacccccctcgcgagaagaccgttctggtgggccgccgggcggtgctggaggtgactgtgtcccgctcggggggccacgtgtgctggctgcgggagggggccgagctgtgcccgggagataagtatgagatgcgcagccacggccccacccacagcctggtcatccatgacgttcgacctgaggaccaaggcacttactgctgccaggccggccaggacagcacccacacacggctgctggtagagggcaactaggagaacctaaccaggccaggcgggtgcccttggacagcttggaaggcgtttgcccttaccctgggcaggggtagagagacaaggaacaataaa

SEQ ID NO: 161743 - DNA, 1571 bp, Homo sapiens
  Payload ID: 11574
  Gene Symbol: OBSL1
  Gene Name: obscurin-like 1
  ENST ID: ENST00000456147
  CDS Start-End: 1-1337
tggtgctgatgtgtgaactgtctcgggaggatgcccctgtgcgctggtacaaggatgggctggaagtggaggagagcgaggccctggtgctggagagggatgggccacgctgccgcctggtgctacctgctgctcagcccgaggacgggggcgagtttgtatgtgatgctggagatgactcggccttcttcactgtcactgtcacagccccaccagagaggattgtgcacccggcagcccgctccctggatctgcattttggggctccagggcgcgtggagctgcgctgtgaggtggccccagctgggtctcaggtgcgctggtacaaggacgggctggaagtggaggcatcagatgccctgcagctgggtgccgaggggcccacccgcaccctgaccctgccccacgcccagcctgaggacgccggggagtatgtgtgtgagacccggcatgaggccatcaccttcaatgtcatcctggctgagcctccagtgcagttccttgctctagagacaactccaagcccgctctgtgtggcccctggggagccagtggtgctgagctgtgaactgtcccgggctggcgcccccgtggtctggagccacaatgggaggcccgtgcaggagggcgagggcctagagctccatgccgagggcccccgccgagtcctctgcatccaggctgcaggcccagcccatgcagggctctacacctgccagtctggagcagcccccggagccccaagcctcagcttcaccgtccaggtggctgagccactgctggtgaagctggtctcggagctgacaccactcactgtccacgagggcgatgatgccacgttccggtgtgaagtctccccaccagatgccgatgtcacctggctgcgcaatggggccgtcgtcactccagggccccaggtggagatggcccagaatggttcaagccgcatcttaaccttgcgaggctgccaactgggggatgcagggaccgtgactttgcgggcagggagcacggccacaagtgcccggctccatgttcgagagacagagctgctgttcctacggcggttgcaggatgtgcgggcagaggaaggccaggatgtgtgtctcgaagtggagacaggccgagtgggtgcagcgggggccgtgcgctgggtgcgaggtgggcagcccctgccccacgactctcgcctgtccatggcccaggatgggcacatccaccgcctcttcatccatggtgtcatactggccgaccagggcacctacggctgcgagagccaccacgatcgcaccctggccaggctcagcgtgaggcgtgagtgccccgtcctctcttaatgcattacccaccctacaccacagccttttctggctgtcctggagtccctcaggcccccaccaaagtgcccctcatcgctgagaaaagtcacccatggccgtcccagcagcagcttgcccaaagcaaaacttttctttttctaatattttttatttaccttagaagtccatgtggattttgcattccattgcatatttccaagtcggctttgctataaacacaaatattctcca

SEQ ID NO: 161744 - DNA, 5520 bp, Homo sapiens
  Payload ID: 11574
  Gene Symbol: OBSL1
  Gene Name: obscurin-like 1
  Uniprot ID: O75147
  ENST ID: ENST00000603926
  CDS Start-End: 58-4689
ctccgcacccccccctgcccccccaccgttcgccgctgcaggcggtcggccgccgcgatgaaggcgagctcgggggatcaggggagccccccgtgcttcctgcgcttcccgcggcctgtgcgggtggtaagtggcgccgaggccgagctcaagtgcgtggtcctgggggagccgccgcctgtagtggtgtgggagaagggcgggcagcagctggcggcctcggaacgcctgagcttcccggcggacggcgcggagcacggcctgctgctgaccgccgcactgcccaccgacgcgggggtctacgtgtgccgcgcccgcaacgcggccggcgaggcctacgcggcggccgccgtcaccgtgctggagccgccggcctccgaccccgagctgcagcccgccgagcgcccgctgccatcgccggggtccggggagggcgccccggtcttcctcacggggcctcgatcccagtgggtgctgcggggggcggaggtggtgctgacgtgccgggcggggggcctccccgagcccacactgtactgggagaaggacgggatggccctggacgaagtgtgggacagcagccacttcgcgctccagccgggccgcgccgaggacggccccggcgcgagcctggcactgcgcatcctggcggctcggctgccggattccggcgtctacgtgtgccacgcccgcaacgcgcacggccacgcgcaggcgggggcgctgctccaggtgcaccagccccccgagagcccgcccgcggaccccgacgaggcccccgcgccggtggtggagccgctcaagtgcgcgcctaagaccttctgggtgaacgagggcaagcacgccaagttccgctgctacgtgatgggcaagcccgagcccgagatcgaatggcactgggagggccgcccgctgctcccggaccgccgccgcctcatgtaccgcgaccgcgacggcggcttcgtgctcaaggtgctttactgccaggccaaggatcgtgggctctacgtctgcgccgcgcgcaactcggcgggccagacgctcagtgccgtgcagctgcacgtgaaagagccccgcctccggttcacacggcccctgcaggacgtggagggccgtgagcacgggattgccgtgctggaatgtaaagtacccaactcccgcatccccacggcctggttccgtgaggaccagcggctgctgccctgccgcaagtacgagcagatcgaagagggcactgtccggcgcctcatcatccacaggctgaaggcagacgatgatggtatctacctgtgcgagatgcggggccgggtgcgcaccgtggccaacgtcacagtcaaagggcccatcctgaagcgcctgccccggaagctcgacgtcctggaaggagagaatgctgtgctgctagtggaaactctagaggccggggtcgagggacgctggagccgtgatggggaggagctgccggtcatctgccagagcagctcaggccacatgcatgccctggtccttccaggggtcacccgagaggatgctggcgaggtcacctttagcctgggcaactcccgtaccactacgcttctcagagtaaaatgtgtcaagcacagtcccccaggaccccccatattggcagagatgttcaagggccacaagaacacggtcctgttgacctggaagcctcccgagccagctcccgagaccccattcatctaccggctggagcggcaggaagtgggctctgaagactggattcagtgcttcagcatcgagaaagccggagccgtggaggtgccgggcgactgtgtgccctccgagggtgactaccgcttccgcatctgcacagtcagcggacatggccgtagtccccacgtggtgttccacggttctgctcaccttgtgcccacagctcgcctggtggcaggtctggaggatgtgcaggtatacgacggggaagatgccgtcttctccctcgatctctccaccatcatccagggtacctggttccttaatggggaagagctcaagagtaacgagccggagggccaggtggaacctggggccctgcggtaccgtatagagcagaagggtctgcagcacagactcatcctgcatgccgtcaagcaccaggacagcggtgccctggtcggcttcagctgccccggcgtgcaggactcagctgccctcacaatccaagagagcccggtgcacatcctgagcccccaggacagggtgtcgttgaccttcacaacctcagagcgggtggtgctgacttgtgagctctcaagggtggacttcccggcaacctggtacaaggatgggcagaaggtggaggagagcgagttgctggtggtgaagatggatgggcgcaaacaccgtctgatcctgcctgaggccaaagtccaggacagtggcgagtttgagtgcaggacagaaggggtctcggccttcttcggcgtcactgtccaagatcctcccgtgcacatcgtggacccccgagaacatgtgttcgtgcatgccataacttccgagtgtgtcatgctggcctgtgaggtggaccgagaggacgcccctgtgcgttggtacaaggacgggcaggaggtggaggagagtgacttcgtggtgctggagaatgaggggccccatcgccgcctggtgctgcccgccacccagccctcagacgggggcgagtttcagtgcgtcgctggagatgagtgtgcctacttcactgtcaccatcacagacgtctcctcgtggatcgtgtatcccagcggcaaggtgtatgtggcagccgtgcgcctggagcgtgtggtgctgacctgtgagctatgccggccctgggcagaggtgcgctggaccaaggatggagaggaggtggtggagagccccgcgctgctcctgcagaaggaagacactgtccgccgcctggtgctgcccgctgtccagctcgaggactccggcgagtacttgtgtgaaattgacgatgagtcggcctccttcactgtcaccgtcacagaacccccagtgcggatcatataccctcgcgatgaggtgaccttgatcgccgtgaccttggagtgtgtggtgctgatgtgtgaactgtctcgggaggatgcccctgtgcgctggtacaaggatgggctggaagtggaggagagcgaggccctggtgctggagagggatgggccacgctgccgcctggtgctacctgctgctcagcccgaggacgggggcgagtttgtatgtgatgctggagatgactcggccttcttcactgtcactgtcacagccccaccagagaggattgtgcacccggcagcccgctccctggatctgcattttggggctccagggcgcgtggagctgcgctgtgaggtggccccagctgggtctcaggtgcgctggtacaaggacgggctggaagtggaggcatcagatgccctgcagctgggtgccgaggggcccacccgcaccctgaccctgccccacgcccagcctgaggacgccggggagtatgtgtgtgagacccggcatgaggccatcaccttcaatgtcatcctggctgagcctccagtgcagttccttgctctagagacaactccaagcccgctctgtgtggcccctggggagccagtggtgctgagctgtgaactgtcccgggctggcgcccccgtggtctggagccacaatgggaggcccgtgcaggagggcgagggcctagagctccatgccgagggcccccgccgagtcctctgcatccaggctgcaggcccagcccatgcagggctctacacctgccagtctggagcagcccccggagccccaagcctcagcttcaccgtccaggtggctgagccccctgtgcgggtggtagctcccgaggcagcccagacgagggttcggagcaccccaggcggggacctagagctggtggtgcacctctccgggccagggggccctgtacgctggtacaaggacggggagcgactggcaagccaggggcgggtgcagctggagcaggccggggccaggcaggtgctgcgggtgcagggggcacggagcggggacgctggggagtacctgtgcgatgcgccccaggacagccgcatcttccttgtcagcgtggaagagccactgctggtgaagctggtctcggagctgacaccactcactgtccacgagggcgatgatgccacgttccggtgtgaagtctccccaccagatgccgatgtcacctggctgcgcaatggggccgtcgtcactccagggccccaggtggagatggcccagaatggttcaagccgcatcttaaccttgcgaggctgccaactgggggatgcagggaccgtgactttgcgggcagggagcacggccacaagtgcccggctccatgttcgagagacagagctgctgttcctacggcggttgcaggatgtgcgggcagaggaaggccaggatgtgtgtctcgaagtggagacaggccgagtgggtgcagcgggggccgtgcgctgggtgcgaggtgggcagcccctgccccacgactctcgcctgtccatggcccaggatgggcacatccaccgcctcttcatccatggtgtcatactggccgaccagggcacctacggctgcgagagccaccacgatcgcaccctggccaggctcagcgtgaggcgtgagtgccccgtcctctcttaatgcattacccaccctacaccacagccttttctggctgtcctggagtccctcaggcccccaccaaagtgcccctcatcgctgagaaaagtcacccatggccgtcccagcagcagcttgcccaaagcaaaacttttctttttctaatattttttatttaccttagaagtccatgtggattttgcattccattgcatatttccaagtcggctttgctataaacacaaatattctccagaaagacttgccatgggcatccttcaggcatgtattctagggatacacatacccacttaagtagcagggatggctgtcaaacagcaccccacacctcccacccaaagctggagccctctgtttcctatgtgacctcatgcaagttaacctctttgagccaagtctccttaaaaatggggctgagaccaggtgcagtggctcacgcctataatcctaacactttgggaggccaaggcaggaggatcccttgaggccaggagttcgaggccatcctgggcaacatagcaagaacccatctccacaaaaaaaaataaaaattagccgggcatggtagttactagggaggctgaggcagaaggattgcttgaacccaggaggttgaggctatagtgagctatgatcatgtcacggcattccagcctgggtgacagcaagaccctgtctcaaattttaaaaatggggttgatccccgtctcaagtgtctctgggaacattaactgagataacatgaaaattcttacacagagcttggtgaatggttgtcatttgtgacacatctcttctaacttatttcattcaagaaatcatcacaataaa

SEQ ID NO: 161745 - DNA, 1774 bp, Homo sapiens
  Payload ID: 11574
  Gene Symbol: OBSL1
  Gene Name: obscurin-like 1
  ENST ID: ENST00000604031
  CDS Start-End: 1-1238
aggaagacactgtccgccgcctggtgctgcccgctgtccagctcgaggactccggcgagtacttgtgtgaaattgacgatgagtcggcctccttcactgtcaccgtcacagaacccccagtgcggatcatataccctcgcgatgaggtgaccttgatcgccgtgaccttggagtgtgtggtgctgatgtgtgaactgtctcgggaggatgcccctgtgcgctggtacaaggatgggctggaagtggaggagagcgaggccctggtgctggagagggatgggccacgctgccgcctggtgctacctgctgctcagcccgaggacgggggcgagtttgtatgtgatgctggagatgactcggccttcttcactgtcactgtcacagagcctccagtgcagttccttgctctagagacaactccaagcccgctctgtgtggcccctggggagccagtggtgctgagctgtgaactgtcccgggctggcgcccccgtggtctggagccacaatgggaggcccgtgcaggagggcgagggcctagagctccatgccgagggcccccgccgagtcctctgcatccaggctgcaggcccagcccatgcagggctctacacctgccagtctggagcagcccccggagccccaagcctcagcttcaccgtccaggtggctgagccactgctggtgaagctggtctcggagctgacaccactcactgtccacgagggcgatgatgccacgttccggtgtgaagtctccccaccagatgccgatgtcacctggctgcgcaatggggccgtcgtcactccagggccccaggtggagatggcccagaatggttcaagccgcatcttaaccttgcgaggctgccaactgggggatgcagggaccgtgactttgcgggcagggagcacggccacaagtgcccggctccatgttcgagagacagagctgctgttcctacggcggttgcaggatgtgcgggcagaggaaggccaggatgtgtgtctcgaagtggagacaggccgagtgggtgcagcgggggccgtgcgctgggtgcgaggtgggcagcccctgccccacgactctcgcctgtccatggcccaggatgggcacatccaccgcctcttcatccatggtgtcatactggccgaccagggcacctacggctgcgagagccaccacgatcgcaccctggccaggctcagcgtgaggcgtgagtgccccgtcctctcttaatgcattacccaccctacaccacagccttttctggctgtcctggagtccctcaggcccccaccaaagtgcccctcatcgctgagaaaagtcacccatggccgtcccagcagcagcttgcccaaagcaaaacttttctttttctaatattttttatttaccttagaagtccatgtggattttgcattccattgcatatttccaagtcggctttgctataaacacaaatattctccagaaagacttgccatgggcatccttcaggcatgtattctagggatacacatacccacttaagtagcagggatggctgtcaaacagcaccccacacctcccacccaaagctggagccctctgtttcctatgtgacctcatgcaagttaacctctttgagccaagtctccttaaaaatggggctgagaccaggtgcagtggctcacgcctataatcctaacactttgggaggccaaggcaggaggatcccttgaggccaggagttcgaggccatcctgggcaacatagcaagaacccatctccac

SEQ ID NO: 161746 - DNA, 6438 bp, Homo sapiens
  Payload ID: 11575
  Gene Symbol: OCLN
  Gene Name: occludin
  Uniprot ID: Q16625
  ENST ID: ENST00000355237
  CDS Start-End: 437-2005
gcctctctccatcagacaccccaaggttccatccgaagcaggcggagcaccgaacgcaccccggggtggtcagggacccccatccgtgctgccccctaggagcccgcgcctctcctctgcgccccgcctctcgggccgcaacgtcgcgcggttcctttaacagcgcgctggcagggtgtgggaagcaggaccgcgtcctcccgccccctcccatccgagtttcaggtgaattggtcaccgagggaggaggccgacacaccacacctacactcccgcgtccacctctccctccctgcttcctctggcggaggcggcaggaaccgagagccaggtccagagcgccgaggagccggtctaggacgcagcagattggtttatcttggaagctaaagggcattgctcatcctgaagatcagctgaccattgacaatcagccatgtcatccaggcctcttgaaagtccacctccttacaggcctgatgaattcaaaccgaatcattatgcaccaagcaatgacatatatggtggagagatgcatgttcgaccaatgctctctcagccagcctactctttttacccagaagatgaaattcttcacttctacaaatggacctctcctccaggagtgattcggatcctgtctatgctcattattgtgatgtgcattgccatctttgcctgtgtggcctccacgcttgcctgggacagaggctatggaacttcccttttaggaggtagtgtaggctacccttatggaggaagtggctttggtagctacggaagtggctatggctatggctatggttatggctatggctacggaggctatacagacccaagagcagcaaagggcttcatgttggccatggctgccttttgtttcattgccgcgttggtgatctttgttaccagtgttataagatctgaaatgtccagaacaagaagatactacttaagtgtgataatagtgagtgctatcctgggcatcatggtgtttattgccacaattgtctatataatgggagtgaacccaactgctcagtcttctggatctctatatggttcacaaatatatgccctctgcaaccaattttatacacctgcagctactggactctacgtggatcagtatttgtatcactactgtgttgtggatccccaggaggccattgccattgtactggggttcatgattattgtggcttttgctttaataattttctttgctgtgaaaactcgaagaaagatggacaggtatgacaagtccaatattttgtgggacaaggaacacatttatgatgagcagccccccaatgtcgaggagtgggttaaaaatgtgtctgcaggcacacaggacgtgccttcacccccatctgactatgtggaaagagttgacagtcccatggcatactcttccaatggcaaagtgaatgacaagcggttttatccagagtcttcctataaatccacgccggttcctgaagtggttcaggagcttccattaacttcgcctgtggatgacttcaggcagcctcgttacagcagcggtggtaactttgagacaccttcaaaaagagcacctgcaaagggaagagcaggaaggtcaaagagaacagagcaagatcactatgagacagactacacaactggcggcgagtcctgtgatgagctggaggaggactggatcagggaatatccacctatcacttcagatcaacaaagacaactgtacaagaggaattttgacactggcctacaggaatacaagagcttacaatcagaacttgatgagatcaataaagaactctcccgtttggataaagaattggatgactatagagaagaaagtgaagagtacatggctgctgctgatgaatacaatagactgaagcaagtgaagggatctgcagattacaaaagtaagaagaatcattgcaagcagttaaagagcaaattgtcacacatcaagaagatggttggagactatgatagacagaaaacatagaaggctgatgccaagttgtttgagaaattaagtatctgacatctctgcaatcttctcagaaggcaaatgactttggaccataaccccggaagccaaacctctgtgagcatcacaaagttttggttgctttaacatcatcagtattgaagcattttataaatcgcttttgataatcaactgggctgaacactccaattaaggattttatgctttaaacattggttcttgtattaagaatgaaatactgtttgaggtttttaagccttaaaggaaggttctggtgtgaactaaactttcacaccccagacgatgtcttcatacctacatgtatttgtttgcataggtgatctcatttaatcctctcaaccacctttcagataactgttatttataatcacttttttccacataaggaaactgggttcctgcaatgaagtctctgaagtgaaactgcttgtttcctagcacacacttttggttaagtctgttttatgacttcattaataataaattccctggcctttcatattttagctactatatatgtgatgatctaccagcctccctattttttttctgttatataaatggttaaaagaggtttttcttaaataataaagatcatgtaaaagtaacaaatgtgtgaaatttaaagattgtaaatatatatttacttttttaagatcaaagtttaaaccccgtggttagaattttgtgtgtttttaaatactttttatctttttgcatgccttttttaaaaaaccaactagaacttttcattatatcagaatatctgattacatttataattcaattgtgacttgaactgtatcttacaggaatgttcaatttctatacatattttataaggtattaaacctggtgttttctttccataataacctgtttgatgttattagtgctgttaacatacagcaatggaaaaccacactcaggagttgtatctgttgttgtttatactcctttggatgctgtgctggttagtcgtttcccattcctttggctgtaagaatgctgatatgtctgggaatagaatgctataccacgaaataccaaataatttcaaatggtgcccttaaattgtatcacttttttaaaaattcagattcttattagtaaaattagttgatagcactgtgctgaccaagttgattgtgatcatcccagcttagacttttctaaaaacttttttttagaataatctataaactgaactttagtatgcatttcagatatttaggtatataatttttttttttttttgagacagagtctcactctcacccaggctggaatgcagtggtgctatcttggctcactgcaacctccacctcccgggttcaagcaattctcctgcctcagcctctcgagtagttgagactacaggtgcccatcaccatgcgtggctaatttttgtatttttaatagagacggggttttaccatagtggccaggttggtcttgaactcctgaccttgtggtctgcctgcctcggcctcccaaagtgctgggattacaggcgtgagccaccatgcctggcctaagtgtgtgtgtgtgtgtgtgtgtgtatttttttttttttttttttgagatggagttttgctcttgttgaacaggctggagtgcaatgtcgcgatctcagctcaccacaacctccgcctcccaggttcaaacaattctcctgcctcggcctcccgagtagctgggattacaggcatgcgccaccacacctggctaattttttttttgtatttttagtagagatggggtttctccatgttggtcaggctggtctcgaactcctgacctcaggtgatccatccacctcggcctcccaaagtgctgggattagaggcgtgagccactgtgcccggcctataatttttgatagatgattttgaattattttccagagataaaattttaaatgtttccattatatcactgatttatttctgcaaattgaataaattcttaattttctgcatgcacataatacaaaaggtattttcatagttttggatttataccaaatgaaaaggattctcttgatgagcacctttaactgatttttctgttaaagttttaacaatttgttcttggaagtcagttcgtgaaggcaagtttgtcagtattttcacaaaactattcagctgaatccagaaagtgaaacagcaagaatttgcattgtaaaattgtgttataaaattggactttgaaatttcaaaaataagaaaaattttcatgtgtatttatactaaataccgttttaggaaactaggatcagggtgtttctgttggcgttggcattaactagctggatgtaaatttgaaaagccactcaagcagcttcctagtctagaaagtcagaggtttagattagatttccgacatcccttccatttctgacctgtagttcttgtctggaattctgctttgttataaactattgttctaaggagtttgttgtgatagcacatagttcattttgtaaagattccctgcgtataaagtgatgccctacatatgtgattttgtattaaaagtatataggatcattattttattttgaaaaatttaaatacagaaaagtataaaatataagtaccatccgcccagaaataacatgtgttaatgttttgtcatatgtgctttatattttttgaaataaagtgaagtcaactagtatttatagtaaataagttacatacacataagtacatatatgatatttaatcctcacaacgatcttttgacatgtgaccatttcttattcttcttttatagacaaggaactaatgatatgatagattaactggctgttgtcacactagcaagtggcaaaacaagggattaggatcttagtctcttcaactgttagattctatacttccatcctgtgttgactttgttaatggattggataatgtgagatcactctgatgtaaataaagtatcctatattaatttcgagtgcattttaagtacttgtaacataaatgcttcctgtgaaatatctgtaaagacctgaatgggtacatgtgtgtaaagaagaatcagggcagaaaagtgcttttatcatggctccggggaccttagcttcagttggtgttgtgagaattcctcacacaaggacattctccttgcttcagcatcaggatggaagtgtttctcatctggactttttcaaagactcagctggaggaatcagaattcataatttcctggcagctcatgattctgctacactacaccatgccatctcttgtgtgaaaggacagatttgatggaggactatgtcatccctcatgcgtttcttattgtctacatttattctaatgggaagaagtgagcaaaaacacctcaataatttgggtagtttttagaaaaccttgttagtaaattagaatagtgccactttggcattatgagaaagaagcatggatacataactagggttttgtgtatgactacaacgaaatgcagaatggtgtctccaaaaggtttccaattgctgccacaagaactgcttggtattgcctacatgtgttgtcctatttttgctttgcccttctgcagttacttgctgtgggaccttggagaaattaacttagcctctctgtacttcagttttttgtatttgtaaaatatatttgtaataatctcatagttaagaaggtagttaatgtgtgactcagtccttgtctaaaagtaaatatgcctagctacccccatcttccaaagccagaaggtgaaactttaacaagttttctaaaagcaaattgtgttttttaaaagtgcatgtgtcatccaatcccatatgattgatctgtgctgggtgcagccttagaatgtaaattcttttgaattctaggcagagaatgcaggattggcattctaaatatttgtacatgataaacaaatgcttctttaggttagagcaaatagtttacttatcaagatcacaattgttagatactgttgtcaattacagaggttttagatgaggctttctggaatgatttagtttccctgtaagggagcctgtctattggaatagacaggttcacttctcccagtctttcaagttgcatgctttttatatctgattccactggctgagctgattgtgaatgtcctaaccctgttgattgtgtctggccactcatgggcaaagaacagattatccattctttatagttgtcttttagttttacaagttgaaaaaacatctgagtaggttagataatttattctaccactttgtaaatgattagaatatgtcagtcataatcatgccaagagattatggatttatgcatattttgttttgctgtagtaccattcctagttgaatcttaacatccatgtctaaaatctatacagaacaaatattacagttgggaaaactg

SEQ ID NO: 161747 - DNA, 1748 bp, Homo sapiens
  Payload ID: 11575
  Gene Symbol: OCLN
  Gene Name: occludin
  Uniprot ID: Q16625
  ENST ID: ENST00000396442
  CDS Start-End: 180-1748
agtccccggctgagcgctggcggtcggtgcggcgtcaggtgcgcccgccaggtgagcgcgctccctggcaccgttggcccccggagggtcgggcccagttgcggcgagcggattggtttatcttggaagctaaagggcattgctcatcctgaagatcagctgaccattgacaatcagccatgtcatccaggcctcttgaaagtccacctccttacaggcctgatgaattcaaaccgaatcattatgcaccaagcaatgacatatatggtggagagatgcatgttcgaccaatgctctctcagccagcctactctttttacccagaagatgaaattcttcacttctacaaatggacctctcctccaggagtgattcggatcctgtctatgctcattattgtgatgtgcattgccatctttgcctgtgtggcctccacgcttgcctgggacagaggctatggaacttcccttttaggaggtagtgtaggctacccttatggaggaagtggctttggtagctacggaagtggctatggctatggctatggttatggctatggctacggaggctatacagacccaagagcagcaaagggcttcatgttggccatggctgccttttgtttcattgccgcgttggtgatctttgttaccagtgttataagatctgaaatgtccagaacaagaagatactacttaagtgtgataatagtgagtgctatcctgggcatcatggtgtttattgccacaattgtctatataatgggagtgaacccaactgctcagtcttctggatctctatatggttcacaaatatatgccctctgcaaccaattttatacacctgcagctactggactctacgtggatcagtatttgtatcactactgtgttgtggatccccaggaggccattgccattgtactggggttcatgattattgtggcttttgctttaataattttctttgctgtgaaaactcgaagaaagatggacaggtatgacaagtccaatattttgtgggacaaggaacacatttatgatgagcagccccccaatgtcgaggagtgggttaaaaatgtgtctgcaggcacacaggacgtgccttcacccccatctgactatgtggaaagagttgacagtcccatggcatactcttccaatggcaaagtgaatgacaagcggttttatccagagtcttcctataaatccacgccggttcctgaagtggttcaggagcttccattaacttcgcctgtggatgacttcaggcagcctcgttacagcagcggtggtaactttgagacaccttcaaaaagagcacctgcaaagggaagagcaggaaggtcaaagagaacagagcaagatcactatgagacagactacacaactggcggcgagtcctgtgatgagctggaggaggactggatcagggaatatccacctatcacttcagatcaacaaagacaactgtacaagaggaattttgacactggcctacaggaatacaagagcttacaatcagaacttgatgagatcaataaagaactctcccgtttggataaagaattggatgactatagagaagaaagtgaagagtacatggctgctgctgatgaatacaatagactgaagcaagtgaagggatctgcagattacaaaagtaagaagaatcattgcaagcagttaaagagcaaattgtcacacatcaagaagatggttggagactatgatagacagaaaacatag

SEQ ID NO: 161748 - DNA, 5391 bp, Homo sapiens
  Payload ID: 11575
  Gene Symbol: OCLN
  Gene Name: occludin
  Uniprot ID: Q16625
  ENST ID: ENST00000538151
  CDS Start-End: 143-958
attggtttatcttggaagctaaagggcattgctcatcctgaagatcagctgaccattgacaatcagccatgtcatccaggcctcttgaaagtccacctccttacaggcctgatgaattgccattgccattgtactggggttcatgattattgtggcttttgctttaataattttctttgctgtgaaaactcgaagaaagatggacaggtatgacaagtccaatattttgtgggacaaggaacacatttatgatgagcagccccccaatgtcgaggagtgggttaaaaatgtgtctgcaggcacacaggacgtgccttcacccccatctgactatgtggaaagagttgacagtcccatggcatactcttccaatggcaaagtgaatgacaagcggttttatccagagtcttcctataaatccacgccggttcctgaagtggttcaggagcttccattaacttcgcctgtggatgacttcaggcagcctcgttacagcagcggtggtaactttgagacaccttcaaaaagagcacctgcaaagggaagagcaggaaggtcaaagagaacagagcaagatcactatgagacagactacacaactggcggcgagtcctgtgatgagctggaggaggactggatcagggaatatccacctatcacttcagatcaacaaagacaactgtacaagaggaattttgacactggcctacaggaatacaagagcttacaatcagaacttgatgagatcaataaagaactctcccgtttggataaagaattggatgactatagagaagaaagtgaagagtacatggctgctgctgatgaatacaatagactgaagcaagtgaagggatctgcagattacaaaagtaagaagaatcattgcaagcagttaaagagcaaattgtcacacatcaagaagatggttggagactatgatagacagaaaacatagaaggctgatgccaagttgtttgagaaattaagtatctgacatctctgcaatcttctcagaaggcaaatgactttggaccataaccccggaagccaaacctctgtgagcatcacaaagttttggttgctttaacatcatcagtattgaagcattttataaatcgcttttgataatcaactgggctgaacactccaattaaggattttatgctttaaacattggttcttgtattaagaatgaaatactgtttgaggtttttaagccttaaaggaaggttctggtgtgaactaaactttcacaccccagacgatgtcttcatacctacatgtatttgtttgcataggtgatctcatttaatcctctcaaccacctttcagataactgttatttataatcacttttttccacataaggaaactgggttcctgcaatgaagtctctgaagtgaaactgcttgtttcctagcacacacttttggttaagtctgttttatgacttcattaataataaattccctggcctttcatattttagctactatatatgtgatgatctaccagcctccctattttttttctgttatataaatggttaaaagaggtttttcttaaataataaagatcatgtaaaagtaacaaatgtgtgaaatttaaagattgtaaatatatatttacttttttaagatcaaagtttaaaccccgtggttagaattttgtgtgtttttaaatactttttatctttttgcatgccttttttaaaaaaccaactagaacttttcattatatcagaatatctgattacatttataattcaattgtgacttgaactgtatcttacaggaatgttcaatttctatacatattttataaggtattaaacctggtgttttctttccataataacctgtttgatgttattagtgctgttaacatacagcaatggaaaaccacactcaggagttgtatctgttgttgtttatactcctttggatgctgtgctggttagtcgtttcccattcctttggctgtaagaatgctgatatgtctgggaatagaatgctataccacgaaataccaaataatttcaaatggtgcccttaaattgtatcacttttttaaaaattcagattcttattagtaaaattagttgatagcactgtgctgaccaagttgattgtgatcatcccagcttagacttttctaaaaacttttttttagaataatctataaactgaactttagtatgcatttcagatatttaggtatataatttttttttttttttgagacagagtctcactctcacccaggctggaatgcagtggtgctatcttggctcactgcaacctccacctcccgggttcaagcaattctcctgcctcagcctctcgagtagttgagactacaggtgcccatcaccatgcgtggctaatttttgtatttttaatagagacggggttttaccatagtggccaggttggtcttgaactcctgaccttgtggtctgcctgcctcggcctcccaaagtgctgggattacaggcgtgagccaccatgcctggcctaagtgtgtgtgtgtgtgtgtgtgtgtatttttttttttttttttttgagatggagttttgctcttgttgaacaggctggagtgcaatgtcgcgatctcagctcaccacaacctccgcctcccaggttcaaacaattctcctgcctcggcctcccgagtagctgggattacaggcatgcgccaccacacctggctaattttttttttgtatttttagtagagatggggtttctccatgttggtcaggctggtctcgaactcctgacctcaggtgatccatccacctcggcctcccaaagtgctgggattagaggcgtgagccactgtgcccggcctataatttttgatagatgattttgaattattttccagagataaaattttaaatgtttccattatatcactgatttatttctgcaaattgaataaattcttaattttctgcatgcacataatacaaaaggtattttcatagttttggatttataccaaatgaaaaggattctcttgatgagcacctttaactgatttttctgttaaagttttaacaatttgttcttggaagtcagttcgtgaaggcaagtttgtcagtattttcacaaaactattcagctgaatccagaaagtgaaacagcaagaatttgcattgtaaaattgtgttataaaattggactttgaaatttcaaaaataagaaaaattttcatgtgtatttatactaaataccgttttaggaaactaggatcagggtgtttctgttggcgttggcattaactagctggatgtaaatttgaaaagccactcaagcagcttcctagtctagaaagtcagaggtttagattagatttccgacatcccttccatttctgacctgtagttcttgtctggaattctgctttgttataaactattgttctaaggagtttgttgtgatagcacatagttcattttgtaaagattccctgcgtataaagtgatgccctacatatgtgattttgtattaaaagtatataggatcattattttattttgaaaaatttaaatacagaaaagtataaaatataagtaccatccgcccagaaataacatgtgttaatgttttgtcatatgtgctttatattttttgaaataaagtgaagtcaactagtatttatagtaaataagttacatacacataagtacatatatgatatttaatcctcacaacgatcttttgacatgtgaccatttcttattcttcttttatagacaaggaactaatgatatgatagattaactggctgttgtcacactagcaagtggcaaaacaagggattaggatcttagtctcttcaactgttagattctatacttccatcctgtgttgactttgttaatggattggataatgtgagatcactctgatgtaaataaagtatcctatattaatttcgagtgcattttaagtacttgtaacataaatgcttcctgtgaaatatctgtaaagacctgaatgggtacatgtgtgtaaagaagaatcagggcagaaaagtgcttttatcatggctccggggaccttagcttcagttggtgttgtgagaattcctcacacaaggacattctccttgcttcagcatcaggatggaagtgtttctcatctggactttttcaaagactcagctggaggaatcagaattcataatttcctggcagctcatgattctgctacactacaccatgccatctcttgtgtgaaaggacagatttgatggaggactatgtcatccctcatgcgtttcttattgtctacatttattctaatgggaagaagtgagcaaaaacacctcaataatttgggtagtttttagaaaaccttgttagtaaattagaatagtgccactttggcattatgagaaagaagcatggatacataactagggttttgtgtatgactacaacgaaatgcagaatggtgtctccaaaaggtttccaattgctgccacaagaactgcttggtattgcctacatgtgttgtcctatttttgctttgcccttctgcagttacttgctgtgggaccttggagaaattaacttagcctctctgtacttcagttttttgtatttgtaaaatatatttgtaataatctcatagttaagaaggtagttaatgtgtgactcagtccttgtctaaaagtaaatatgcctagctacccccatcttccaaagccagaaggtgaaactttaacaagttttctaaaagcaaattgtgttttttaaaagtgcatgtgtcatccaatcccatatgattgatctgtgctgggtgcagccttagaatgtaaattcttttgaattctaggcagagaatgcaggattggcattctaaatatttgtacatgataaacaaatgcttctttaggttagagcaaatagtttacttatcaagatcacaattgttagatactgttgtcaattacagaggttttagatgaggctttctggaatgatttagtttccctgtaagggagcctgtctattggaatagacaggttcacttctcccagtctttcaagttgcatgctttttatatctgattccactggctgagctgattgtgaatgtcctaaccctgttgattgtgtctggccactcatgggcaaagaacagattatccattctttatagttgtcttttagttttacaagttgaaaaaacatctgagtaggttagataatttattctaccactttgtaaatgattagaatatgtcagtcataatcatgccaagagattatggatttatgcatattttgttttgctgtagtaccattcctagttgaatcttaacatccatgtctaaaatctatacagaacaaatattacagttgggaaaactg

SEQ ID NO: 161749 - DNA, 4995 bp, Homo sapiens
  Payload ID: 11575
  Gene Symbol: OCLN
  Gene Name: occludin
  ENST ID: ENST00000615870
  CDS Start-End: 437-2005
gcctctctccatcagacaccccaaggttccatccgaagcaggcggagcaccgaacgcaccccggggtggtcagggacccccatccgtgctgccccctaggagcccgcgcctctcctctgcgccccgcctctcgggccgcaacatcgcgcggttcctttaacagcgcgctggcagggtgtgggaagcaggaccgcgtcctcccgccccctcccatccgagtttcaggtgaattggtcaccgagggaggaggccgacacaccacacctacactcccgcgtccacctctccctccctgcttcctctggcggaggcggcaggaaccgagagccaggtccagagcgccgaggagccggtctaggacgcagcagattggtttatcttggaagctaaagggcattgctcatcctgaagatcagctgaccattgacaatcagccatgtcatccaggcctcttgaaagtccacctccttacaggcctgatgaattcaaaccgaatcattatgcaccaagcaatgacatatatggtggagagatgcatgttcgaccaatgctctctcagccagcctactctttttacccagaagatgaaattcttcacttctacaaatggacctctcctccaggagtgattcggatcctgtctatgctcattattgtgatgtgcattgccatctttgcctgtgtggcctccacgcttgcctgggacagaggctatggaacttcccttttaggaggtagtgtaggctacccttatggaggaagtggctttggtagctacggaagtggctatggctatggctatggttatggctatggctacggaggctatacagacccaagagcagcaaagggcttcatgttggccatggctgccttttgtttcattgccgcgttggtgatctttgttaccagtgttataagatctgaaatgtccagaacaagaagatactacttaagtgtgataatagtgagtgctatcctgggcatcatggtgtttattgccacaattgtctatataatgggagtgaacccaactgctcagtcttctggatctctatatggttcacaaatatatgccctctgcaaccaattttatacacctgcagctactggactctacgtggatcagtatttgtatcactactgtgttgtggatccccaggaggccattgccattgtactggggttcatgattattgtggcttttgctttaataattttctttgctgtgaaaactcgaagaaagatggacaggtatgacaagtccaatattttgtgggacaaggaacacatttatgatgagcagccccccaatgtcgaggagtgggttaaaaatgtgtctgcaggcacacaggacgtgccttcacccccatctgactatgtggaaagagttgacagtcccatggcatactcttccaatggcaaagtgaatgacaagcggttttatccagagtcttcctataaatccacgccggttcctgaagtggttcaggagcttccattaacttcgcctgtggatgacttcaggcagcctcgttacagcagcggtggtaactttgagacaccttcaaaaagagcacctgcaaagggaagagcaggaaggtcaaagagaacagagcaagatcactatgagacagactacacaactggcggcgagtcctgtgatgagctggaggaggactggatcagggaatatccacctatcacttcagatcaacaaagacaactgtacaagaggaattttgacactggcctacaggaatacaagagcttacaatcagaacttgatgagatcaataaagaactctcccgtttggataaagaattggatgactatagagaagaaagtgaagagtacatggctgctgctgatgaatacaatagactgaagcaagtgaagggatctgcagattacaaaagtaagaagaatcattgcaagcagttaaacagcaaattgtcacacatcaagaagatggttggagactatgatagacagaaaacatagaaggctgatgccaagttgtttgagaaattaagtatctgacatctctgcaatcttctcagaaggcaaatgactttggaccataaccccggaagccaaacctctgtgagcatcacagttttggttgctttaatatcatcagtattgaagcattttataaatcgcttttgataatcaactgggctgaacactccaattaaggattttatgctttaaacattggttcttgtattaagaatgaaatactgtttgaggtttttaagccttaaaggaaggttctggtgtgaactaaactttcacaccccagacgatgtcttcatacctacatgtatttgtttgcataggtgatctcatttaatcctctcaaccacctttcagataactgttatttataatcacttttttccacataaggaaactgggttcctgcaatgaagtctctgaagtgaaactgcttgtttcctagcacacacttttggttaagtctgttttatgacttcattaataataaattccctggcctttcatattttagctactatatatgtgatgatctaccagcctccctattttttttctgttatataaatggttaaaagaggtttttcttaaataataaagatcatgtaaaagtaacaaatgtgtgaaatttaaagattgtaaatatatatttacttttttaagatcaaagtttaaacccggtggttagaattttgtgtgtttttaaatactttttatctttttgcatgcctttttttaaaaaccaactagaacttttcattatatcagaatatctgattacatttataattcaattgtgacttgaactgtatcttacaggaatgttcaatttctatacatattttataaggtattaaacctggtgttttctttccataataacctgtttgatgttattagtgctgttaacacacagcaatggaaaaccacactcaggagttgtatctgttgttgtttatactcctttggatgctgtgctggttagtcgtttcccattcctttggctgtaagaatgctgatatgtctgggaatagaatgctataccacgaaataccaaataatttcaaatggtgcccttaaattgtatcacttttttaaaaattcagattcttattagtaaaattacttgatagcactgtgctgaccaagttgattgtgatcatcccagcttagacttttctaaaaacttttttttagaataatctataaactgaactttagtatgcatttcagatatttaggtatataatttttttttttttttgagacagagtctcactctcacccaggctggaatgcagtggcgctatcttggctcactgcaacctccacctcccgggttcaagcaattctcctgcctcagcctctcgagtagttgagactacaggtacccatcaccatgcctggctaatttttgtatttttaatagagacggggttttaccatattggccaggttggtcttgaactcctgaccttgtggtctgcctgcctcggcctcccaaagtgctgggattacaggcgtgagccaccatgcctggcctaagtgtgtgtgtgtgtgtgtgtgtgtattttttttttttttttttttttttgagatggagttttgctcttgttgaacaggctggagtgcaatgtcgcgatctcagctcaccacaacctccgcctcccaggttcaaacaattctcctgcctcggcctcccgagtagctgggattacaggcatgcgccaccacacctggctaatttttttttgtatttttagtagagatggggtttctccacgttggtcaggctggtctcgaactcctgacctcaggtgatccatccacctcggcctcccaaagtgctgggattagaggcgtgagccactgcgcccggcctataatttttgatagatgattttggattattttccagagataaaattttaaatgtttccattatatcactgatttatttctgcaaattgaataaattcttaattttctgcatgcacataatacaaaaggtattttcatagttttggatttataccaaatgaaaaggactctcttgatgagcacctttaactgatttttctgttaaagttttaacaatttgttcttggaagtcagttcgtgaaggcaagtttgtcagtattttcacaaaactattcagctgaatccagaaagtgaaacagcaagaatttgcattgtaaaattgtgttataaaattggactttgaaatttcaaaaataagaaaaattttcatgtgtatttatactaaataccgttttaggaaactaggatcagggtgtttctgttggcgttggcattaactagctggatgtaaatttgaaaagccactcaagcagcttcctagtctagaaagtcagaggtttagattagatttccgacatcccttccatttctgacctgtagttcttgtctggaattctgctttgttataaactattgttctaaggagtttgttgtgatagcacatagttcattttgtaaagattccctgcgtataaagtgatgccctacatatgtgattttgtattaaaagtatataggatcattattttattttgaaaaatttaaatacagaaaagtataaaatataagtaccatccgcccagaaataacatgtgttaatgttttgtcatatgtgctttatattttttgaaataaagtgaagtcaactagtatttatagtaaataagttacatacacataagtacatatatgatatttaatcctcacaacgatcttttgacatgtgaccatttcttattcttcttttatagacaaggaactaatgatatgatagattaactggctgttgtcacactagcaagtggcaaaacaagggattaggatcttagtctcttcaactgttagattctatacttccatcctgtgttgactttgttaatggattggataatgtgagatcactctgatgtaaataaagtatcctatattaa

SEQ ID NO: 161750 - DNA, 1654 bp, Homo sapiens
  Payload ID: 11575
  Gene Symbol: OCLN
  Gene Name: occludin
  ENST ID: ENST00000620655
  CDS Start-End: 45-1613
ggcattgctcatcctgaagatcagctgaccattgacaatcagccatgtcatccaggcctcttgaaagtccacctccttacaggcctgatgaattcaaaccgaatcattatgcaccaagcaatgacatatatggtggagagatgcatgttcgaccaatgctctctcagccagcctactctttttacccagaagatgaaattcttcacttctacaaatggacctctcctccaggagtgattcggatcctgtctatgctcattattgtgatgtgcattgccatctttgcctgtgtggcctccacgcttgcctgggacagaggctatggaacttcccttttaggaggtagtgtaggctacccttatggaggaagtggctttggtagctacggaagtggctatggctatggctatggttatggctatggctacggaggctatacagacccaagagcagcaaagggcttcatgttggccatggctgccttttgtttcattgccgcgttggtgatctttgttaccagtgttataagatctgaaatgtccagaacaagaagatactacttaagtgtgataatagtgagtgctatcctgggcatcatggtgtttattgccacaattgtctatataatgggagtgaacccaactgctcagtcttctggatctctatatggttcacaaatatatgccctctgcaaccaattttatacacctgcagctactggactctacgtggatcagtatttgtatcactactgtgttgtggatccccaggaggccattgccattgtactggggttcatgattattgtggcttttgctttaataattttctttgctgtgaaaactcgaagaaagatggacaggtatgacaagtccaatattttgtgggacaaggaacacatttatgatgagcagccccccaatgtcgaggagtgggttaaaaatgtgtctgcaggcacacaggacgtgccttcacccccatctgactatgtggaaagagttgacagtcccatggcatactcttccaatggcaaagtgaatgacaagcggttttatccagagtcttcctataaatccacgccggttcctgaagtggttcaggagcttccattaacttcgcctgtggatgacttcaggcagcctcgttacagcagcggtggtaactttgagacaccttcaaaaagagcacctgcaaagggaagagcaggaaggtcaaagagaacagagcaagatcactatgagacagactacacaactggcggcgagtcctgtgatgagctggaggaggactggatcagggaatatccacctatcacttcagatcaacaaagacaactgtacaagaggaattttgacactggcctacaggaatacaagagcttacaatcagaacttgatgagatcaataaagaactctcccgtttggataaagaattggatgactatagagaagaaagtgaagagtacatggctgctgctgatgaatacaatagactgaagcaagtgaagggatctgcagattacaaaagtaagaagaatcattgcaagcagttaaacagcaaattgtcacacatcaagaagatggttggagactatgatagacagaaaacatagaaggctgatgccaagttgtttgagaaattaagtatctgaca

SEQ ID NO: 161751 - DNA, 1748 bp, Homo sapiens
  Payload ID: 11575
  Gene Symbol: OCLN
  Gene Name: occludin
  ENST ID: ENST00000617110
  CDS Start-End: 180-1748
agtccccggctgagcgctggcggtcggtgcggcgtcaggtgcgcccgccaggtgagcgcgctccctggcaccgttggcccccggagggtcgggcccagttgcggcgagcggattggtttatcttggaagctaaagggcattgctcatcctgaagatcagctgaccattgacaatcagccatgtcatccaggcctcttgaaagtccacctccttacaggcctgatgaattcaaaccgaatcattatgcaccaagcaatgacatatatggtggagagatgcatgttcgaccaatgctctctcagccagcctactctttttacccagaagatgaaattcttcacttctacaaatggacctctcctccaggagtgattcggatcctgtctatgctcattattgtgatgtgcattgccatctttgcctgtgtggcctccacgcttgcctgggacagaggctatggaacttcccttttaggaggtagtgtaggctacccttatggaggaagtggctttggtagctacggaagtggctatggctatggctatggttatggctatggctacggaggctatacagacccaagagcagcaaagggcttcatgttggccatggctgccttttgtttcattgccgcgttggtgatctttgttaccagtgttataagatctgaaatgtccagaacaagaagatactacttaagtgtgataatagtgagtgctatcctgggcatcatggtgtttattgccacaattgtctatataatgggagtgaacccaactgctcagtcttctggatctctatatggttcacaaatatatgccctctgcaaccaattttatacacctgcagctactggactctacgtggatcagtatttgtatcactactgtgttgtggatccccaggaggccattgccattgtactggggttcatgattattgtggcttttgctttaataattttctttgctgtgaaaactcgaagaaagatggacaggtatgacaagtccaatattttgtgggacaaggaacacatttatgatgagcagccccccaatgtcgaggagtgggttaaaaatgtgtctgcaggcacacaggacgtgccttcacccccatctgactatgtggaaagagttgacagtcccatggcatactcttccaatggcaaagtgaatgacaagcggttttatccagagtcttcctataaatccacgccggttcctgaagtggttcaggagcttccattaacttcgcctgtggatgacttcaggcagcctcgttacagcagcggtggtaactttgagacaccttcaaaaagagcacctgcaaagggaagagcaggaaggtcaaagagaacagagcaagatcactatgagacagactacacaactggcggcgagtcctgtgatgagctggaggaggactggatcagggaatatccacctatcacttcagatcaacaaagacaactgtacaagaggaattttgacactggcctacaggaatacaagagcttacaatcagaacttgatgagatcaataaagaactctcccgtttggataaagaattggatgactatagagaagaaagtgaagagtacatggctgctgctgatgaatacaatagactgaagcaagtgaagggatctgcagattacaaaagtaagaagaatcattgcaagcagttaaacagcaaattgtcacacatcaagaagatggttggagactatgatagacagaaaacatag

SEQ ID NO: 161752 - DNA, 1223 bp, Homo sapiens
  Payload ID: 11575
  Gene Symbol: OCLN
  Gene Name: occludin
  ENST ID: ENST00000613193
  CDS Start-End: 45-437
ggcattgctcatcctgaagatcagctgaccattgacaatcagccatgtcatccaggcctcttgaaagtccacctccttacaggcctgatgaattcaaaccgaatcattatgcaccaagcaatgacatatatggtggagagatgcatgttcgaccaatgctctctcagccagcctactctttttacccagaagatgaaattcttcacttctacaaatggacctctcctccaggagtgattcggatcctgtctatgctcattattgtgatgtgcattgccatctttgcctgtgtggcctccacgcttgcctgggacagaggctatggaacttcccttttaggaggccattgccattgtactggggttcatgattattgtggcttttgctttaataattttctttgctgtgaaaactcgaagaaagatggacaggtatgacaagtccaatattttgtgggacaaggaacacatttatgatgagcagccccccaatgtcgaggagtgggttaaaaatgtgtctgcaggcacacaggacgtgccttcacccccatctgactatgtggaaagagttgacagtcccatggcatactcttccaatggcaaagtgaatgacaagcggttttatccagagtcttcctataaatccacgccggttcctgaagtggttcaggagcttccattaacttcgcctgtggatgacttcaggcagcctcgttacagcagcggtggtaactttgagacaccttcaaaaagagcacctgcaaagggaagagcaggaaggtcaaagagaacagagcaagatcactatgagacagactacacaactggcggcgagtcctgtgatgagctggaggaggactggatcagggaatatccacctatcacttcagatcaacaaagacaactgtacaagaggaattttgacactggcctacaggaatacaagagcttacaatcagaacttgatgagatcaataaagaactctcccgtttggataaagaattggatgactatagagaagaaagtgaagagtacatggctgctgctgatgaatacaatagactgaagcaagtgaagggatctgcagattacaaaagtaagaagaatcattgcaagcagttaaacagcaaattgtcacacatcaagaagatggttggagactatgatagacagaaaacatagaaggctgatgccaagttgtttgagaaattaagtatctgaca

SEQ ID NO: 161753 - DNA, 1133 bp, Homo sapiens
  Payload ID: 11576
  Gene Symbol: OCEL1
  Gene Name: occludin/ELL domain containing 1
  Uniprot ID: Q9H607
  ENST ID: ENST00000215061
  CDS Start-End: 45-839
agccctgctgagcgaccccgccagtcgggtccatcctgcagtaaatgcacaacccggacggaagtgcctctccgacagcagatccaggctcggagctccagacgctgggacaggccgcccgcagaccacccccgccgcgcgcgggacacgacgccccccgcaggacccgcccatcagcccggaaacccctgagctgcttctcccggaggccgatgcccacccgggagcccccaaagactcgcggctcccgggggcacctgcatactcacccgcctgggcctgggcccccgctgcagggactggcgccccgaggcctcaaaaccagcgccccccgccctccgtgccagccccagccgggaccccacaaggcaaagaccaagaagattgtgtttgaggatgagttgctctcccaggccctcctgggcgccaagaagcctattggagccatccctaaggggcataagcctaggccccacccagtgcccgactatgagcttaagtacccgccagtgagcagtgagagggaacggagccgctatgtcgcagtgttccaggaccagtacggagagttcttggagctccagcacgaggtggggtgtgcacaggcaaagctcaggcagctggaggccctgctgagctccctgcccccaccccaaagccagaaggaggcccaagttgcagcccgggtttggagggagtttgagatgaagcgaatggatcctggcttcctggacaagcaggctcgctgccactacctgaagggtaaactgaggcatctcaagactcagatccagaaattcgatgaccaaggagacagcgagggctccgtgtacttctaagtgcccctgcagatgggcagagggatgcatggggatgcaggtcccttgcatttcttggtatctctcagcttttcctcttgcagctccccctaccaggggtcgctttctcctggattgcaaatgcctcttcagtttggactcagctctgacagcccctcctccaggaaggccttccaggacttcctcctctgggtcctctagctctgaccctacagggactccagatctcaacctgttccctggaagtagggcctgctctccatcccagtgaaataaacatgtattagacaccta

SEQ ID NO: 161754 - DNA, 878 bp, Homo sapiens
  Payload ID: 11576
  Gene Symbol: OCEL1
  Gene Name: occludin/ELL domain containing 1
  ENST ID: ENST00000600232
  CDS Start-End: 1-733
caacccggacggaagtgcctctccgacagcagatccaggctcggagctccagacgctgggacaggccgcccgcagaccacccccgccgcgcgcgggacacgacgccccccgcaggacccgcccatcagcccggaaacccctgagctgcttctcccggaggccgatgcccacccgggagcccccaaagactcgcggctcccgggggcacctgcatactcacccgcctgggcctgggcccccgctgcagggactggcgccccgaggcctcaaaaccagcgccccccgccctccgtgccagccccagccgggaccccacaaggcaaagaccaagaagattgtgtttgaggatgagttgctctcccaggccctcctgggcgccaagaagcctattggagccatccctaaggggcataagcctaggccccacccagtgcccgactatgagcttaagtacccgccagtgagcagtgagagggaacggagccgctatgtcgcagtgttccaggaccagtacggagagttcttggagctccagcacgaggtggggtgtgcacaggcaaagctcaggcagctggaggccctgctgagctccctgcccccaccccaaagccagaaggaggcccaagttgcagcccgggtttggagggagtttgagatgaagcgaatgctccccctaccaggggtcgctttctcctggattgcaaatgcctcttcagtttggactcagctctgacagcccctcctccaggaaggccttccaggacttcctcctctgggtcctctagctctgaccctacagggactccagatctcaacctgttccctggaagtagggcctgctctccatcccagtgaaataaacatgtattagacaccta

SEQ ID NO: 161755 - DNA, 348 bp, Homo sapiens
  Payload ID: 11576
  Gene Symbol: OCEL1
  Gene Name: occludin/ELL domain containing 1
  ENST ID: ENST00000600826
  CDS Start-End: 1-207
aaggaggcccaagttgcagcccgggtttggagggagtttgagatgaagcgaatggatcctggcttcctggacaagcagagggatgcatggggatgcaggtcccttgcatttcttggtatctctcagcttttcctcttgcagctccccctaccaggggtcgctttctcctggattgcaaatgcctcttcagtttggactcagctctgacagcccctcctccaggaaggccttccaggacttcctcctctgggtcctctagctctgaccctacagggactccagatctcaacctgttccctggaagtagggcctgctctccatcccagtgaaataaacatgtattagaca

SEQ ID NO: 161756 - DNA, 752 bp, Homo sapiens
  Payload ID: 11576
  Gene Symbol: OCEL1
  Gene Name: occludin/ELL domain containing 1
  ENST ID: ENST00000598172
  CDS Start-End: 1-254
gcatactcacccgcctgggcctgggcccccgctgcagggactggcgccccgaggcctcaaaaccagcgccccccgccctccgtgccagccccagccgggaccccacaaggcaaagaccaagaagattgtgtttgaggatgagttgctctcccaggccctcctgggcgccaagaagcctattggagccatccctaaggggcataagcctaggccccacccagtgcccgactatgagcttaagtacccgccagtgagcagtgagagggaacggagccgctatgtcgcagtgttccaggaccagtacggagagttcttggagctccagcacgaggtggggtgtgcacaggcaaagctcaggcagctggaggccctgctgagctccctgcccccaccccaaagccagaaggaggcccaagttgcagcccgggtttggagggagtttgagatgaagcgaatgaatctcgctctgtcacccaggcgggagtgcagtggtatgatctcagctcactgcaacctcagcgtcccgggttcaagcggttctcctgcctcagctgggatcacaggcgcccaccaccgtgcctggcaaatttttgtatttgtagtagagatggggtttcaccatgttggccaggctggtctcgaactcctgacctcaagtgatccgcccacctcggcctcccagactgctgggattacaggcatgagccaccttgcccggctcacccggtcgcctgtgcccagtttcaaggaga

SEQ ID NO: 161757 - DNA, 1044 bp, Homo sapiens
  Payload ID: 11576
  Gene Symbol: OCEL1
  Gene Name: occludin/ELL domain containing 1
  ENST ID: ENST00000597836
  CDS Start-End: 178-804
gctcttcggccgagctgcccgcgcgtcctttctccgtgcgcgtcgtcaggcgtgtcctctccgcgtgtccacccacaggccgcccgcagaccacccccgccgcgcgcgggacacgacgccccccgcaggacccgcccatcagcccggaaacccctgagctgcttctcccggaggccgatgcccacccgggagcccccaaagactcgcggctcccgggggcacctgcatactcacccgcctgggcctgggcccccgctgcagggactggcgccccgaggcctcaaaaccagcgccccccgccctccgtgccagccccagccgggaccccacaaggcaaagaccaagaagattgtgtttgaggatgagttgctctcccaggccctcctgggcgccaagaagcctattggagccatccctaaggggcataagcctaggccccacccagtgcccgactatgagcttaagtacccgccagtgagcagtgagagggaacggagccgctatgtcgcagtgttccaggaccagtacggagagttcttggagctccagcacgaggtggggtgtgcacaggcaaagctcaggcagctggaggccctgctgagctccctgcccccaccccaaagccagaaggaggcccaagttgcagcccgggtttggagggagtttgagatgaagcgaatggatcctggcttcctggacaagcaggctcgctgccactacctgaagggtaaactgaggcatctcaagactcagatccagaaattcgatgaccaaggagacagcgagggctccgtgtacttctaagtgcccctgcagatgggcagagggatgcatggggatgcaggtcccttgcatttcttggtatctctcagcttttcctcttgcagctccccctaccaggggtcgctttctcctggattgcaaatgcctcttcagtttggactcagctctgacagcccctcctccaggaaggccttccaggacttcctcctctgggtcctctagctctgaccctacagggactccagatctcaacctgttccc

SEQ ID NO: 161758 - DNA, 376 bp, Homo sapiens
  Payload ID: 11576
  Gene Symbol: OCEL1
  Gene Name: occludin/ELL domain containing 1
  ENST ID: ENST00000595573
  CDS Start-End: 1-287
agaaggaggcccaagttgcagcccgggtttggagggagtttgagatgaagcgaatggatcctggcttcctggacaagcaggctcgctgccactacctgaagggtaaactgaggcatctcaagactcagatccagaaattcgatgaccaaggagacagcgagggctccgtctccccctaccaggggtcgctttctcctggattgcaaatgcctcttcagtttggactcagctctgacagcccctcctccaggaaggccttccaggacttcctcctctgggtcctctagctctgaccctacagggactccagatctcaacctgttccctggaagtagggcctgctctccatcccagtgaaataaacatgtattagaca

SEQ ID NO: 161759 - DNA, 942 bp, Homo sapiens
  Payload ID: 11576
  Gene Symbol: OCEL1
  Gene Name: occludin/ELL domain containing 1
  ENST ID: ENST00000601529
  CDS Start-End: 24-521
cagtcgggtccatcctgcagtaaatgcacaacccggacggaagtgcctctccgacagcagatccaggctcggagctccagacgctgggacaggccgcccgcagaccacccccgccgcgcgcgggacacgacgccccccgcaggacccgcccatcagcccggaaacccctgagctgcttctcccggaggccgatgcccacccgggagcccccaaagactcgcggctcccgggggcacctgcatactcacccgcctgggcctgggcccccgctgcagggactggcgccccgaggcctcaaaaccagcgccccccgccctccgtgccagccccagccgggaccccacaaggcaaagaccaagaagattgtgtttgaggatgagttgctctcccaggccctcctgggcgccaagaagcctattggagccatccctaaggggcataagcctaggccccacccagtgcccgactatgagctaaggaggcccaagttgcagcccgggtttggagggagtttgagatgaagcgaatggatcctggcttcctggacaagcaggctcgctgccactacctgaagggtaaactgaggcatctcaagactcagatccagaaattcgatgaccaaggagacagcgagggctccgtgtacttctaagtgcccctgcagatgggcagagggatgcatggggatgcaggtcccttgcatttcttggtatctctcagcttttcctcttgcagctccccctaccaggggtcgctttctcctggattgcaaatgcctcttcagtttggactcagctctgacagcccctcctccaggaaggccttccaggacttcctcctctgggtcctctagctctgaccctacagggactccagatctcaacctgttccctggaagtagggcctgctctccatcccagtgaaataaacatgtattagaca

SEQ ID NO: 161760 - DNA, 1341 bp, Homo sapiens
  Payload ID: 11576
  Gene Symbol: OCEL1
  Gene Name: occludin/ELL domain containing 1
  ENST ID: ENST00000598068
  CDS Start-End: 1-739
caggacccgcccatcagcccggaaacccctgagctgcttctcccggaggccgatgcccacccgggagcccccaaagactcgcggctcccgggggcacctgcatactcacccgcctgggcctgggcccccgctgcagggactggcgccccgaggcctcaaaaccagcgccccccgccctccgtgccagccccagccgggaccccacaaggcaaagaccaagaagattgtgtttgaggatgagttgctctcccaggccctcctgggcgccaagaagcctattggagccatccctaaggggcataagcctaggccccacccagtgcccgactatgagcttaagtacccgccagtgagcagtgagagggaacggagccgctatgtcgcagtgttccaggaccagtacggagagttcttggagctccagcacgaggtggggtgtgcacaggcaaagctcaggcagctggaggccctgctgagctccctgcccccaccccaaagccagaaggaggcccaagttgcagcccgggtttggagggagtttgagatgaagcgaatggcgggagtgcagtggtatgatctcagctcactgcaacctcagcgtcccgggttcaagcggttctcctgcctcagctgggatcacaggcgcccaccaccgtgcctggcaaatttttgtatttgtagtagagatggggtttcaccatgttggccaggctggtctcgaactcctgacctcaagtgatccgcccacctcggcctcccagactgctgggattacaggcatgagccaccttgcccggctcacccggtcgcctgtgcccagtttcaaggagagaaaattgaggctcggagaatgaaaggcagagagttaagcagcttgaaggccacagggcagactgctgcaaagacttccgggtctcgccctgcctaggatcctggcttcctggacaagcaggctcgctgccactacctgaagggtaaactgaggcatctcaagactcagatccagaaattcgatgaccaaggagacagcgagggctccgtgtacttctaagtgcccctgcagatgggcagagggatgcatggggatgcaggtcccttgcatttcttggtatctctcagcttttcctcttgcagctccccctaccaggggtcgctttctcctggattgcaaatgcctcttcagtttggactcagctctgacagcccctcctccaggaaggccttccaggacttcctcctctgggtcctctagctctgaccctacagggactccagatctcaacctgttccctggaagtagggcctgctctccatcccagtgaaataaacatgtattagaca

SEQ ID NO: 161761 - DNA, 421 bp, Homo sapiens
  Payload ID: 11576
  Gene Symbol: OCEL1
  Gene Name: occludin/ELL domain containing 1
  ENST ID: ENST00000599286
  CDS Start-End: 1-159
cgtgccagccccagccgggaccccacaaggcaaagaccaagaagattgtgtttgaggatgagttgctctcccaggccctcctgggcgccaagaagcctattggagccatccctaaggggcataagcctaggccccacccagtgcccgactatgagctaaggaggcccaagttgcagcccgggtttggagggagtttgagatgaagcgaatgctccccctaccaggggtcgctttctcctggattgcaaatgcctcttcagtttggactcagctctgacagcccctcctccaggaaggccttccaggacttcctcctctgggtcctctagctctgaccctacagggactccagatctcaacctgttccctggaagtagggcctgctctccatcccagtgaaataaacatgtattagacacct

SEQ ID NO: 161762 - DNA, 1414 bp, Homo sapiens
  Payload ID: 11577
  Gene Symbol: OCIAD1
  Gene Name: OCIA domain containing 1
  Uniprot ID: Q9NX40
  ENST ID: ENST00000264312
  CDS Start-End: 191-928
tgcctccgggtcgcggtcattttgagcccctgtctggatgacttcttgcggctgttctacccctccccctccccgcggtaccttgcacttttctccctccctgccccctctcgagtccaccctccgggccttctgcccctgatcgcttggttttccttgcagtcgcctgctgctgtcgtcgggaggaaagatgaatgggagggctgattttcgagagccgaatgcagaggttccaagaccaattccccacatagggcctgattacattccaacagaggaagaaaggagagtcttcgcagaatgcaatgatgaaagcttctggttcagatctgtgcctttggctgcaacaagtatgttgattactcaaggattaattagtaaaggaatactttcaagtcatcccaaatatggttccatccctaaacttatacttgcttgtatcatgggatactttgctggaaaactttcttatgtgaaaacttgccaagagaaattcaagaaacttgaaaattccccccttggagaagctttacgatcaggacaagcacgacgatcttcaccacctgggcactattatcaaaagtcaaaatatgactcaagtgtgagtggtcaatcatcttttgtgacatccccagcagcagacaacatagaaatgcttcctcattatgagccaattccattcagttcttctatgaatgaatctgctcccactggtattactgatcatattgtccaaggacctgatcccaaccttgaagaaagtcctaaaagaaaaaatattacatatgaggaattaaggaataagaacagagagtcatatgaagtatctttaacacaaaagactgacccctcagtcaggcctatgcatgaaagagtgccaaaaaaagaagtcaaagtaaacaagtatggagatacttgggatgagtgaaaaattacatcattggacatgaaggagtttcaacatccagcttcatctaggtggtcatgattacctgcatgctttgagctcagcagcagtcttcataaacacatttaaaacaagatcctgggtttttgtggtttgacttctatggtgttttaaaaaaacacagatttttagtgttaatattgtgtaaatgtactcaccttagggattcatttgaatgatggtattataccatgattgtatacagtttgtgaaattgttgcaagggcaaagataactcttaaaaaaccgtcgagattacaatgctctagaatcagcatataagaaaataaatgatatctgcatgttgaattggggtggatggggggagcaagcataatttttaagtgtgaagctttgcatcaagaaattattaaaaagctttttttctccagtattttctgtattatcttaatgtttatggcaaataaaatgtaaaggaacatgcaa

SEQ ID NO: 161763 - DNA, 1594 bp, Homo sapiens
  Payload ID: 11577
  Gene Symbol: OCIAD1
  Gene Name: OCIA domain containing 1
  Uniprot ID: Q9NX40
  ENST ID: ENST00000381473
  CDS Start-End: 419-1156
ttttgagcccctgtctggatgacttcttgcggctgttctacccctccccctccccgcggtaccttgcacttttctccctccctgccccctctcgagtccaccctccgggccttctgcccctgatcgcttggttttccttgcagtcgcctgctgctgtcgtcgggaggtgggtgaggtgacgcaaacagccccgttgttgccctccgcgtatcccctcaccacctttgcggccatccacgactttcgcaccttccgccattttcctgcctgtgagggtggacagatcgcgctcgggtctcggcctcctgagtgccggtgactgcgggaggcgacggagtgcttctgggggtgtgagctggggaagttcgtggtcacggatgcgtgtggggttgctgctcagtctgtaacggcaggaaagatgaatgggagggctgattttcgagagccgaatgcagaggttccaagaccaattccccacatagggcctgattacattccaacagaggaagaaaggagagtcttcgcagaatgcaatgatgaaagcttctggttcagatctgtgcctttggctgcaacaagtatgttgattactcaaggattaattagtaaaggaatactttcaagtcatcccaaatatggttccatccctaaacttatacttgcttgtatcatgggatactttgctggaaaactttcttatgtgaaaacttgccaagagaaattcaagaaacttgaaaattccccccttggagaagctttacgatcaggacaagcacgacgatcttcaccacctgggcactattatcaaaagtcaaaatatgactcaagtgtgagtggtcaatcatcttttgtgacatccccagcagcagacaacatagaaatgcttcctcattatgagccaattccattcagttcttctatgaatgaatctgctcccactggtattactgatcatattgtccaaggacctgatcccaaccttgaagaaagtcctaaaagaaaaaatattacatatgaggaattaaggaataagaacagagagtcatatgaagtatctttaacacaaaagactgacccctcagtcaggcctatgcatgaaagagtgccaaaaaaagaagtcaaagtaaacaagtatggagatacttgggatgagtgaaaaattacatcattggacatgaaggagtttcaacatccagcttcatctaggtggtcatgattacctgcatgctttgagctcagcagcagtcttcataaacacatttaaaacaagatcctgggtttttgtggtttgacttctatggtgttttaaaaaaacacagatttttagtgttaatattgtgtaaatgtactcaccttagggattcatttgaatgatggtattataccatgattgtatacagtttgtgaaattgttgcaagggcaaagataactcttaaaaaaccgtcgagattacaatgctctagaatcagcatataagaaaataaatgatatctgcatgttgaattggggtggatggggggagcaagcataatttttaagtgtgaagctttgcatcaagaaattattaaaaagctttttttctccagtattttc

SEQ ID NO: 161764 - DNA, 1306 bp, Homo sapiens
  Payload ID: 11577
  Gene Symbol: OCIAD1
  Gene Name: OCIA domain containing 1
  Uniprot ID: Q9NX40
  ENST ID: ENST00000396448
  CDS Start-End: 191-754
tgcctccgggtcgcggtcattttgagcccctgtctggatgacttcttgcggctgttctacccctccccctccccgcggtaccttgcacttttctccctccctgccccctctcgagtccaccctccgggccttctgcccctgatcgcttggttttccttgcagtcgcctgctgctgtcgtcgggaggaaagatgaatgggagggctgattttcgagagccgaatgcagaggttccaagaccaattccccacatagggcctgattacattccaacagaggaagaaaggagagtcttcgcagaatgcaatgatgaaagcttctggttcagatctgtgcctttggctgcaacaagtatgttgattactcaaggattaattagtaaaggaatactttcaagtcatcccaaatatggttccatccctaaacttatacttgcttgtatcatgggatactttgctggaaaactttcttatgtgaaaacttgccaagagaaattcaagaaacttgaaaattccccccttggagaagctttacgatcaggacaagcacgacgatcttcaccacctgggcactattatcaaaagtcaaaatatgactcaagtgtgagtggtcaatcatcttttgtgacatccccagcagcagacaacatagaaatgcttcctcattatgagccaattccattcagttcttctatgaatgaatctgctcccactggtattactgatcatattgtccaaggtagaaacttctcttgaaatgaatttcaacattttatggtccaactcaaagtaaacaagtatggagatacttgggatgagtgaaaaattacatcattggacatgaaggagtttcaacatccagcttcatctaggtggtcatgattacctgcatgctttgagctcagcagcagtcttcataaacacatttaaaacaagatcctgggtttttgtggtttgacttctatggtgttttaaaaaaacacagatttttagtgttaatattgtgtaaatgtactcaccttagggattcatttgaatgatggtattataccatgattgtatacagtttgtgaaattgttgcaagggcaaagataactcttaaaaaaccgtcgagattacaatgctctagaatcagcatataagaaaataaatgatatctgcatgttgaattggggtggatggggggagcaagcataatttttaagtgtgaagctttgcatcaagaaattattaaaaagctttttttctccagtattttctgtattatcttaatgtttatggcaaataaaatgtaaaggaacatgcaa

SEQ ID NO: 161765 - DNA, 1756 bp, Homo sapiens
  Payload ID: 11577
  Gene Symbol: OCIAD1
  Gene Name: OCIA domain containing 1
  Uniprot ID: Q9NX40
  ENST ID: ENST00000444354
  CDS Start-End: 148-732
tcttgcggctgttctacccctccccctccccgcggtaccttgcacttttctccctccctgccccctctcgagtccaccctccgggccttctgcccctgatcgcttggttttccttgcagtcgcctgctgctgtcgtcgggaggaaagatgaatgggagggctgattttcgagagccgaatgcagaggttccaagaccaattccccacatagggcctgattacattccaacagaggaagaaaggagagtcttcgcagaatgcaatgatgaaagcttctggttcagatctgtgcctttggctgcaacaagtatgttgattactcaaggattaattagtaaaggaatactttcaagtcatcccaaatatggttccatccctaaacttatacttgcttgtatcatgggatactttgctggaaaactttcttatgtgaaaacttgccaagagaaattcaagaaacttgaaaattccccccttggagaagctttacgatcaggacaagcacgacgatcttcaccacctgggcactattatcaaaagtcaaaatatgactcaagtgtgagtggtcaatcatcttttgtgacatccccagcagcagacaacatagaaatgcttcctcattatgagccaattccattcagttcttctatgaatgaatctgctcccactggtattactgatcatattgtccaagtcaaagtaaacaagtatggagatacttgggatgagtgaaaaattacatcattggacatgaaggagtttcaacatccagcttcatctaggtggtcatgattacctgcatgctttgagctcagcagcagtcttcataaacacatttaaaacaagatcctgggtttttgtggtttgacttctatggtgttttaaaaaaacacagatttttagtgttaatattgtgtaaatgtactcaccttagggattcatttgaatgatggtattataccatgattgtatacagtttgtgaaattgttgcaagggcaaagataactcttaaaaaaccgtcgagattacaatgctctagaatcagcatataagaaaataaatgatatctgcatgttgaattggggtggatggggggagcaagcataatttttaagtgtgaagctttgcatcaagaaattattaaaaagctttttttctccagtattttctgtattatcttaatgtttatggcaaataaaatgtaaaggaacatgcaacagccctcatcttccttgattttatggttttattgtttgtaatttattgatttatttttaagctagttataatcatgtaggtataggaaataaagtcatctataatatttctataatatggctataatatggctataaatctataatatggctggaggcagtgggcagtggttcatgcctgtaatcccagcactttgggaggccgaagtgggaggattgcatgagtccaggagtttgagaccagcctgggcaacaaagcgagaccctgtctttacaaaaaaataaaaattagctggcgatggtgtcgtgtgcctgtagtcctagttacttaagaggctgagttgggaggatcagttgaacccagtggttctgggttgcagtgagctgtggtcacaccactgaactccagcctgtgcgactgagtgagaccctgtgtctaaaaaaataaaaatataatgaatgtgatttatgtagataaattgataatatagtaaataggtaaatgccttaaaaagcatttttaaagaatttgtaaatt

SEQ ID NO: 161766 - DNA, 1915 bp, Homo sapiens
  Payload ID: 11577
  Gene Symbol: OCIAD1
  Gene Name: OCIA domain containing 1
  Uniprot ID: Q9NX40
  ENST ID: ENST00000425583
  CDS Start-End: 276-860
tcgcctgctgctgtcgtcgggaggtgggtgaggtgacgcaaacagccccgttgttgccctccgcgtatcccctcaccacctttgcggccatccacgactttcgcaccttccgccattttcctgcctgtgagggtggacagatcgcgctcgggtctcggcctcctgagtgccggtgactgcgggaggcgacggagtgcttctgggggtgtgagctggggaagttcgtggtcacggatgcgtgtggggttgctgctcagtctgtaacggcaggaaagatgaatgggagggctgattttcgagagccgaatgcagaggttccaagaccaattccccacatagggcctgattacattccaacagaggaagaaaggagagtcttcgcagaatgcaatgatgaaagcttctggttcagatctgtgcctttggctgcaacaagtatgttgattactcaaggattaattagtaaaggaatactttcaagtcatcccaaatatggttccatccctaaacttatacttgcttgtatcatgggatactttgctggaaaactttcttatgtgaaaacttgccaagagaaattcaagaaacttgaaaattccccccttggagaagctttacgatcaggacaagcacgacgatcttcaccacctgggcactattatcaaaagtcaaaatatgactcaagtgtgagtggtcaatcatcttttgtgacatccccagcagcagacaacatagaaatgcttcctcattatgagccaattccattcagttcttctatgaatgaatctgctcccactggtattactgatcatattgtccaagtcaaagtaaacaagtatggagatacttgggatgagtgaaaaattacatcattggacatgaaggagtttcaacatccagcttcatctaggtggtcatgattacctgcatgctttgagctcagcagcagtcttcataaacacatttaaaacaagatcctgggtttttgtggtttgacttctatggtgttttaaaaaaacacagatttttagtgttaatattgtgtaaatgtactcaccttagggattcatttgaatgatggtattataccatgattgtatacagtttgtgaaattgttgcaagggcaaagataactcttaaaaaaccgtcgagattacaatgctctagaatcagcatataagaaaataaatgatatctgcatgttgaattggggtggatggggggagcaagcataatttttaagtgtgaagctttgcatcaagaaattattaaaaagctttttttctccagtattttctgtattatcttaatgtttatggcaaataaaatgtaaaggaacatgcaacagccctcatcttccttgattttatggttttattgtttgtaatttattgatttatttttaagctagttataatcatgtaggtataggaaataaagtcatctataatatttctataatatggctataatatggctataaatctataatatggctggaggcagtgggcagtggttcatgcctgtaatcccagcactttgggaggccgaagtgggaggattgcatgagtccaggagtttgagaccagcctgggcaacaaagcgagaccctgtctttacaaaaaaataaaaattagctggcgatggtgtcgtgtgcctgtagtcctagttacttaagaggctgagttgggaggatcagttgaacccagtggttctgggttgcagtgagctgtggtcacaccactgaactccagcctgtgcgactgagtgagaccctgtgtctaaaaaaataaaaatataatgaatgtgatttatgtagataaattgataatatagtaaataggtaaatgccttaaaaagcatttttaaagaatttgtaaattctaaaacaataaaaatttggtatacatcaca

SEQ ID NO: 161767 - DNA, 495 bp, Homo sapiens
  Payload ID: 11577
  Gene Symbol: OCIAD1
  Gene Name: OCIA domain containing 1
  ENST ID: ENST00000509246
  CDS Start-End: 137-495
ccgcggtaccttgcacttttctccctccctgccccctctcgagtccaccctccgggccttctgcccctgatcgcttggttttccttgcagtcgcctgctgctgtcgtcgggagctgtgcctttggctgcaacaagtatgttgattactcaaggattaattagtaaaggaatactttcaagtcatcccaaatatggttccatccctaaacttatacttgcttgtatcatgggatactttgctggaaaactttcttatgtgaaaacttgccaagagaaattcaagaaacttgaaaattccccccttggagaagctttacgatcaggacaagcacgacgatcttcaccacctgggcactattatcaaaagtcaaaatatgactcaagtgtgagtggtcaatcatcttttgtgacatccccagcagcagacaacatagaaatgcttcctcattatgagccaattccattcagttcttctatgaatgaatctgctcccac

SEQ ID NO: 161768 - DNA, 582 bp, Homo sapiens
  Payload ID: 11577
  Gene Symbol: OCIAD1
  Gene Name: OCIA domain containing 1
  ENST ID: ENST00000507210
  CDS Start-End: 292-582
agtgcctccgggtcgcggtcattttgagcccctgtctggatgacttcttgcggctgttctacccctccccctccccgcgtcgcctgctgctgtcgtcgggaggtgggtgaggtgacgcaaacagccccgttgttgccctccgcgtatcccctcaccacctttgcggccatccacgactttcgcaccttccgccattttcctgcctgtgagggtggacagatcgcgctcgggtctcggcctcctgagtgccggtgactgcgggaggcgacggagtgcttctgggggtgaaagatgaatgggagggctgattttcgagagccgaatgcagaggttccaagaccaattccccacatagggcctgattacattccaacagaggaagaaaggagagtcttcgcagaatgcaatgatgaaagcttctggttcagatctgtgcctttggctgcaacaagtatgttgattactcaaggattaattagtaaaggaatactttcaagtcatcccaaatatggttccatccctaaacttatacttgcttgtatcatgggatactttgctggaaaactttcttatgtgaaaact

SEQ ID NO: 161769 - DNA, 577 bp, Homo sapiens
  Payload ID: 11577
  Gene Symbol: OCIAD1
  Gene Name: OCIA domain containing 1
  ENST ID: ENST00000513641
  CDS Start-End: 280-420
gcagtcgcctgctgctgtcgtcgggaggtgggtgaggtgacgcaaacagccccgttgttgccctccgcgtatcccctcaccacctttgcggccatccacgactttcgcaccttccgccattttcctgcctgtgagggtggacagatcgcgctcgggtctcggcctcctgagtgccggtgactgcgggaggcgacggagtgcttctgggggtgtgagctggggaagttcgtggtcacggatgcgtgtggggttgctgctcagtctgtaacggcaggaaagatgaatgggagggctgattttcgagagccgaatgcagaggttccaagaccaattccccacatagggcctgattacattccaacagaggaagaaaggagagtcttcgcagaatgcaatgatgaaagcttctggttcagatagatggggtttcaccgtgttaaccaggatggtctccatctcctgaccttgtgatccacctgcctcggcctcccaaagtgctgggattacagacctgtgcctttggctgcaacaagtatgttgattactcaaggattaattagtaaaggaatactttcaa

SEQ ID NO: 161770 - DNA, 441 bp, Homo sapiens
  Payload ID: 11577
  Gene Symbol: OCIAD1
  Gene Name: OCIA domain containing 1
  ENST ID: ENST00000511662
  CDS Start-End: 355-441
agtgcctccgggtcgcggtcattttgagcccctgtctggatgacttcttgcggctgttctacccctccccctccccgcgtcgcctgctgctgtcgtcgggaggtgggtgaggtgacgcaaacagccccgttgttgccctccgcgtatcccctcaccacctttgcggccatccacgactttcgcaccttccgccattttcctgcctgtgagggtggacagatcgcgctcgggtctcggcctcctgagtgccggtgactgcgggaggcgacggagtgcttctgggggtgtgagctggggaagttcgtggtcacggatgcgtgtggggttgctgctcagtctgtaacggcaggaaagatgaatgggagggctgattttcgagagccgaatgcagaggttccaagaccaattccccacatagggcctgattacattccaacagag

SEQ ID NO: 161771 - DNA, 538 bp, Homo sapiens
  Payload ID: 11577
  Gene Symbol: OCIAD1
  Gene Name: OCIA domain containing 1
  ENST ID: ENST00000509664
  CDS Start-End: 320-538
gctggctctcagacccgcagtgaggtctgacgtcatttcctgcctcgcctgctgctgtcgtcgggaggtgggtgaggtgacgcaaacagccccgttgttgccctccgcgtatcccctcaccacctttgcggccatccacgactttcgcaccttccgccattttcctgcctgtgagggtggacagatcgcgctcgggtctcggcctcctgagtgccggtgactgcgggaggcgacggagtgcttctgggggtgtgagctggggaagttcgtggtcacggatgcgtgtggggttgctgctcagtctgtaacggcaggaaagatgaatgggagggctgattttcgagagccgaatgcagaggttccaagaccaattccccacatagggcctgattacattccaacagaggaagaaaggagagtcttcgcagaatgcaatgatgaaagcttctggttcagatctgtgcctttggctgcaacaagtatgttgattactcaaggattaattagtaaaggaatactttcaagtcatcccaaatat

SEQ ID NO: 161772 - DNA, 1423 bp, Homo sapiens
  Payload ID: 11577
  Gene Symbol: OCIAD1
  Gene Name: OCIA domain containing 1
  Uniprot ID: Q9NX40
  ENST ID: ENST00000508293
  CDS Start-End: 232-969
ctttgcggccatccacgactttcgcaccttccgccattttcctgcctgtgagggtggacagatcgcgctcgggtctcggcctcctgagtgccggtgactgcgggaggcgacggagtgcttctgggggtgtgagctggggaagttcgtggtcacggatgcgtgtggggttgctgctcagtctgtaacggcaggtgggagacggacactgggtggaggatggagtgcggaaagatgaatgggagggctgattttcgagagccgaatgcagaggttccaagaccaattccccacatagggcctgattacattccaacagaggaagaaaggagagtcttcgcagaatgcaatgatgaaagcttctggttcagatctgtgcctttggctgcaacaagtatgttgattactcaaggattaattagtaaaggaatactttcaagtcatcccaaatatggttccatccctaaacttatacttgcttgtatcatgggatactttgctggaaaactttcttatgtgaaaacttgccaagagaaattcaagaaacttgaaaattccccccttggagaagctttacgatcaggacaagcacgacgatcttcaccacctgggcactattatcaaaagtcaaaatatgactcaagtgtgagtggtcaatcatcttttgtgacatccccagcagcagacaacatagaaatgcttcctcattatgagccaattccattcagttcttctatgaatgaatctgctcccactggtattactgatcatattgtccaaggacctgatcccaaccttgaagaaagtcctaaaagaaaaaatattacatatgaggaattaaggaataagaacagagagtcatatgaagtatctttaacacaaaagactgacccctcagtcaggcctatgcatgaaagagtgccaaaaaaagaagtcaaagtaaacaagtatggagatacttgggatgagtgaaaaattacatcattggacatgaaggagtttcaacatccagcttcatctaggtggtcatgattacctgcatgctttgagctcagcagcagtcttcataaacacatttaaaacaagatcctgggtttttgtggtttgacttctatggtgttttaaaaaaacacagatttttagtgttaatattgtgtaaatgtactcaccttagggattcatttgaatgatggtattataccatgattgtatacagtttgtgaaattgttgcaagggcaaagataactcttaaaaaaccgtcgagattacaatgctctagaatcagcatataagaaaataaatgatatctgcatgttgaattggggtggatggggggagcaagcataatttttaagtgtgaagctttgcatcaagaaattattaaaaagctttttttctccagtattttctgtattatcttaatgt

SEQ ID NO: 161773 - DNA, 555 bp, Homo sapiens
  Payload ID: 11577
  Gene Symbol: OCIAD1
  Gene Name: OCIA domain containing 1
  ENST ID: ENST00000505922
  CDS Start-End: 50-555
gctggctctcagacccgcagtgaggtctgacgtcatttcctgccgaaagatgaatgggagggctgattttcgagagccgaatgcagaggttccaagaccaattccccctgtgcctttggctgcaacaagtatgttgattactcaaggattaattagtaaaggaatactttcaagtcatcccaaatatggttccatccctaaacttatacttgcttgtatcatgggatactttgctggaaaactttcttatgtgaaaacttgccaagagaaattcaagaaacttgaaaattccccccttggagaagctttacgatcaggacaagcacgacgatcttcaccacctgggcactattatcaaaagtcaaaatatgactcaagtgtgagtggtcaatcatcttttgtgacatccccagcagcagacaacatagaaatgcttcctcattatgagccaattccattcagttcttctatgaatgaatctgctcccactggtattactgatcatattgtccaaggacctgatcccaaccttgaagaaagtcctaaaagaaaaaa

SEQ ID NO: 161774 - DNA, 552 bp, Homo sapiens
  Payload ID: 11577
  Gene Symbol: OCIAD1
  Gene Name: OCIA domain containing 1
  ENST ID: ENST00000504654
  CDS Start-End: 222-552
agatgaactgaggcctctgctagcaatcatgtcagtaagctgccttggaagtggatactgcagccccaagagagccttcagatgactgtaaccccagcctacctcttaatcacagcctggtgagaaaaaccgtagcctcagagagatcacggtaccctgccagaggttgtagaacttgttggaaacttggatcaagagggtgtgacaaataaccaggaaagatgaatgggagggctgattttcgagagccgaatgcagaggttccaagaccaattccccacatagggcctgattacattccaacagaggaagaaaggagagtcttcgcagaatgcaatgatgaaagcttctggttcagatctgtgcctttggctgcaacaagtatgttgattactcaaggattaattagtaaaggaatactttcaagtcatcccaaatatggttccatccctaaacttatacttgcttgtatcatgggatactttgctggaaaactttcttatgtgaaaacttgccaagagaaattcaagaaacttgaaaattccccccttg

SEQ ID NO: 161775 - DNA, 653 bp, Homo sapiens
  Payload ID: 11577
  Gene Symbol: OCIAD1
  Gene Name: OCIA domain containing 1
  ENST ID: ENST00000514981
  CDS Start-End: 276-611
tttcctgccgtaagtatacagtgcctccgggtcgcggtcattttgagcccctgtctggatgacttcttgcggctgttctacccctccccctccccgcgtcgcctgctgctgtcgtcgggaggtgggtgaggtgacgcaaacagccccgttgttgccctccgcgtatcccctcaccacctttgcggccatccacgactttcgcaccttccgccattttcctgcctgtgagggtggacagatcgcgctcgggtctcggcctcctgagtgccggaaagatgaatgggagggctgattttcgagagccgaatgcagaggttccaagaccaattccccacatagggcctgattacattccaacagaggaagaaaggagagtcttcgcagaatgcaatgatgaaagcttctggttcagatctgtgcctttggctgcaacaagtatgttgattactcaaggattaattagtaaaggaatactttcaagtcatcccaaatatggttccatccctaaacttatacttgcttgtatcatgggatactttgctggaaaactttcttatgtgaaaacttgccaagagaaattcaagaaacttgaaaattccccccttggagaagctttacgatcaggacaagcacgacgatcttcaccacctggg

SEQ ID NO: 161776 - DNA, 1288 bp, Homo sapiens
  Payload ID: 11577
  Gene Symbol: OCIAD1
  Gene Name: OCIA domain containing 1
  Uniprot ID: Q9NX40
  ENST ID: ENST00000513391
  CDS Start-End: 63-800
ttttcctgcctgtgagggtggacagatcgcgctcgggtctcggcctcctgagtgccggaaagatgaatgggagggctgattttcgagagccgaatgcagaggttccaagaccaattccccacatagggcctgattacattccaacagaggaagaaaggagagtcttcgcagaatgcaatgatgaaagcttctggttcagatctgtgcctttggctgcaacaagtatgttgattactcaaggattaattagtaaaggaatactttcaagtcatcccaaatatggttccatccctaaacttatacttgcttgtatcatgggatactttgctggaaaactttcttatgtgaaaacttgccaagagaaattcaagaaacttgaaaattccccccttggagaagctttacgatcaggacaagcacgacgatcttcaccacctgggcactattatcaaaagtcaaaatatgactcaagtgtgagtggtcaatcatcttttgtgacatccccagcagcagacaacatagaaatgcttcctcattatgagccaattccattcagttcttctatgaatgaatctgctcccactggtattactgatcatattgtccaaggacctgatcccaaccttgaagaaagtcctaaaagaaaaaatattacatatgaggaattaaggaataagaacagagagtcatatgaagtatctttaacacaaaagactgacccctcagtcaggcctatgcatgaaagagtgccaaaaaaagaagtcaaagtaaacaagtatggagatacttgggatgagtgaaaaattacatcattggacatgaaggagtttcaacatccagcttcatctaggtggtcatgattacctgcatgctttgagctcagcagcagtcttcataaacacatttaaaacaagatcctgggtttttgtggtttgacttctatggtgttttaaaaaaacacagatttttagtgttaatattgtgtaaatgtactcaccttagggattcatttgaatgatggtattataccatgattgtatacagtttgtgaaattgttgcaagggcaaagataactcttaaaaaaccgtcgagattacaatgctctagaatcagcatataagaaaataaatgatatctgcatgttgaattggggtggatggggggagcaagcataatttttaagtgtgaagctttgcatcaagaaattattaaaaagctttttttctccagtattttctgtattatcttaatgtttatggcaaataaaatgtaaaggaacatgcaaca

SEQ ID NO: 161777 - DNA, 1204 bp, Homo sapiens
  Payload ID: 11577
  Gene Symbol: OCIAD1
  Gene Name: OCIA domain containing 1
  ENST ID: ENST00000509122
  CDS Start-End: 61-717
attcctaggctgctggctctcagacccgcagtgaggtctgacgtcatttcctgccgaaagatgaatgggagggctgattttcgagagccgaatgcagaggttccaagaccaattccccctgtgcctttggctgcaacaagtatgttgattactcaaggattaattagtaaaggaatactttcaagtcatcccaaatatggttccatccctaaacttatacttgcttgtatcatgggatactttgctggaaaactttcttatgtgaaaacttgccaagagaaattcaagaaacttgaaaattccccccttggagaagctttacgatcaggacaagcacgacgatcttcaccacctgggcactattatcaaaagtcaaaatatgactcaagtgtgagtggtcaatcatcttttgtgacatccccagcagcagacaacatagaaatgcttcctcattatgagccaattccattcagttcttctatgaatgaatctgctcccactggtattactgatcatattgtccaaggacctgatcccaaccttgaagaaagtcctaaaagaaaaaatattacatatgaggaattaaggaataagaacagagagtcatatgaagtatctttaacacaaaagactgacccctcagtcaggcctatgcatgaaagagtgccaaaaaaagaagtcaaagtaaacaagtatggagatacttgggatgagtgaaaaattacatcattggacatgaaggagtttcaacatccagcttcatctaggtggtcatgattacctgcatgctttgagctcagcagcagtcttcataaacacatttaaaacaagatcctgggtttttgtggtttgacttctatggtgttttaaaaaaacacagatttttagtgttaatattgtgtaaatgtactcaccttagggattcatttgaatgatggtattataccatgattgtatacagtttgtgaaattgttgcaagggcaaagataactcttaaaaaaccgtcgagattacaatgctctagaatcagcatataagaaaataaatgatatctgcatgttgaattggggtggatggggggagcaagcataatttttaagtgtgaagctttgcatcaagaaattattaaaaagctttttttctccagtattttctgtattatcttaatgtttatggcaaataaaatgtaaaggaacatgcaac

SEQ ID NO: 161778 - DNA, 348 bp, Homo sapiens
  Payload ID: 11577
  Gene Symbol: OCIAD1
  Gene Name: OCIA domain containing 1
  ENST ID: ENST00000508996
  CDS Start-End: 108-348
agtgcctccgggtcgcggtcattttgagcccctgtctggatgacttcttgcggctgttctacccctccccctccccgcgtcgcctgctgctgtcgtcgggaggaaagatgaatgggagggctgattttcgagagccgaatgcagaggttccaagaccaattccccacatagggcctgattacattccaacagaggaagaaaggagagtcttcgcagaatgcaatgatgaaagcttctggttcagatctgtgcctttggctgcaacaagtatgttgattactcaaggattaattagtaaaggaatactttcaagtcatcccaaatatggttccatccctaaacttatac

SEQ ID NO: 161779 - DNA, 720 bp, Homo sapiens
  Payload ID: 11577
  Gene Symbol: OCIAD1
  Gene Name: OCIA domain containing 1
  ENST ID: ENST00000503016
  CDS Start-End: 183-720
ctctcgagtccaccctccgggccttctgcccctgatcgcttggttttccttgcagtcgcctgctgctgtcgtcgggagacatagggcctgattacattccaacagaggaagaaaggagagtcttcgcagaatgcaatgatgaaagcttctggttcagatctgtgcctttggctgcaacaagtatgttgattactcaaggattaattagtaaaggaatactttcaagtcatcccaaatatggttccatccctaaacttatacttgcttgtatcatgggatactttgctggaaaactttcttatgtgaaaacttgccaagagaaattcaagaaacttgaaaattccccccttggagaagctttacgatcaggacaagcacgacgatcttcaccacctgggcactattatcaaaagtcaaaatatgactcaagtgtgagtggtcaatcatcttttgtgacatccccagcagcagacaacatagaaatgcttcctcattatgagccaattccattcagttcttctatgaatgaatctgctcccactggtattactgatcatattgtccaaggacctgatcccaaccttgaagaaagtcctaaaagaaaaaatattacatatgaggaattaaggaataagaacagagagtcatatgaagtatctttaacacaaaagactgacccctcagtcaggcctatgcatgaaagagtgccaaaaaaagaag

SEQ ID NO: 161780 - DNA, 432 bp, Homo sapiens
  Payload ID: 11577
  Gene Symbol: OCIAD1
  Gene Name: OCIA domain containing 1
  ENST ID: ENST00000509963
  CDS Start-End: 142-432
gttctacccctccccctccccgcggtaccttgcacttttctccctccctgccccctctcgagtccaccctccgggccttctgcccctgatcgcttggttttccttgcagtcgcctgctgctgtcgtcgggaggtgggaaagatgaatgggagggctgattttcgagagccgaatgcagaggttccaagaccaattccccacatagggcctgattacattccaacagaggaagaaaggagagtcttcgcagaatgcaatgatgaaagcttctggttcagatctgtgcctttggctgcaacaagtatgttgattactcaaggattaattagtaaaggaatactttcaagtcatcccaaatatggttccatccctaaacttatacttgcttgtatcatgggatactttgctggaaaactttcttatgtgaaaact

SEQ ID NO: 161781 - DNA, 582 bp, Homo sapiens
  Payload ID: 11577
  Gene Symbol: OCIAD1
  Gene Name: OCIA domain containing 1
  ENST ID: ENST00000510824
  CDS Start-End: 274-582
gcagtcgcctgctgctgtcgtcgggaggaaagatgaatgggagggctgattttcgagagccgaatgcagaggttccaagaccaattccccgtaactatctattaagtatttataattagaagcacttcctatgtaaaggaattttcactgccttgagtaacagtggcagacatagggcctgattacattccaacagaggaagaaaggagagtcttcgcagaatgcaatgatgaaagcttctggttcagatctgtgcctttggctgcaacaagtatgttgattactcaaggattaattagtaaaggaatactttcaagtcatcccaaatatggttccatccctaaacttatacttgcttgtatcatgggatactttgctggaaaactttcttatgtgaaaacttgccaagagaaattcaagaaacttgaaaattccccccttggagaagctttacgatcaggacaagcacgacgatcttcaccacctgggcactattatcaaaagtcaaaatatgactcaagtgtgagtggtcaatcatcttttgtgacatccccagcagcagacaacatagaaatgcttcct

SEQ ID NO: 161782 - DNA, 594 bp, Homo sapiens
  Payload ID: 11577
  Gene Symbol: OCIAD1
  Gene Name: OCIA domain containing 1
  ENST ID: ENST00000512236
  CDS Start-End: 82-594
gcctccgggtcgcggtcattttgagcccctgtctggatgacttcttgcggctgttctacccctccccctccccgcggaaagatgaatgggagggctgattttcgagagccgaatgcagaggttccaagaccaattccccacatagggcctgattacattccaacagaggaagaaaggagagtcttcgcagaatgcaatgatgaaagcttctggttcagatctgtgcctttggctgcaacaagtatgttgattactcaaggattaattagtaaaggaatactttcaagtcatcccaaatatggttccatccctaaacttatacttgcttgtatcatgggatactttgctggaaaactttcttatgtgaaaacttgccaagagaaattcaagaaacttgaaaattccccccttggagaagctttacgatcaggacaagcacgacgatcttcaccacctgggcactattatcaaaagtcaaaatatgactcaagtgtgagtggtcaatcatcttttgtgacatccccagcagcagacaacatagaaatgcttcctcattatgagccaattccattcagttcttctatgaatgaatct

SEQ ID NO: 161783 - DNA, 563 bp, Homo sapiens
  Payload ID: 11577
  Gene Symbol: OCIAD1
  Gene Name: OCIA domain containing 1
  ENST ID: ENST00000509164
  CDS Start-End: 323-563
cattttgagcccctgtctggatgacttcttgcggctgttctacccctccccctccccgcggtaccttgcacttttctccctccctgccccctctcgagtccaccctccgggccttctgcccctgatcgcttggttttccttgcagtcgcctgctgctgtcgtcgggaggtgggtgaggtgacgcaaacagccccgttgttgccctccgcgtatcccctcaccacctttgcggccatccacgactttcgcaccttccgccattttcctgcctgtgagggtggacagatcgcgctcgggtctcggcctcctgagtgccggaaagatgaatgggagggctgattttcgagagccgaatgcagaggttccaagaccaattccccacatagggcctgattacattccaacagaggaagaaaggagagtcttcgcagaatgcaatgatgaaagcttctggttcagatctgtgcctttggctgcaacaagtatgttgattactcaaggattaattagtaaaggaatactttcaagtcatcccaaatatggttccatccctaaacttatac

SEQ ID NO: 161784 - DNA, 571 bp, Homo sapiens
  Payload ID: 11577
  Gene Symbol: OCIAD1
  Gene Name: OCIA domain containing 1
  ENST ID: ENST00000506801
  CDS Start-End: 121-543
ttttctccctccctgccccctctcgagtccaccctccgggccttctgcccctgatcgcttggttttccttgcagtcgcctgctgctgtcgtcgggagctgtgcctttggctgcaacaagtatgttgattactcaaggattaattagtaaaggaatactttcaagtcatcccaaatatggttccatccctaaacttatacttgcttgtatcatgggatactttgctggaaaactttcttatgtgaaaacttgccaagagaaattcaagaaacttgaaaattccccccttggagaagctttacgatcaggacaagcacgacgatcttcaccacctgggcactattatcaaaagtcaaaatatgactcaagtgtgagtggtcaatcatcttttgtgacatccccagcagcagacaacatagaaatgcttcctcattatgagccaattccattcagttcttctatgaatgaatctgctcccactggtattactgatcatattgtccaagtcaaagtaaacaagtatggagatacttgggatgagtgaaaaattacatcattggacatgaaggagt

SEQ ID NO: 161785 - DNA, 688 bp, Homo sapiens
  Payload ID: 11577
  Gene Symbol: OCIAD1
  Gene Name: OCIA domain containing 1
  ENST ID: ENST00000511102
  CDS Start-End: 172-688
ttttgagcccctgtctggatgacttcttgcggctgttctacccctccccctccccgcggtaccttgcacttttctccctccctgccccctctcgagtccaccctccgggccttctgcccctgatcgcttggttttccttgcagtcgcctgctgctgtcgtcgggaggaaagatgaatgggagggctgattttcgagagccgaatgcagaggttccaagaccaattccccacatagggcctgattacattccaacagaggaagaaaggagagtcttcgcagaatgcaatgatgaaagcttctggttcagatctgtgcctttggctgcaacaagtatgttgattactcaaggattaattagtaaaggaatactttcaagtcatcccaaatatggttccatccctaaacttatacttgcttgtatcatgggatactttgctggaaaactttcttatgtgaaaacttgccaagagaaattcaagaaacttgaaaattccccccttggagaagctttacgatcaggacaagcacgacgatcttcaccacctgggcactattatcaaaagtcaaaatatgactcaagtgtgagtggtcaatcatcttttgtgacatccccagcagcagacaacatagaaatgcttcctcattatgagccaattccattcagttcttctatgaatgaatctgctc

SEQ ID NO: 161786 - DNA, 636 bp, Homo sapiens
  Payload ID: 11578
  Gene Symbol: OCIAD2
  Gene Name: OCIA domain containing 2
  Uniprot ID: Q56VL3
  ENST ID: ENST00000273860
  CDS Start-End: 194-493
ggaaggaagccggggagacaggtggggtactcgggaagctggagcgggccggcggtgcagtcacgggggagcgaggcctgctgggcttggcaacgagggactcggcctcggaggcgacccagaccacacagacactgggtcaaggagtaagcagaggataaacaactggaaggagagcaagcacaaagtcatcatggcttcagcgtctgctcgtggaaaccaagataaagatgcccattttccaccaccaagcaagcagagcctgttgttttgtccaaaatcaaaactgcacatccacagagcagagatctcaaagattatgcgagaatgtcaggaagaaagtttctggaagagagctctgcctttttctcttgtaagcatgcttgtcacccagggactagtctaccaaggttatttggcagctaattctagatttggatcattgcccaaagttgcacgcactgcctccttacctgtgaggaatgcaaaataaagcatggattaagtgagaagggagactctcagccttcagcttcctaaattctgtgtctgtgactttcgaagttttttaaacctctgaatttgtacacatttaaaatttcaagtgtactttaaaataaaatacttctaatggaa

SEQ ID NO: 161787 - DNA, 611 bp, Homo sapiens
  Payload ID: 11578
  Gene Symbol: OCIAD2
  Gene Name: OCIA domain containing 2
  ENST ID: ENST00000381464
  CDS Start-End: 186-450
cgggaagctggagcgggccggcggtgcagtcacgggggagcgaggcctgctgggcttggcaacgagggactcggcctcggaggcgacccagaccacacagtgattctcttctaccttccttagacactgggtcaaggagtaagcagaggataaacaactggaaggagagcaagcacaaagtcatcatggcttcagcgtctgctcgtggaaaccaagataaagatgcccattttccaccaccaagcaagcagagcctgttgttttgtccaaaatcaaaactgcacatccacagagcagagatctcaaagattatgcgagaatgtcaggaagaaagtttctggaagagagctctgcctttttctcttgtaagcatgcttgtcacccagggactagtctaccaaggttatttggcagctaattctagatttggatcattgcccaaagttgcacgcactgcctccttacctgtgaggaatgcaaaataaagcatggattaagtgagaagggagactctcagccttcagcttcctaaattctgtgtctgtgactttcgaagttttttaaacctctgaatttgtacacatttaaaatttcaagtgtactttaaaata

SEQ ID NO: 161788 - DNA, 1163 bp, Homo sapiens
  Payload ID: 11578
  Gene Symbol: OCIAD2
  Gene Name: OCIA domain containing 2
  Uniprot ID: Q56VL3
  ENST ID: ENST00000508632
  CDS Start-End: 234-698
aggcgagggggcggagcaagagaagaaaacacaaagggccggaaggaagccggggagacaggtggggtactcgggaagctggagcgggccggcggtgcagtcacgggggagcgaggcctgctgggcttggcaacgagggactcggcctcggaggcgacccagaccacacagacactgggtcaaggagtaagcagaggataaacaactggaaggagagcaagcacaaagtcatcatggcttcagcgtctgctcgtggaaaccaagataaagatgcccattttccaccaccaagcaagcagagcctgttgttttgtccaaaatcaaaactgcacatccacagagcagagatctcaaagattatgcgagaatgtcaggaagaaagtttctggaagagagctctgcctttttctcttgtaagcatgcttgtcacccagggactagtctaccaaggttatttggcagctaattctagatttggatcattgcccaaagttgcacttgctggtctcttgggatttggccttggaaaggtatcatacataggagtatgccagagtaaattccatttttttgaagatcagctccgtggggctggttttggtccacagcataacaggcactgcctccttacctgtgaggaatgcaaaataaagcatggattaagtgagaagggagactctcagccttcagcttcctaaattctgtgtctgtgactttcgaagttttttaaacctctgaatttgtacacatttaaaatttcaagtgtactttaaaataaaatacttctaatggaacaaaaacattgtgtctgtcactcactgaaatgtattccgtggaaggctttcaagtgaactaagcgttacatgtttttctgctctttaagaacatgtcggggcatggcgcagtggctcatgcctgtaatcccagtactttgggaggccgaggcaggcagatcatttgaggtcaggagttcatgaccagcttggccaacatggtgaaaccccatctctgctaaaaatataaaaattagccaggcgtggtggcacatgcctgtaatcccagctactgagagggaggctgaggcaggagaatcacttgaacccaggaggcgaaagttgcagcgagcagagattgtgccactgcactccagcctgggtgccaga

SEQ ID NO: 161789 - DNA, 432 bp, Homo sapiens
  Payload ID: 11578
  Gene Symbol: OCIAD2
  Gene Name: OCIA domain containing 2
  ENST ID: ENST00000510159
  CDS Start-End: 133-318
cacgggggagcgaggcctgctgggcttggcaacgagggactcggcctcggaggcgacccagaccacacagacactgggtcaaggagtaagcagaggataaacaactggaaggagagcaagcacaaagtcatcatggcttcagcgtctgctcgtggaaaccaagataaagatgcccattttccaccaccaagcaagcagagcctgttgttttgtccaaaatcaaaactgcacatccacagagcagagatctcaaagattatgcgagaatgtcaggaagaaagtttctggaagagagcatgcttgtcacccagggactagtctaccaaggttatttggcagctaattctagatttggatcattgcccaaagttgcacttgctggtctcttgggatttggccttggaaaggtatcatacataggagtatgccaga

SEQ ID NO: 161790 - DNA, 697 bp, Homo sapiens
  Payload ID: 11578
  Gene Symbol: OCIAD2
  Gene Name: OCIA domain containing 2
  Uniprot ID: Q56VL3
  ENST ID: ENST00000620187
  CDS Start-End: 257-556
aggcgagggggcggagcaagagaagaaaacacaaagggccggaaggaagccggggagacaggtggggtactcgggaagctggagcgggccggcggtgcagtcacgggggagcgaggcctgctgggcttggcaacgagggactcggcctcggaggcgacccagaccacacagtgattctcttctaccttccttagacactgggtcaaggagtaagcagaggataaacaactggaaggagagcaagcacaaagtcatcatggcttcagcgtctgctcgtggaaaccaagataaagatgcccattttccaccaccaagcaagcagagcctgttgttttgtccaaaatcaaaactgcacatccacagagcagagatctcaaagattatgcgagaatgtcaggaagaaagtttctggaagagagctctgcctttttctcttgtaagcatgcttgtcacccagggactagtctaccaaggttatttggcagctaattctagatttggatcattgcccaaagttgcacgcactgcctccttacctgtgaggaatgcaaaataaagcatggattaagtgagaagggagactctcagccttcagcttcctaaattctgtgtctgtgactttcgaagttttttaaacctctgaatttgtacacatttaaaatttcaagtgtactttaaaataaaatacttctaatgg

SEQ ID NO: 161791 - DNA, 5138 bp, Homo sapiens
  Payload ID: 11579
  Gene Symbol: OCRL
  Gene Name: oculocerebrorenal syndrome of Lowe
  Uniprot ID: Q01968
  ENST ID: ENST00000357121
  CDS Start-End: 166-2847
tctcagctcccagctccccgctcccggctcccggcgcccggcgcccggcgcggagctgttcctcaaacgacacgcagccgaggtgggtgggtgtggggacgcgggagccagtgtcgtcggatcggcccgcagtccgctgtcctgctgagcccggaggccgcctggatggagccgccgctcccggtcggagcccagccgcttgccactgtcgagggtatggagatgaagggtcctctccgggagccctgcgccctgaccctagcccagaggaacgggcaatatgagttaataatccagttgcatgagaaggaacagcatgttcaagatatcattcctataaatagccacttcagatgtgttcaagaagcagaagaaactcttttgattgacatagcttctaacagtggctgcaaaattcgggttcagggggactggatcagagagcgccgctttgaaatccctgatgaggaacactgtttgaagttcctctcagctgtccttgctgctcagaaagctcagtcacagcttcttgttccagagcaaaaggactcatctagctggtaccagaaattagacactaaggacaaaccttctgttttttcagggcttcttggatttgaagacaatttttcttctatgaatttggacaagaaaataaattcacaaaatcagcctactgggattcatcgggaacccccacctccacccttttcagtgaataaaatgcttccacgtgaaaaagaagcttctaacaaggagcagcccaaagtgaccaacaccatgcggaagctctttgtaccaaatacccaatctgggcagcgggagggtctcatcaaacatatcctggcaaagcgagagaaagaatatgtcaacattcagactttcagattttttgttggaacttggaatgtgaatggccagtctccagatagcgggttagaaccttggctgaactgtgatcccaatcctcctgatatctactgcattggattccaagaactggacttgagcacagaagccttcttctactttgaatctgtgaaggaacaagaatggtccatggctgtagagagaggtttgcattccaaagccaagtataagaaagttcaactggtgcgccttgttgggatgatgcttcttatatttgccagaaaggatcagtgtcgatacattcgtgatattgctacagaaacagttggaactggaatcatggggaaaatgggaaacaaaggtggggtagctgtgagatttgtatttcacaacaccaccttttgcattgtcaattcccatctggctgcacacgtggaggactttgagagaaggaatcaagattataaggacatttgtgcgagaatgagttttgtggtcccaaatcagaccctcccgcagttgaacatcatgaaacatgaggttgtcatttggttgggagatttgaattatagactttgcatgcctgatgccaatgaggtgaaaagtcttattaataagaaagaccttcagagactcttgaaattcgaccagctaaatattcagcgcacacagaaaaaagcttttgttgacttcaatgaaggggaaatcaagttcatccccacttataagtatgactctaaaacagaccggtgggattccagtgggaaatgccgggttccagcctggtgtgaccgaattctttggagaggaacaaatgttaatcagcttaattatcggagtcacatggaactgaaaaccagcgaccacaagcctgttagcgccctcttccatattggggtgaaggttgtggatgaacgaaggtaccggaaagtctttgaagatagtgtacgcatcatggacagaatggaaaatgacttccttccttccttagaactcagcaggagggagtttgtgtttgaaaatgtgaagtttcggcaactacaaaaggagaagttccagatcagcaacaatggacaggttccctgccatttttctttcatccctaaacttaatgacagccagtactgcaagccatggcttcgggctgaaccttttgagggctacttggagccaaatgagacagtggacatttctcttgatgtgtatgtcagcaaagactctgtaaccatcctgaactcgggagaagataagattgaagatattctcgtccttcacctggatcgaggcaaagattacttcttgactatcagtggaaattacctcccaagttgttttggcacatccttagaggctctgtgccgtatgaaaagaccaatccgagaagttcctgttaccaaactcatagacttggagaaatcccttctgcaaatggttcctttggatgaaggtgccagtgagagaccccttcaggttcccaaggagatctggcttctagtagatcacctattcaaatacgcctgtcaccaggaggacctgttccagacccctggaatgcaggaagagctccagcagatcattgattgtctggataccagcattcctgagacaatccctggcagcaaccactctgtggctgaagcactgctcattttcttggaagccctgccagagccagtcatctgttacgagctgtatcagcgatgtcttgactctgcttatgatccccggatctgccgacaggtgatctcccagcttccgagatgccatagaaatgttttccgttacttgatggcattccttcgagaactcttaaaattctctgaatacaatagcgtcaatgccaacatgatcgctactctcttcactagtcttctcctgaggcctccacccaaccttatggcaagacagactccaagtgaccgccagcgtgctattcagttccttctgggctttctgcttgggagcgaagaagactaaggcttttactgttctctgatattctagaagcagacgatctcgggctccaagtatttcagaatgatttaaaaagtcatgccacaggaagggtctattgcagaatttcaagttctgtttatagtaaaaaggaagagcgtttcctaatccctcctttaccatatcctacacagaaaaatacttttagacttatattgccaagccaaagttaccatattttggtgtttttgtgttttctctttataaggcaaaaagatctgtatttacactccttcacctagggatgtgtttgttgccctcctacccaattgtcatgattgtccttagtaccctaggcctagattctgagatcttcccattctaggcctacaagcactacttgctgtagctgagacttgtctagagtcctttgttttgcacttttgacccaccccttcctggatcactcctttgcactccactcccctcgttctgtcactttgaacgaagtctgagtgaggctagtgactccttgggtgtcctcaacagtgaattcactgtctgcgtgcagttattacatgcatttgtgcatttctactacaatggcatctttatgtctctgtaacattggccttttcatggctccacactgggtggaaccatattctcttagatcacatttagtagcataactgtagggactattagagatggcatctcatcgatgagagagaatcacaatcagaatggaagcactttgagtatctgaagagtgagagcattcatgtttgacaggtcctgcttcccactatccttttcctgttattattcaaattttacacaaggactaatcctgggtgtctctgagacccatctcctgcctagacatccacctccagagcaacactggccccacagtaaaagaggaagtcttgtacctcaggcaggcccatctagagctattgctccttcccacagcaaaggtattgtggatgacccttagaatccattctctggtcttctgaaataccaagggcagatgtcacctccttcctcagcaggactgactctgggctctacaaccagctccttcacataaagggtttagagactccccttggctcccagtcaccatatccagtgttgtgtaaagagactggccaacaggaccaaccaagcaccttacctctcccatacaagatgaccctctgagcttttcatttattcaagctctgtggtacagcctttttttaaaataaattaatctatattggttgacaaacaagccaccaaccactgactgcaaaactgcctgatgcagttgggttcctcctggttttcttttgttacaaccacccttgcctgtttacattaattgcaaggagcataacgtacaggctgtatgtacaatcctgggcattgactctgtgacatttctagcatatccaaggcaccaccagtgatttctcctgtttcttggtgggggtgggggggaaggtacgtattctgcaatatggctaaaccctttcctgattgagagttaaagcaataggagtcaagttactggtgccacagatctggaggtatgataggtcaggggctaggtgttgaacttagttaatggaagactgagagcagaacaggtttgtcatctccgcaaggccagaaagtgatcacaaaaagaggcagatgatagacactggggtagggtcataccacagggaaatacctttcctgggcttgttttctagcatatcactgacctgggatctttgggtgatcaagggtgtggttagtggaggctctgtgctgcacgtatgcagtatcctatctctttctacatcagatcaaaacactaagttggtgtactgcctcgaccttttttcagctcatcctggaacatatacagagttgagagttttagacaatctctaggtagaggagacaagatgtagacccagacagaagaaatctgcttccctaccatggctattccagcaccccaacctgtaattgccaagtcctctaaggtactaatttgtagctgctctgaagtaaggatttcggattcagctggtagggaaagactctgcacctgctgtcttagggaagaaatggttcaaatccatgtggtgacattgcattagtctccctttcactgttttcttattctgtaattgtttgttatatttcccaaaaacgtcttgatcactaagcaaagctgctagtgggattctatatttcgtgtcatcttttttattataatttattgcaaatttttttctgaataaatatatgttgtgtgaaaaagcaaa

SEQ ID NO: 161792 - DNA, 5162 bp, Homo sapiens
  Payload ID: 11579
  Gene Symbol: OCRL
  Gene Name: oculocerebrorenal syndrome of Lowe
  Uniprot ID: Q01968
  ENST ID: ENST00000371113
  CDS Start-End: 166-2871
tctcagctcccagctccccgctcccggctcccggcgcccggcgcccggcgcggagctgttcctcaaacgacacgcagccgaggtgggtgggtgtggggacgcgggagccagtgtcgtcggatcggcccgcagtccgctgtcctgctgagcccggaggccgcctggatggagccgccgctcccggtcggagcccagccgcttgccactgtcgagggtatggagatgaagggtcctctccgggagccctgcgccctgaccctagcccagaggaacgggcaatatgagttaataatccagttgcatgagaaggaacagcatgttcaagatatcattcctataaatagccacttcagatgtgttcaagaagcagaagaaactcttttgattgacatagcttctaacagtggctgcaaaattcgggttcagggggactggatcagagagcgccgctttgaaatccctgatgaggaacactgtttgaagttcctctcagctgtccttgctgctcagaaagctcagtcacagcttcttgttccagagcaaaaggactcatctagctggtaccagaaattagacactaaggacaaaccttctgttttttcagggcttcttggatttgaagacaatttttcttctatgaatttggacaagaaaataaattcacaaaatcagcctactgggattcatcgggaacccccacctccacccttttcagtgaataaaatgcttccacgtgaaaaagaagcttctaacaaggagcagcccaaagtgaccaacaccatgcggaagctctttgtaccaaatacccaatctgggcagcgggagggtctcatcaaacatatcctggcaaagcgagagaaagaatatgtcaacattcagactttcagattttttgttggaacttggaatgtgaatggccagtctccagatagcgggttagaaccttggctgaactgtgatcccaatcctcctgatatctactgcattggattccaagaactggacttgagcacagaagccttcttctactttgaatctgtgaaggaacaagaatggtccatggctgtagagagaggtttgcattccaaagccaagtataagaaagttcaactggtgcgccttgttgggatgatgcttcttatatttgccagaaaggatcagtgtcgatacattcgtgatattgctacagaaacagttggaactggaatcatggggaaaatgggaaacaaaggtggggtagctgtgagatttgtatttcacaacaccaccttttgcattgtcaattcccatctggctgcacacgtggaggactttgagagaaggaatcaagattataaggacatttgtgcgagaatgagttttgtggtcccaaatcagaccctcccgcagttgaacatcatgaaacatgaggttgtcatttggttgggagatttgaattatagactttgcatgcctgatgccaatgaggtgaaaagtcttattaataagaaagaccttcagagactcttgaaattcgaccagctaaatattcagcgcacacagaaaaaagcttttgttgacttcaatgaaggggaaatcaagttcatccccacttataagtatgactctaaaacagaccggtgggattccagtgggaaatgccgggttccagcctggtgtgaccgaattctttggagaggaacaaatgttaatcagcttaattatcggagtcacatggaactgaaaaccagcgaccacaagcctgttagcgccctcttccatattggggtgaaggttgtggatgaacgaaggtaccggaaagtctttgaagatagtgtacgcatcatggacagaatggaaaatgacttccttccttccttagaactcagcaggagggagtttgtgtttgaaaatgtgaagtttcggcaactacaaaaggagaagttccagatcagcaacaatggacaggttccctgccatttttctttcatccctaaacttaatgacagccagtactgcaagccatggcttcgggctgaaccttttgagggctacttggagccaaatgagacagtggacatttctcttgatgtgtatgtcagcaaagactctgtaaccatcctgaactcgggagaagataagattgaagatattctcgtccttcacctggatcgaggcaaagattacttcttgactatcagtggaaattacctcccaagttgttttggcacatccttagaggctctgtgccgtatgaaaagaccaatccgagaagttcctgttaccaaactcatagacttggaagaagacagcttcctagaaaaggagaaatcccttctgcaaatggttcctttggatgaaggtgccagtgagagaccccttcaggttcccaaggagatctggcttctagtagatcacctattcaaatacgcctgtcaccaggaggacctgttccagacccctggaatgcaggaagagctccagcagatcattgattgtctggataccagcattcctgagacaatccctggcagcaaccactctgtggctgaagcactgctcattttcttggaagccctgccagagccagtcatctgttacgagctgtatcagcgatgtcttgactctgcttatgatccccggatctgccgacaggtgatctcccagcttccgagatgccatagaaatgttttccgttacttgatggcattccttcgagaactcttaaaattctctgaatacaatagcgtcaatgccaacatgatcgctactctcttcactagtcttctcctgaggcctccacccaaccttatggcaagacagactccaagtgaccgccagcgtgctattcagttccttctgggctttctgcttgggagcgaagaagactaaggcttttactgttctctgatattctagaagcagacgatctcgggctccaagtatttcagaatgatttaaaaagtcatgccacaggaagggtctattgcagaatttcaagttctgtttatagtaaaaaggaagagcgtttcctaatccctcctttaccatatcctacacagaaaaatacttttagacttatattgccaagccaaagttaccatattttggtgtttttgtgttttctctttataaggcaaaaagatctgtatttacactccttcacctagggatgtgtttgttgccctcctacccaattgtcatgattgtccttagtaccctaggcctagattctgagatcttcccattctaggcctacaagcactacttgctgtagctgagacttgtctagagtcctttgttttgcacttttgacccaccccttcctggatcactcctttgcactccactcccctcgttctgtcactttgaacgaagtctgagtgaggctagtgactccttgggtgtcctcaacagtgaattcactgtctgcgtgcagttattacatgcatttgtgcatttctactacaatggcatctttatgtctctgtaacattggccttttcatggctccacactgggtggaaccatattctcttagatcacatttagtagcataactgtagggactattagagatggcatctcatcgatgagagagaatcacaatcagaatggaagcactttgagtatctgaagagtgagagcattcatgtttgacaggtcctgcttcccactatccttttcctgttattattcaaattttacacaaggactaatcctgggtgtctctgagacccatctcctgcctagacatccacctccagagcaacactggccccacagtaaaagaggaagtcttgtacctcaggcaggcccatctagagctattgctccttcccacagcaaaggtattgtggatgacccttagaatccattctctggtcttctgaaataccaagggcagatgtcacctccttcctcagcaggactgactctgggctctacaaccagctccttcacataaagggtttagagactccccttggctcccagtcaccatatccagtgttgtgtaaagagactggccaacaggaccaaccaagcaccttacctctcccatacaagatgaccctctgagcttttcatttattcaagctctgtggtacagcctttttttaaaataaattaatctatattggttgacaaacaagccaccaaccactgactgcaaaactgcctgatgcagttgggttcctcctggttttcttttgttacaaccacccttgcctgtttacattaattgcaaggagcataacgtacaggctgtatgtacaatcctgggcattgactctgtgacatttctagcatatccaaggcaccaccagtgatttctcctgtttcttggtgggggtgggggggaaggtacgtattctgcaatatggctaaaccctttcctgattgagagttaaagcaataggagtcaagttactggtgccacagatctggaggtatgataggtcaggggctaggtgttgaacttagttaatggaagactgagagcagaacaggtttgtcatctccgcaaggccagaaagtgatcacaaaaagaggcagatgatagacactggggtagggtcataccacagggaaatacctttcctgggcttgttttctagcatatcactgacctgggatctttgggtgatcaagggtgtggttagtggaggctctgtgctgcacgtatgcagtatcctatctctttctacatcagatcaaaacactaagttggtgtactgcctcgaccttttttcagctcatcctggaacatatacagagttgagagttttagacaatctctaggtagaggagacaagatgtagacccagacagaagaaatctgcttccctaccatggctattccagcaccccaacctgtaattgccaagtcctctaaggtactaatttgtagctgctctgaagtaaggatttcggattcagctggtagggaaagactctgcacctgctgtcttagggaagaaatggttcaaatccatgtggtgacattgcattagtctccctttcactgttttcttattctgtaattgtttgttatatttcccaaaaacgtcttgatcactaagcaaagctgctagtgggattctatatttcgtgtcatcttttttattataatttattgcaaatttttttctgaataaatatatgttgtgtgaaaaagcaaa

SEQ ID NO: 161793 - DNA, 3068 bp, Homo sapiens
  Payload ID: 11580
  Gene Symbol: OCA2
  Gene Name: oculocutaneous albinism II
  Uniprot ID: Q04671
  ENST ID: ENST00000353809
  CDS Start-End: 111-2555
cttacttcgaaggctgtgctccgctcaccatccagagcggaggtgcggaccttaaactcactcctggagaaagatctgcaagtgcgcagagagaagactggcagtggagcatgcatctggagggcagagacggcaggcggtaccccggcgcgccggcggtggagctcctgcagacgtccgtgcccagcggactcgctgaacttgtggccggcaagcgcaggcttcctcggggagccggtggagctgacccctcgcactcctgccccaggggggctgccgggcagagctcttgggctcctgcaggccaggagtttgcttcattcctcacaaaagggaggtctcactcttctttgccccagatgtccagctccaggtctaaagattcctgctttacagaaaacactcctttgctgaggaattccttacaggagaaagggtcacggtgcatacctgtttaccatccagagttcatcactgctgaagagtcttgggaagacagctctgctgactgggagcgaagatacctgctaagcagggaggtgtctggtctgtctgcatctgcctcctccgagaagggagaccttctggacagcccgcacatccgactccgtctttccaagctgaggcgctgtgtgcagtggctgaaagtcatgggcctgtttgcctttgtggtgctgtgttctattttgttcagcctatatccggatcaaggaaagctctggcagctgttggccttatcaccgctggagaactactccgtgaaccttagcagccacgtggactccacgctgctgcaggtggacctggcaggggccctagtggccagtgggccgagtcgtcctgggagggaagagcacatcgtggtggagctgacccaggctgacgctttgggctccaggtggcggcggccacagcaggtcactcacaactggacggtgtatttaaatccgaggagaagcgagcactcagtgatgagcaggacctttgaggtactgaccagagagacggtgtccatcagcatccgggcctccctgcagcagacccaggctgtccctcttttgatggctcatcagtacctccgcggaagtgtagaaacccaggtgaccatcgcgacggccatcctcgcgggcgtctacgcgctgatcatatttgagagacccagcctgacccatgtggtggagtggattgattttgagacgctggccctgctgtttggcatgatgatcttagtagccatattttcagaaacgggatttttcgattattgtgctgtaaaggcataccggctctcccggggacgggtgtgggccatgatcatcatgctctgtctcatcgcggccgtcctctctgccttcttggacaacgtcaccaccatgctcctcttcacgcctgtgaccataaggttgtgtgaggtgctcaaccttgatccaagacaagtcctgattgcagaagtgatcttcacaaacattggaggagctgccactgccatcggggaccctccaaatgtcattattgtttccaaccaagagctgaggaagatgggcctggactttgccggattcactgcacacatgttcattgggatttgccttgttctcctggtctgctttccgctcctcagactcctttactggaacagaaagctttataacaaggaacccagtgagattgttgaactgaagcacgagattcacgtctggcgcctgactgctcagcgcatcagcccggccagccgcgaggagacagctgtgcgccgcctgctgctggggaaggtgctggcactggagcacctgctcgcccggaggctgcacaccttccacagacagatctcacaggaggacaaaaattgggagaccaatatccaagaactccaaaaaaagcataggatatctgacgggattctgctcgccaaatgcctgacagtgttgggatttgttatcttcatgtttttcctcaattcgtttgtccctggcattcatcttgatcttggatggattgctattctgggtgccatctggttgctaattttagctgatattcatgattttgagataattctacacagagtggaatgggcaacccttctgttttttgcagcgctctttgttctgatggaggcattggcacatctccacttaatagaatatgttggagaacaaactgctttgctaataaagatggtcccagaggagcagcgcctcatagccgccattgtcctggtggtgtgggtctcagccctggcgtcgtccctgattgacaacatcccgttcactgctaccatgattcccgtgctcctgaacctgagccacgaccctgaggttggcctgcccgcaccgccgctcatgtatgccctggccttcggtgcttgcctgggaggtaacgggacactgattggcgcgtcggcaaacgtcgtgtgtgcagggattgcagaacagcatggatatgggttctccttcatggaatttttcaggctgggcttcccaatgatggttgtgtcctgcactgttgggatgtgttatctccttgtggctcatgtggtggtgggatggaattaatagacatccatctattgctcgaagactaaaggaaacttcatccatcacaacccattagtcataaaactaccctgaccccactgtttgaagaagaaaaggtgcttaccctggagatgctacagagacacagtggaatagaccttgacactaacactctaattcaagcgaatgttggaacaccatgacctcctctgtgtgtcctttctccccaaggacaaaatgtagaaagatgtgagataacttactcaagattcccctccagaaaaatacgtatgtttaaaaacccttcctgctatacataggaaaagacacacatccacctaaaattgactgtactgtttaactgtcaattctcctgaggctaaacacagtttgtttttcttgtaatcacttttcatgttaaaataatcagcattcaaattgtatgctttctgaatatagactttctgggaaaaggtttactgctcgtaaggaaacattttatgtattaaaataaactgttccttgataaaa

SEQ ID NO: 161794 - DNA, 3186 bp, Homo sapiens
  Payload ID: 11580
  Gene Symbol: OCA2
  Gene Name: oculocutaneous albinism II
  Uniprot ID: Q04671
  ENST ID: ENST00000354638
  CDS Start-End: 157-2673
cctgggtgggggacccgctgcgggagcgccgagctccctctgagttcttacttcgaaggctgtgctccgctcaccatccagagcggaggtgcggaccttaaactcactcctggagaaagatctgcaagtgcgcagagagaagactggcagtggagcatgcatctggagggcagagacggcaggcggtaccccggcgcgccggcggtggagctcctgcagacgtccgtgcccagcggactcgctgaacttgtggccggcaagcgcaggcttcctcggggagccggtggagctgacccctcgcactcctgccccaggggggctgccgggcagagctcttgggctcctgcaggccaggagtttgcttcattcctcacaaaagggaggtctcactcttctttgccccagatgtccagctccaggtctaaagattcctgctttacagaaaacactcctttgctgaggaattccttacaggagaaagggtcacggtgcatacctgtttaccatccagagttcatcactgctgaagagtcttgggaagacagctctgctgactgggagcgaagatacctgctaagcagggaggtgtctggtctgtctgcatctgcctcctccgagaagggagaccttctggacagcccgcacatccgactccgtctttccaagctgaggcgctgtgtgcagtggctgaaagtcatgggcctgtttgcctttgtggtgctgtgttctattttgttcagcctatatccggatcaaggaaagctctggcagctgttggccttatcaccgctggagaactactccgtgaaccttagcagccacgtggactccacgctgctgcaggtggacctggcaggggccctagtggccagtgggccgagtcgtcctgggagggaagagcacatcgtggtggagctgacccaggctgacgctttgggctccaggtggcggcggccacagcaggtcactcacaactggacggtgtatttaaatccgaggagaagcgagcactcagtgatgagcaggacctttgaggtactgaccagagagacggtgtccatcagcatccgggcctccctgcagcagacccaggctgtccctcttttgatggctcatcagtacctccgcggaagtgtagaaacccaggtgaccatcgcgacggccatcctcgcgggcgtctacgcgctgatcatatttgagatcgtgcacagaactctggcggccatgctgggttcccttgcagcactggcagcactggctgtgattggcgatagacccagcctgacccatgtggtggagtggattgattttgagacgctggccctgctgtttggcatgatgatcttagtagccatattttcagaaacgggatttttcgattattgtgctgtaaaggcataccggctctcccggggacgggtgtgggccatgatcatcatgctctgtctcatcgcggccgtcctctctgccttcttggacaacgtcaccaccatgctcctcttcacgcctgtgaccataaggttgtgtgaggtgctcaaccttgatccaagacaagtcctgattgcagaagtgatcttcacaaacattggaggagctgccactgccatcggggaccctccaaatgtcattattgtttccaaccaagagctgaggaagatgggcctggactttgccggattcactgcacacatgttcattgggatttgccttgttctcctggtctgctttccgctcctcagactcctttactggaacagaaagctttataacaaggaacccagtgagattgttgaactgaagcacgagattcacgtctggcgcctgactgctcagcgcatcagcccggccagccgcgaggagacagctgtgcgccgcctgctgctggggaaggtgctggcactggagcacctgctcgcccggaggctgcacaccttccacagacagatctcacaggaggacaaaaattgggagaccaatatccaagaactccaaaaaaagcataggatatctgacgggattctgctcgccaaatgcctgacagtgttgggatttgttatcttcatgtttttcctcaattcgtttgtccctggcattcatcttgatcttggatggattgctattctgggtgccatctggttgctaattttagctgatattcatgattttgagataattctacacagagtggaatgggcaacccttctgttttttgcagcgctctttgttctgatggaggcattggcacatctccacttaatagaatatgttggagaacaaactgctttgctaataaagatggtcccagaggagcagcgcctcatagccgccattgtcctggtggtgtgggtctcagccctggcgtcgtccctgattgacaacatcccgttcactgctaccatgattcccgtgctcctgaacctgagccacgaccctgaggttggcctgcccgcaccgccgctcatgtatgccctggccttcggtgcttgcctgggaggtaacgggacactgattggcgcgtcggcaaacgtcgtgtgtgcagggattgcagaacagcatggatatgggttctccttcatggaatttttcaggctgggcttcccaatgatggttgtgtcctgcactgttgggatgtgttatctccttgtggctcatgtggtggtgggatggaattaatagacatccatctattgctcgaagactaaaggaaacttcatccatcacaacccattagtcataaaactaccctgaccccactgtttgaagaagaaaaggtgcttaccctggagatgctacagagacacagtggaatagaccttgacactaacactctaattcaagcgaatgttggaacaccatgacctcctctgtgtgtcctttctccccaaggacaaaatgtagaaagatgtgagataacttactcaagattcccctccagaaaaatacgtatgtttaaaaacccttcctgctatacataggaaaagacacacatccacctaaaattgactgtactgtttaactgtcaattctcctgaggctaaacacagtttgtttttcttgtaatcacttttcatgttaaaataatcagcattcaaattgtatgctttctgaatatagactttctgggaaaaggtttactgctcgtaaggaaacattttatgtattaaaataaactgttccttgataaaa

SEQ ID NO: 161795 - DNA, 750 bp, Homo sapiens
  Payload ID: 11580
  Gene Symbol: OCA2
  Gene Name: oculocutaneous albinism II
  ENST ID: ENST00000445578
  CDS Start-End: 95-750
tgctccgctcaccatccagagcggaggtgcggaccttaaactcactcctggagaaagatctgcaagtgcgcagagagaagactggcagtggagcatgcatctggagggcagagacggcaggcggtaccccggcgcgccggcggtggagctcctgcagacgtccgtgcccagcggactcgctgaacttgtggccggcaagcgcaggcttcctcggggagccggtggagctgacccctcgcactcctgccccaggggggctgccgggcagagctcttgggctcctgcaggccaggagtttgcttcattcctcacaaaagggaggtctcactcttctttgccccagatgtccagctccaggtctaaagattcctgctttacagaaaacactcctttgctgaggaattccttacaggagaaagggtcacggtgcatacctgtttaccatccagagttcatcactgctgaagagtcttgggaagacagctctgctgactgggagcgaagatacctgctaagcagggaggtgtctggtctgtctgcatctgcctcctccgagaagggagaccttctggacagcccgcacatccgactccgtctttccaagctgaggcgctgtgtgcagtggctgaaagtcatgggcctgtttgcctttgtggtgctgtgttctgtcactcacaactggacggtgtatttaaatccgaggagaagcgagcactcagtgatgagcaggacctttgaggtactgaccag

SEQ ID NO: 161796 - DNA, 996 bp, Homo sapiens
  Payload ID: 11580
  Gene Symbol: OCA2
  Gene Name: oculocutaneous albinism II
  ENST ID: ENST00000431101
  CDS Start-End: 205-996
tccgctcaccatccagagcggaggtgcggaccttaaactcactcctggagaaagatctgcaagtgcgcaggtaaagtgcacgtgctccgcggtcgggaggaaggaggcgaggagccagactagcctgggaacaggcagggagggtttacacagccccggctgagtcgcggcttaggaagcaagagagaagactggcagtggagcatgcatctggagggcagagacggcaggcggtaccccggcgcgccggcggtggagctcctgcagacgtccgtgcccagcggactcgctgaacttgtggccggcaagcgcaggcttcctcggggagccggtggagctgacccctcgcactcctgccccaggggggctgccgggcagagctcttgggctcctgcaggccaggagtttgcttcattcctcacaaaagggaggtctcactcttctttgccccagatgtccagctccaggtctaaagattcctgctttacagaaaacactcctttgctgaggaattccttacaggagaaagggtcacggtgcatacctgtttaccatccagagttcatcactgctgaagagtcttgggaagacagctctgctgactgggagcgaagatacctgctaagcagggaggtgtctggtctgtctgcatctgcctcctccgagaagggagaccttctggacagcccgcacatccgactccgtctttccaagctgaggcgctgtgtgcagtggctgaaagtcatgggcctgtttgcctttgtggtgctgtgttctattttgttcagcctatatccggatcaaggaaagctctggcagctgttggccttatcaccgctggagaactactccgtgaaccttagcagccacgtggactccacgctgctgcaggtggacctggcaggggccctagtggccagtgggccgagtcgtcctgggagggaagagcacatcgtggtggagctgacccaggctgacgctttgggctccaggtgg

SEQ ID NO: 161797 - DNA, 396 bp, Homo sapiens
  Payload ID: 11580
  Gene Symbol: OCA2
  Gene Name: oculocutaneous albinism II
  ENST ID: ENST00000619392
  CDS Start-End: 1-396
atgagcaggacctttgaggtactgaccagagagacggtgtccatcagcatccgggcctccctgcagcagacccaggctgtccctcttttgatggctcatcagtacctccgcggaagtgtagaaacccaggtgaccatcgcgacggccatcctcgcgggcgtctacgcgctgatcatatttgagatcgtgcacagaactctggcagccatgctgggttcccttgcagcactggcagcactggctgtgattggcgatagacccagcctgacccatgtggtggagtggattgattttgagacgctggccctgctgtttggcatgatgatcttagtagccatattttcagaaacgggatttttcgattattgtgctgtaaaggcataccggctctcccgg

SEQ ID NO: 161798 - DNA, 2400 bp, Homo sapiens
  Payload ID: 11580
  Gene Symbol: OCA2
  Gene Name: oculocutaneous albinism II
  ENST ID: ENST00000632880
  CDS Start-End: 157-2400
cctgggtgggggacccgctgcgggagcgccgagctccctctgagttcttacttcgaaggctgtgctccgctcaccatccagagcggaggtgcggaccttaaactcactcctggagaaagatctgcaagtgcgcagagagaagactggcagtggagcatgcatctggagggcagagacggcaggcggtaccccggcgcgccggcggtggagctcctgcagacgtccgtgcccagcggactcgctgaacttgtggccggcaagcgcaggcttcctcggggagccggtggagctgacccctcgcactcctgccccaggggggctgccgggcagagctcttgggctcctgcaggccaggagtttgcttcattcctcacaaaagggaggtctcactcttctttgccccagatgtccagctccaggtctaaagattcctgctttacagaaaacactcctttgctgaggaattccttacaggagaaagggtcacggtgcatacctgtttaccatccagagttcatcactgctgaagagtcttgggaagacagctctgctgactgggagcgaagatacctgctaagcagggaggtgtctggtctgtctgcatctgcctcctccgagaagggagaccttctggacagcccgcacatccgactccgtctttccaagctgaggcgctgtgtgcagtggctgaaagtcatgggcctgtttgcctttgtggtgctgtgttctattttgttcagcctatatccggatcaaggaaagctctggcagctgttggccttatcaccgctggagaactactccgtgaaccttagcagccacgtggactccacgctgctgcaggtggacctggcaggggccctagtggccagtgggccgagtcgtcctgggagggaagagcacatcgtggtggagctgacccaggctgacgctttgggctccaggtggcggcggccacagcaggtcactcacaactggacggtgtatttaaatccgaggagaagcgagcactcagtgatgagcaggacctttgaggtactgaccagagagacggtgtccatcagcatccgggcctccctgcagcagacccaggctgtccctcttttgatggctcatcagtacctccgcggaagtgtagaaacccaggtgaccatcgcgacggccatcctcgcgggcgtctacgcgctgatcatatttgagatcgtgcacagaactctggcagccatgctgggttcccttgcagcactggcagcactggctgtgattggcgatagacccagcctgacccatgtggtggagtggattgattttgagacgctggccctgctgtttggcatgatgatcttagtagccatattttcagaaacgggatttttcgattattgtgctgtaaaggcataccggctctcccggggacgggtgtgggccatgatcatcatgctctgtctcatcgcggccgtcctctctgccttcttggacaacgtcaccaccatgctcctcttcacgcctgtgaccataaggttgtgtgaggtgctcaaccttgatccaagacaagtcctgattgcagaagtgatcttcacaaacattggaggagctgccactgccatcggggaccctccaaatgtcattattgtttccaaccaagagctgaggaagatgggcctggactttgccggattcactgcacacatgttcattgggatttgtcttgttctcctggtctgctttccgctcctcagactcctttactggaacagaaagctttataacaaggaacccagtgagattgttgaactgaagcacgagattcacgtctggcgcctgactgctcagcgcatcagcccggccagccgcgaggagacagctgtgcgccgcctgctgctggggaaggtgctggcactggagcacctgctcgcccggaggctgcacaccttccacagacagatctcacaggaggacaaaaattgggagaccaatatccaagaactccaaaaaaagcataggatatctgacgggattctgctcgccaaatgcctgacagtgttgggatttgttatcttcatgtttttcctcaattcgtttgtccctggcattcatcttgatcttggatggattgctattctgggtgccatctggttgctaattttagctgatattcatgattttgagataattctacacagagtggaatgggcaacccttctgttttttgcagcgctctttgttctgatggaggcattggcacatctccacttaatagaatatgttggagaacaaactgctttgctaataaagatggtcccagaggagcagcgcctcatagccgccattgtcctggtggtgtgggtctcagccctggcgtcgtccctgattgacaacatcccgttcactgctaccatg

SEQ ID NO: 161799 - DNA, 750 bp, Homo sapiens; identical to SEQ ID NO: 161795
  Payload ID: 11580
  Gene Symbol: OCA2
  Gene Name: oculocutaneous albinism II
  ENST ID: ENST00000633787
  CDS Start-End: 95-750

SEQ ID NO: 161800 - DNA, 2282 bp, Homo sapiens
  Payload ID: 11580
  Gene Symbol: OCA2
  Gene Name: oculocutaneous albinism II
  ENST ID: ENST00000631387
  CDS Start-End: 111-2282
cttacttcgaaggctgtgctccgctcaccatccagagcggaggtgcggaccttaaactcactcctggagaaagatctgcaagtgcgcagagagaagactggcagtggagcatgcatctggagggcagagacggcaggcggtaccccggcgcgccggcggtggagctcctgcagacgtccgtgcccagcggactcgctgaacttgtggccggcaagcgcaggcttcctcggggagccggtggagctgacccctcgcactcctgccccaggggggctgccgggcagagctcttgggctcctgcaggccaggagtttgcttcattcctcacaaaagggaggtctcactcttctttgccccagatgtccagctccaggtctaaagattcctgctttacagaaaacactcctttgctgaggaattccttacaggagaaagggtcacggtgcatacctgtttaccatccagagttcatcactgctgaagagtcttgggaagacagctctgctgactgggagcgaagatacctgctaagcagggaggtgtctggtctgtctgcatctgcctcctccgagaagggagaccttctggacagcccgcacatccgactccgtctttccaagctgaggcgctgtgtgcagtggctgaaagtcatgggcctgtttgcctttgtggtgctgtgttctattttgttcagcctatatccggatcaaggaaagctctggcagctgttggccttatcaccgctggagaactactccgtgaaccttagcagccacgtggactccacgctgctgcaggtggacctggcaggggccctagtggccagtgggccgagtcgtcctgggagggaagagcacatcgtggtggagctgacccaggctgacgctttgggctccaggtggcggcggccacagcaggtcactcacaactggacggtgtatttaaatccgaggagaagcgagcactcagtgatgagcaggacctttgaggtactgaccagagagacggtgtccatcagcatccgggcctccctgcagcagacccaggctgtccctcttttgatggctcatcagtacctccgcggaagtgtagaaacccaggtgaccatcgcgacggccatcctcgcgggcgtctacgcgctgatcatatttgagagacccagcctgacccatgtggtggagtggattgattttgagacgctggccctgctgtttggcatgatgatcttagtagccatattttcagaaacgggatttttcgattattgtgctgtaaaggcataccggctctcccggggacgggtgtgggccatgatcatcatgctctgtctcatcgcggccgtcctctctgccttcttggacaacgtcaccaccatgctcctcttcacgcctgtgaccataaggttgtgtgaggtgctcaaccttgatccaagacaagtcctgattgcagaagtgatcttcacaaacattggaggagctgccactgccatcggggaccctccaaatgtcattattgtttccaaccaagagctgaggaagatgggcctggactttgccggattcactgcacacatgttcattgggatttgtcttgttctcctggtctgctttccgctcctcagactcctttactggaacagaaagctttataacaaggaacccagtgagattgttgaactgaagcacgagattcacgtctggcgcctgactgctcagcgcatcagcccggccagccgcgaggagacagctgtgcgccgcctgctgctggggaaggtgctggcactggagcacctgctcgcccggaggctgcacaccttccacagacagatctcacaggaggacaaaaattgggagaccaatatccaagaactccaaaaaaagcataggatatctgacgggattctgctcgccaaatgcctgacagtgttgggatttgttatcttcatgtttttcctcaattcgtttgtccctggcattcatcttgatcttggatggattgctattctgggtgccatctggttgctaattttagctgatattcatgattttgagataattctacacagagtggaatgggcaacccttctgttttttgcagcgctctttgttctgatggaggcattggcacatctccacttaatagaatatgttggagaacaaactgctttgctaataaagatggtcccagaggagcagcgcctcatagccgccattgtcctggtggtgtgggtctcagccctggcgtcgtccctgattgacaacatcccgttcactgctaccatg

SEQ ID NO: 161801 - DNA, 996 bp, Homo sapiens; identical to SEQ ID NO: 161796
  Payload ID: 11580
  Gene Symbol: OCA2
  Gene Name: oculocutaneous albinism II
  ENST ID: ENST00000632166
  CDS Start-End: 205-996

SEQ ID NO: 161802 - DNA, 884 bp, Homo sapiens
  Payload ID: 11581
  Gene Symbol: OCLM
  Gene Name: oculomedin
  Uniprot ID: Q9Y5M6
  ENST ID: ENST00000574641
  CDS Start-End: 475-609
gcccagcccacattagcttttgaagggaatatttttatgttcataggaaaaaaagcatagctcctctatataaccaacttcttttagtactactgatagctagtatgttaagtttgatggactaattataatcttttttttatattcctagtatgctggattctatgattggcagatttaacatttatccttctcgtaattcacaaccctaaagttccatttactaataatttataattttgctggaacatgaatttgaatcttacatgcaacaattggattgagagttttgggagggcagtatgtgggacctgttcacatagtccatcagtctagcagccccatctcagtgtggctttgtttttgcaatttgactttgagtttgtggtaactcctgtggtgtaaatcattgcttcaggttctgagcaacagtgtatattatagctgcattgcaggtttcaggatttgcagggtatggggatgtatccaccattattgttaaagatttaccttagcagacacattagtatactcttctatttaaaaatcctttataaaagtggtattatatggctatcctggtattctttcatattgttagtactttgaaatttttgctgatgttcaattagtaaaattaatggcccctaacagcagttgtactgtttgtatgttaaacttgatacatttagaagttaatgttaaagcctaatcctaaatttttaaaaggtgaaaaagtttttactggcaattgggtggccttgggacctgtgtgaagagcatagactgtagtttggtggaaagagcaaagactttgaagttctcggattctgtgtgtattctgctcctagcagagtgacctcaggcaaatgactttataggca

SEQ ID NO: 161803 - DNA, 1936 bp, Homo sapiens
  Payload ID: 11582
  Gene Symbol: OSR1
  Gene Name: odd-skipped related transciption factor 1
  Uniprot ID: Q8TAX0
  ENST ID: ENST00000272223
  CDS Start-End: 346-1146
aaataagtaggcggctcggtgctaagggatgagtgagtcggagctcggcctctccccggcacgttctcagctgctcctggttcagacccagcgagggagccgcgagcgaggctcaccgtccccggcgtgcaggatccggggctgctgagcgctcgctcccgcgtgtccggcgcttggagtccccgcggcaggagaggagtcgggacactagagctccaggggcgcctgtgggctccagggcctccggcttccccagtccccttcagctaaagccccagagacgtgctcagccccaggacctctgcggaacaagatccggattgagaagccactgcaactaccgaaatgggcagcaaaaccttgccggcgccggtgcctatccacccttccctgcagctcaccaactactccttccttcaggcagtgaacggcctgcccacagtgccttcggaccatctgcccaacctgtatggtttcagcgcgttgcacgctgtgcacctgcatcagtggacgctgggctacccggccatgcacttgccgcgctcttctttctccaaagtgccgggcacggtgtccagcttggtggatgcgcgcttccagctgcccgcctttccctggttccctcatgtcattcaacccaagcccgagatcaccgctggaggcagcgttccagcgctcaagaccaagccgcgctttgattttgccaacctggccttggcagcaacgcaagaagatccggccaagctcggtcgcggggagggcccaggctcccctgcaggtgggctgggtgccctcctcgacgtgaccaagctgtctccagaaaagaagcccacaaggggacgtctgccttccaagaccaagaaggaattcgtctgcaagttctgtggccgccacttcaccaagtcctacaacctacttatccatgagcggacgcacaccgacgagcggccctacacctgtgacatctgccacaaagccttccggaggcaagaccacctgcgagaccacagatatattcactccaaagagaagcccttcaagtgtcaagagtgtgggaaaggattctgccagtccaggactctcgctgtccacaagacgctacactcacaggtgaaggagctcaaaacctccaagatcaaatgctaaatagaacctgtgggtcacaaggaccctaggcccagcggccctctcctccatagggaccagaagcctgactctggcgggcagcgggagaggcgctcgctcgggaccttccacctctccaacattgtcccctgggtccctggcgcacgcggcacttcagagccccgcccggggccgcgaccccgaccgtccctgctgctcccctaggacgcggctaaactcttggccaaaaggcggtactcacgtggcggaagggaaactgcattaaaaaaagaacgaaagctccgcggagccgcagcggcgcctctcccagaagtattactttttctattgttattttatacgttttcttttttatttttgtctttgaccatataagcttgtaactctgactgcggagagtgagtggagagaggagaggcaacgaagtccttagcactggcagctcccacctcctcctcccgcccctgcccccacccccggagcctgcaaaagtgtaatccctgtatctgcttcagcctcctgccctagggaccgcggggcagccccctcccagctcttgcagctcagctggcggccgtgggctccgggactaggagagcgggacggggacctcgggcctggggtctgcagggggcccggcctccgctgccgcgacactgcgagggagcagccagccaagagccgggcgttatattgcgattggcactttatgctgaccatcggtaacggacatttatcactggagttttttttttttttaactattaaataaacggttattttacaggca

SEQ ID NO: 161804 - DNA, 1838 bp, Homo sapiens
  Payload ID: 11583
  Gene Symbol: OSR2
  Gene Name: odd-skipped related transciption factor 2
  Uniprot ID: Q8N2R0
  ENST ID: ENST00000297565
  CDS Start-End: 497-1435
agcctggggagggacgcgggcggggacggagctcggcgtgcttgctgctggagggtgatggccctgcaaggctgtgggctccgacctcaccgggagtcgacagcgagaggttcgccgaagagcgaggttctgggcgagcgctgaacgccggccccaagcaccccgggtctttacacagtccgcgtccacagactctgacgaagacgtggatctgctctcgctttagctgctcgcggtcctccagatcatgtccgcgactcctgcgactccgcgcggaaaaaaaagtttgccaggcgtggactcaatgacctttccaagctgtgcgcctcgctgcctggaccgggtctgagcgcggctgcccaggttgacctttctgcgggagggctttctctacgtgctgttgtctcactgggtttttgtcggagccccacgccctccggcctctgattcctggaagaaagggttggtcccctcagcacccccagcatcccggaaaatggggagcaaggctctgccagcgcccatcccgctccacccgtcgctgcagctcaccaattactccttcctgcaggccgtgaacaccttcccggccacggtggaccacctgcagggcctgtacggtctcagcgcggtacagaccatgcacatgaaccactggacgctggggtatcccaatgtgcacgagatcacccgctccaccatcacggagatggcggcggcgcagggcctcgtggacgcgcgcttccccttcccggccctgccttttaccacccacctattccaccccaagcagggggccattgcccacgtcctcccagccctgcacaaggaccggccccgttttgactttgccaatttggcggtggctgccacgcaagaggatccgcctaagatgggagacctgagcaagctgagcccaggactgggtagccccatctcgggcctcagtaaattgactccggacagaaagccctctcgaggaaggttgccctccaaaacgaaaaaagagtttatctgcaagttttgcggcagacactttaccaaatcctacaatttgctcatccatgagaggacccacacggacgagaggccgtacacgtgtgacatctgccacaaggccttccggaggcaagatcacctgcgggatcacagatacatccattccaaagaaaaacccttcaaatgtcaggagtgtgggaaaggattttgtcagtctagaactctagcagttcacaaaactttacacatgcaggaatctccacacaaatgtcccacatgtggaagaacctttaatcagagaagtaatctgaaaactcaccttctcacccatacagacatcaagccctacagctgcgagcagtgcggcaaagtgttcaggcgaaactgtgatctgcggcggcacagcctgactcacaccccgcggcaggacttctagagaagcccaggatctgtcccgtgccgccgctgctcccctccccagacacctctccacgtctcctacccagggggtcgcatccctagcccttcactgaccccagctcttcccttgctgcagccgcacctgcagctccagggagttaactcttcttctgggggactgagaactgtagaaagccacacactactacatcccttcacaaagagtatatgctagtttcttgtagatattcacagctcattttagagctctgtacataatgttgtgggtctttgttttgttgttttgtttgctttgggatcttgttggatgcacttagatatggaaaatggaagccaaattttatctttaaagactgtattttcaaaataaaactttttcttgtttgtttcaaaactcc

SEQ ID NO: 161805 - DNA, 1736 bp, Homo sapiens
  Payload ID: 11583
  Gene Symbol: OSR2
  Gene Name: odd-skipped related transciption factor 2
  Uniprot ID: Q8N2R0
  ENST ID: ENST00000435298
  CDS Start-End: 481-1311
cgggcggggacggagctcggcgtgcttgctgctggagggtgatggccctgcaaggctgtgggctccgacctcaccgggagtcgacagcgagaggttcgccgaagagcgaggttctgggcgagcgctgaacgccggccccaagcaccccgggtctttacacagtccgcgtccacagactctgacgaagacgtggatctgctctcgctttagctgctcgcggtcctccagatcatgtccgcgactcctgcgactccgcgcggaaaaaaaagtttgccaggcgtggactcaatgacctttccaagctgtgcgcctcgctgcctggaccgggtctgagcgcggctgcccaggttgacctttctgcgggagggctttctctacgtgctgttgtctcactgggtttttgtcggagccccacgccctccggcctctgattcctggaagaaagggttggtcccctcagcacccccagcatcccggaaaatggggagcaaggctctgccagcgcccatcccgctccacccgtcgctgcagctcaccaattactccttcctgcaggccgtgaacaccttcccggccacggtggaccacctgcagggcctgtacggtctcagcgcggtacagaccatgcacatgaaccactggacgctggggtatcccaatgtgcacgagatcacccgctccaccatcacggagatggcggcggcgcagggcctcgtggacgcgcgcttccccttcccggccctgccttttaccacccacctattccaccccaagcagggggccattgcccacgtcctcccagccctgcacaaggaccggccccgttttgactttgccaatttggcggtggctgccacgcaagaggatccgcctaagatgggagacctgagcaagctgagcccaggactgggtagccccatctcgggcctcagtaaattgactccggacagaaagccctctcgaggaaggttgccctccaaaacgaaaaaagagtttatctgcaagttttgcggcagacactttaccaaatcctacaatttgctcatccatgagaggacccacacggacgagaggccgtacacgtgtgacatctgccacaaggccttccggaggcaagatcacctgcgggatcacagatacatccattccaaagaaaaacccttcaaatgtcaggagtgtgggaaaggattttgtcagtctagaactctagcagttcacaaaactttacacatgcagacatcaagccctacagctgcgagcagtgcggcaaagtgttcaggcgaaactgtgatctgcggcggcacagcctgactcacaccccgcggcaggacttctagagaagcccaggatctgtcccgtgccgccgctgctcccctccccagacacctctccacgtctcctacccagggggtcgcatccctagcccttcactgaccccagctcttcccttgctgcagccgcacctgcagctccagggagttaactcttcttctgggggactgagaactgtagaaagccacacactactacatcccttcacaaagagtatatgctagtttcttgtagatattcacagctcattttagagctctgtacataatgttgtgggtctttgttttgttgttttgtttgctttgggatcttgttggatgcacttagatatggaaaatggaagccaaattttatctttaaagactgtattttcaaaataaaactttttcttgtttgtttcaaaa

SEQ ID NO: 161806 - DNA, 2126 bp, Homo sapiens
  Payload ID: 11583
  Gene Symbol: OSR2
  Gene Name: odd-skipped related transciption factor 2
  Uniprot ID: Q8N2R0
  ENST ID: ENST00000457907
  CDS Start-End: 422-1723
cggggccgctactaaagcccaagactcccggcctggggcagcctggggagggacgcgggcggggacggagctcggcgtgcttgctgctggagggtgatggccctgcaaggctgtgggctccgacctcaccgggagtcgacagcgagaggttcgccgaagagcgaggttctgggcgagcgctgaacgccggccccaagcaccccgggtctttacacagtccgcgtccacagactctgacgaagacgtggatctgctctcgctttagctgctcgcggtcctccagatcatgtccgcgactcctgcgactccgcgcggaaaaaaaagtttgccaggcgtggactcaatgacctttccaagctgtgcgcctcgctgcctggaccgggtctgagcgcggctgcccaggttgacctttctgcgggagatggggctgagggcagaggaaggaaaaagaaaacctccgaggtcagtgcggggcgaggtgagcccctcccagggccctctggcccaggaggatgaagcgcgccggcttcgctcttgcacgccggcttgccatccgggtaagcgcgggaaaggcggccacagggcgcggcggcagcgcagcgcgtgggatctcacgacccatccgttaacccaccgttcccaggagctccgaggcgcagcggcgacagagggctttctctacgtgctgttgtctcactgggtttttgtcggagccccacgccctccggcctctgattcctggaagaaagggttggtcccctcagcacccccagcatcccggaaaatggggagcaaggctctgccagcgcccatcccgctccacccgtcgctgcagctcaccaattactccttcctgcaggccgtgaacaccttcccggccacggtggaccacctgcagggcctgtacggtctcagcgcggtacagaccatgcacatgaaccactggacgctggggtatcccaatgtgcacgagatcacccgctccaccatcacggagatggcggcggcgcagggcctcgtggacgcgcgcttccccttcccggccctgccttttaccacccacctattccaccccaagcagggggccattgcccacgtcctcccagccctgcacaaggaccggccccgttttgactttgccaatttggcggtggctgccacgcaagaggatccgcctaagatgggagacctgagcaagctgagcccaggactgggtagccccatctcgggcctcagtaaattgactccggacagaaagccctctcgaggaaggttgccctccaaaacgaaaaaagagtttatctgcaagttttgcggcagacactttaccaaatcctacaatttgctcatccatgagaggacccacacggacgagaggccgtacacgtgtgacatctgccacaaggccttccggaggcaagatcacctgcgggatcacagatacatccattccaaagaaaaacccttcaaatgtcaggagtgtgggaaaggattttgtcagtctagaactctagcagttcacaaaactttacacatgcaggaatctccacacaaatgtcccacatgtggaagaacctttaatcagagaagtaatctgaaaactcaccttctcacccatacagacatcaagccctacagctgcgagcagtgcggcaaagtgttcaggcgaaactgtgatctgcggcggcacagcctgactcacaccccgcggcaggacttctagagaagcccaggatctgtcccgtgccgccgctgctcccctccccagacacctctccacgtctcctacccagggggtcgcatccctagcccttcactgaccccagctcttcccttgctgcagccgcacctgcagctccagggagttaactcttcttctgggggactgagaactgtagaaagccacacactactacatcccttcacaaagagtatatgctagtttcttgtagatattcacagctcattttagagctctgtacataatgttgtgggtctttgttttgttgttttgtttgctttgggatcttgttggatgcacttagatatggaaaatggaagccaaattttatctttaaagactgtattttcaaaataaaactttttcttgtttgtttcaaaactcc

SEQ ID NO: 161807 - DNA, 1048 bp, Homo sapiens
  Payload ID: 11583
  Gene Symbol: OSR2
  Gene Name: odd-skipped related transciption factor 2
  ENST ID: ENST00000518199
  CDS Start-End: 410-1048
caggagctccgaggcgcagcggcgacagaggttcgccccggcctgctagcattggcattgcggttgactgagcttcgcctaacaggcttggggagggtgggctgggctgggctgggctgggctgggtgctgcccggctgtccgcctttcgttttcctgggaccgaggagtcttccgctccgtatctgcctagagtctgaatccgactttctttcctttgggcacgcgctcgccagtggagcacttcttgttctggccccgggctgatctgcacgcggacttgagcaggtgccaagggctttctctacgtgctgttgtctcactgggtttttgtcggagccccacgccctccggcctctgattcctggaagaaagggttggtcccctcagcacccccagcatcccggaaaatggggagcaaggctctgccagcgcccatcccgctccacccgtcgctgcagctcaccaattactccttcctgcaggccgtgaacaccttcccggccacggtggaccacctgcagggcctgtacggtctcagcgcggtacagaccatgcacatgaaccactggacgctggggtatcccaatgtgcacgagatcacccgctccaccatcacggagatggcggcggcgcagggcctcgtggacgcgcgcttccccttcccggccctgccttttaccacccacctattccaccccaagcagggggccattgcccacgtcctcccagccctgcacaaggaccggccccgttttgactttgccaatttggcggtggctgccacgcaagaggatccgcctaagatgggagacctgagcaagctgagcccaggactgggtagccccatctcgggcctcagtaaattgactccggacagaaagccctctcgaggaaggttgccctccaaaacgaaaaaagagtttatctgcaagttttgcggcagacactttaccaaatcctacaatttgctcatccatgagaggacccacacggacgagaggccgtacacgtgtgacatctgccacaaggccttccggaggcaagat

SEQ ID NO: 161808 - DNA, 1519 bp, Homo sapiens
  Payload ID: 11583
  Gene Symbol: OSR2
  Gene Name: odd-skipped related transciption factor 2
  ENST ID: ENST00000523368
  CDS Start-End: 497-1363
agcctggggagggacgcgggcggggacggagctcggcgtgcttgctgctggagggtgatggccctgcaaggctgtgggctccgacctcaccgggagtcgacagcgagaggttcgccgaagagcgaggttctgggcgagcgctgaacgccggccccaagcaccccgggtctttacacagtccgcgtccacagactctgacgaagacgtggatctgctctcgctttagctgctcgcggtcctccagatcatgtccgcgactcctgcgactccgcgcggaaaaaaaagtttgccaggcgtggactcaatgacctttccaagctgtgcgcctcgctgcctggaccgggtctgagcgcggctgcccaggttgacctttctgcgggagggctttctctacgtgctgttgtctcactgggtttttgtcggagccccacgccctccggcctctgattcctggaagaaagggttggtcccctcagcacccccagcatcccggaaaatggggagcaaggctctgccagcgcccatcccgctccacccgtcgctgcagctcaccaattactccttcctgcaggccgtgaacaccttcccggccacggtggaccacctgcagggcctgtacggtctcagcgcggtacagaccatgcacatgaaccactggacgctggggtatcccaatgtgcacgagatcacccgctccaccatcacggagatggcggcggcgcagggcctcgtggacgcgcgcttccccttcccggccctgccttttaccacccacctattccaccccaagcagggggccattgcccacgtcctcccagccctgcacaaggaccggccccgttttgactttgccaatttggcggtggctgccacgcaagaggatccgcctaagatgggagacctgagcaagctgagcccaggactgggtagccccatctcgggcctcagtaaattgactccggacagaaagccctctcgaggaaggttgccctccaaaacgaaaaaagagtttatctgcaagttttgcggcagacactttaccaaatcctacaatttgctcatccatgagaggacccacacggacgagaggccgtacacgtgtgacatctgccacaaggccttccggaggcaagatcacctgcgggatcacagatacatccattccaaagaaaaacccttcaaatgtcaggagtgtgggaaaggattttgtcagtctagaactctagcagttcacaaaactttacacatgcaggtaagtttgttttcttgtttaaaaacagtggctggttcgtgttatcattactgctttgcaaaaggtgttcaatggcagactctttctcttaaaaggctctatttagattagttctctaggtggggaaaagcaacacttgatttctttaatacataaaattaatcttgtttaacataaagcatttttatatttttctcaaaaaacggccactttgattatcataaatcctaattttagaatttttttcatccaatctgtcctgcattt

SEQ ID NO: 161809 - DNA, 853 bp, Homo sapiens
  Payload ID: 11583
  Gene Symbol: OSR2
  Gene Name: odd-skipped related transciption factor 2
  ENST ID: ENST00000520951
  CDS Start-End: 43-853
ggggcgaggtgagcccctcccagggccctctggcccaggaggatgaagcgcgccggcttcgctcttgcacgccggcttgccatccggggctttctctacgtgctgttgtctcactgggtttttgtcggagccccacgccctccggcctctgattcctggaagaaagggttggtcccctcagcacccccagcatcccggaaaatggggagcaaggctctgccagcgcccatcccgctccacccgtcgctgcagctcaccaattactccttcctgcaggccgtgaacaccttcccggccacggtggaccacctgcagggcctgtacggtctcagcgcggtacagaccatgcacatgaaccactggacgctggggtatcccaatgtgcacgagatcacccgctccaccatcacggagatggcggcggcgcagggcctcgtggacgcgcgcttccccttcccggccctgccttttaccacccacctattccaccccaagcagggggccattgcccacgtcctcccagccctgcacaaggaccggccccgttttgactttgccaatttggcggtggctgccacgcaagaggatccgcctaagatgggagacctgagcaagctgagcccaggactgggtagccccatctcgggcctcagtaaattgactccggacagaaagccctctcgaggaaggttgccctccaaaacgaaaaaagagtttatctgcaagttttgcggcagacactttaccaaatcctacaatttgctcatccatgagaggacccacacggacgagaggccgtacacgtgtgacatctgccacaaggccttccggaggcaagatcacctgcgggatc

SEQ ID NO: 161810 - DNA, 1528 bp, Homo sapiens
  Payload ID: 11583
  Gene Symbol: OSR2
  Gene Name: odd-skipped related transciption factor 2
  Uniprot ID: Q8N2R0
  ENST ID: ENST00000522510
  CDS Start-End: 529-1467
tcgctttagctgctcgcggtcctccagatcatgtccgcgactcctgcgactccgcgcggaaaaaaaagtttgccaggcgtggactcaatgacctttccaagctgtgcgcctcgctgcctggaccgggtctgagcgcggctgcccaggttgacctttctgcgggagatggggctgagggcagaggaaggaaaaagaaaacctccgaggtcagtgcggggcgaggtgagcccctcccagggccctctggcccaggaggatgaagcgcgccggcttcgctcttgcacgccggcttgccatccgggtaagcgcgggaaaggcggccacagggcgcggcggcagcgcagcgcgtgggatctcacgacccatccgttaacccaccgttcccaggagctccgaggcgcagcggcgacagagggctttctctacgtgctgttgtctcactgggtttttgtcggagccccacgccctccggcctctgattcctggaagaaagggttggtcccctcagcacccccagcatcccggaaaatggggagcaaggctctgccagcgcccatcccgctccacccgtcgctgcagctcaccaattactccttcctgcaggccgtgaacaccttcccggccacggtggaccacctgcagggcctgtacggtctcagcgcggtacagaccatgcacatgaaccactggacgctggggtatcccaatgtgcacgagatcacccgctccaccatcacggagatggcggcggcgcagggcctcgtggacgcgcgcttccccttcccggccctgccttttaccacccacctattccaccccaagcagggggccattgcccacgtcctcccagccctgcacaaggaccggccccgttttgactttgccaatttggcggtggctgccacgcaagaggatccgcctaagatgggagacctgagcaagctgagcccaggactgggtagccccatctcgggcctcagtaaattgactccggacagaaagccctctcgaggaaggttgccctccaaaacgaaaaaagagtttatctgcaagttttgcggcagacactttaccaaatcctacaatttgctcatccatgagaggacccacacggacgagaggccgtacacgtgtgacatctgccacaaggccttccggaggcaagatcacctgcgggatcacagatacatccattccaaagaaaaacccttcaaatgtcaggagtgtgggaaaggattttgtcagtctagaactctagcagttcacaaaactttacacatgcaggaatctccacacaaatgtcccacatgtggaagaacctttaatcagagaagtaatctgaaaactcaccttctcacccatacagacatcaagccctacagctgcgagcagtgcggcaaagtgttcaggcgaaactgtgatctgcggcggcacagcctgactcacaccccgcggcaggacttctagagaagcccaggatctgtcccgtgccgccgctgctcccctccccagacacctctccacgtct

SEQ ID NO: 161811 - DNA, 1319 bp, Homo sapiens
  Payload ID: 11584
  Gene Symbol: ODAM
  Gene Name: odontogenic, ameloblast asssociated
  Uniprot ID: A1E959
  ENST ID: ENST00000396094
  CDS Start-End: 49-888
ttataaagctaaagatcacaacttattttctagatatatcatacgaaaatgaaaattataattcttcttggattcctgggagccacattgtcagccccacttatcccacagcgtctcatgtctgccagcaatagcaatgagttacttcttaatcttaataatggtcaacttttgccactacaacttcagggcccacttaattcatggattccacctttctctggaattttacaacagcagcagcaggctcaaattccaggactctcccagttctctttatcagctctagaccagtttgctggactgctcccaaatcagatacccttaacaggagaggccagttttgcccaaggagcccaggcaggccaagttgatcccttacagcttcaaacaccgcctcagacacaaccaggccccagtcacgtgatgccctatgtattctccttcaaaatgcctcaagagcaaggacagatgtttcaatactatccagtttacatggtcctaccctgggaacaacctcagcaaacagttccaaggtcacctcaacaaacaagacagcaacagtatgaggagcagataccattctatgctcaatttggatacattccacaactagcagaacctgctatatcaggaggacagcagcaactagcttttgatccccaactaggcacagctcctgaaattgctgtgatgtcaacaggagaagagataccatatttacaaaaagaagcgatcaactttagacatgacagtgcaggagttttcatgccctcaacttcaccaaaacccagcacaaccaatgttttcacttctgctgtagaccaaactattaccccagagctcccagaagagaaggacaagactgacagcctaagggaaccataagaagttgccctgatcattcagacattttgggaaaaagatgtggccatgccttggatataattttaggctattagcttcctcaatactagtatcagttctttggaatacatgaaatatcttgactcttctcctaaatttgtttttacttatacatgttattaaactctttaaatatgtcatagaaaataatacaatcatgtaatgagtcttgtcttacaaaattatatgtctcttcaaatatcctatcattgtataatatggaatataataacacagaataaagctagtatcattaaatcaattggataattgcattagtaaatgatgcctctgcaaaatggtagtacccatgaagatatgtatattgtcattggatgtatgatgagtgttgtgattggaactgatgaagtaaaataagtatctagatttga

SEQ ID NO: 161812 - DNA, 605 bp, Homo sapiens
  Payload ID: 11584
  Gene Symbol: ODAM
  Gene Name: odontogenic, ameloblast asssociated
  ENST ID: ENST00000510847
  CDS Start-End: 1-93
caaacaccgcctcagacacaaccaggccccagtcacgtgatgccctatgtattctccttcaaaatgcctcaagagcaaggacagaacatctaataccacattctgcagaatgatgattctcaaaaatataggatgtttcaatactatccagtttacatggtcctaccctgggaacaacctcagcaaacagttccaaggtcacctcaacaaacaagacagcaacagtatgaggagcagataccattctatgctcaatttggatacattccacaactagcagaacctgctatatcaggaggacagcagcaactagcttttgatccccaactaggcacagctcctgaaattgctgtgatgtcaacaggagaagagataccatatttacaaaaagaagcgatcaactttagacatgacagtgcaggagttttcatgccctcaacttcaccaaaacccagcacaaccaatgttttcacttctgctgtagaccaaactattaccccagagctcccagaagagaaggacaagactgacagcctaagggaaccataagaagttgccctgatcattcagacattttgggaaaaagatgtggccatgccttggat

SEQ ID NO: 161813 - DNA, 780 bp, Homo sapiens
  Payload ID: 11584
  Gene Symbol: ODAM
  Gene Name: odontogenic, ameloblast asssociated
  ENST ID: ENST00000510709
  CDS Start-End: 20-780
ctagatatatcatacgaaaatgaaaattataattcttcttggattcctgggagccacattgtcagccccattacttcttaatcttaataatggtcaacttttgccactacaacttcagggcccacttaattcatggattccacctttctctggaattttacaacagcagcagcaggctcaaattccaggactctcccagttctctttatcagctctagaccagtttgctggactgctcccaaatcagatacccttaacaggagaggccagttttgcccaaggagcccaggcaggccaagttgatcccttacagcttcaaacaccgcctcagacacaaccaggccccagtcacgtgatgccctatgtattctccttcaaaatgcctcaagagcaaggacagatgtttcaatactatccagtttacatggtcctaccctgggaacaacctcagcaaacagttccaaggtcacctcaacaaacaagacagcaacagtatgaggagcagataccattctatgctcaatttggatacattccacaactagcagaacctgctatatcaggaggacagcagcaactagcttttgatccccaactaggcacagctcctgaaattgctgtgatgtcaacaggagaagagataccatatttacaaaaagaagcgatcaactttagacatgacagtgcaggagttttcatgccctcaacttcaccaaaacccagcacaaccaatgttttcacttctgctgtagaccaaactattaccccagagctcccaga

SEQ ID NO: 161814 - DNA, 680 bp, Homo sapiens
  Payload ID: 11584
  Gene Symbol: ODAM
  Gene Name: odontogenic, ameloblast asssociated
  ENST ID: ENST00000514097
  CDS Start-End: 1-651
ggcccacttaattcatggattccacctttctctggaattttacaacagcagcagcaggctcaaattccaggactctcccagttctctttatcagctctagaccagtttgctggactgctcccaaatcagatacccttaacaggagaggccagttttgcccaaggagcccaggcaggccaagttgatcccttacagcttcaaacaccgcctcagacacaaccaggccccagtcacgtgatgccctatgtattctccttcaaaatgcctcaagagcaaggacagatgtttcaatactatccagtttacatggtcctaccctgggaacaacctcagcaaacagttccaaggtcacctcaacaaacaagacagcaacagtatgaggagcaggctatatcaggaggacagcagcaactagcttttgatccccaactaggcacagctcctgaaattgctgtgatgtcaacaggagaagagataccatatttacaaaaagaagcgatcaactttagacatgacagtgcaggagttttcatgccctcaacttcaccaaaacccagcacaaccaatgttttcacttctgctgtagaccaaactattaccccagagctcccagaagagaaggacaagactgacagcctaagggaaccataagaagttgccctgatcattcagacattttg

SEQ ID NO: 161815 - DNA, 607 bp, Homo sapiens
  Payload ID: 11585
  Gene Symbol: OBP2A
  Gene Name: odorant binding protein 2A
  ENST ID: ENST00000342114
  CDS Start-End: 43-486
cgcccagtgacctgccgaggtcggcagcacagagctctggagatgaagaccctgttcctgggtgtcacgctcggcctggccgctgccctgtccttcaccctggaggaggaggatgagggaggatcggtgcatccagaagaaaatcctgatgcggaagacggaggagcctggcaaattcagcgcctatgggggcaggaagctcatatacctgcaggagctgcccgggacggacgactacgtcttttactgcaaagaccagcgccgtgggggcctgcgctacatgggaaagcttgtggcatctgctccctgcagggccgtgccgctgtccccaccttggctcacctggccacctcacctgcaggtaggaatcctaataccaacctggaggccctggaagaatttaagaaattggtgcagcacaagggactctcggaggaggacattttcatgcccctgcagacgggaagctgcgttctcgaacactaggcagcccccgggtctgcacctccagagcccaccctaccaccagacacagagcccggaccacctggacctaccctccagccatgacccttccctgctcccacccacctgactccaaataaag

SEQ ID NO: 161816 - DNA, 741 bp, Homo sapiens
  Payload ID: 11585
  Gene Symbol: OBP2A
  Gene Name: odorant binding protein 2A
  ENST ID: ENST00000340780
  CDS Start-End: 43-729
cgcccagtgacctgccgaggtcggcagcacagagctctggagatgaagaccctgttcctgggtgtcacgctcggcctggccgctgccctgtccttcaccctggaggaggaggatatcacagggacctggtacgtgaaggccatggtggtcgataaggactttccggaggacaggaggcccaggaaggtgtccccagtgaaggtgacagccctgggcggtgggaacttggaagccacgttcaccttcatgagggaggatcggtgcatccagaagaaaatcctgatgcggaagacggaggagcctggcaaattcagcgcctatgggggcaggaagctcatatacctgcaggagctgcccgggacggacgactacgtcttttactgcaaagaccagcgccgtgggggcctgcgctacatgggaaagcttgtggcatctgctccctgcagggccgtgccgctgtccccaccttggctcacctggccacctcacctgcaggtaggaatcctaataccaacctggaggccctggaagaatttaagaaattggtgcagcacaagggactctcggaggaggacattttcatgcccctgcagacgggaagctgcgttctcgaacactaggcagcccccgggtctgcacctccagagcccaccctaccaccagacacagagcccggaccacctggacctaccctccagccatgacccttccctgctcccacccacctgactccaaataaag

SEQ ID NO: 161817 - DNA, 689 bp, Homo sapiens
  Payload ID: 11585
  Gene Symbol: OBP2A
  Gene Name: odorant binding protein 2A
  Uniprot ID: Q9NY56
  ENST ID: ENST00000371776
  CDS Start-End: 43-555
cgcccagtgacctgccgaggtcggcagcacagagctctggagatgaagaccctgttcctgggtgtcacgctcggcctggccgctgccctgtccttcaccctggaggaggaggatatcacagggacctggtacgtgaaggccatggtggtcgataaggactttccggaggacaggaggcccaggaaggtgtccccagtgaaggtgacagccctgggcggtgggaacttggaagccacgttcaccttcatgagggaggatcggtgcatccagaagaaaatcctgatgcggaagacggaggagcctggcaaattcagcgcctatgggggcaggaagctcatatacctgcaggagctgcccgggacggacgactacgtcttttactgcaaagaccagcgccgtgggggcctgcgctacatgggaaagcttgtgggtaggaatcctaataccaacctggaggccctggaagaatttaagaaattggtgcagcacaagggactctcggaggaggacattttcatgcccctgcagacgggaagctgcgttctcgaacactaggcagcccccgggtctgcacctccagagcccaccctaccaccagacacagagcccggaccacctggacctaccctccagccatgacccttccctgctcccacccacctgactccaaataaagagcttctccccca

SEQ ID NO: 161818 - DNA, 725 bp, Homo sapiens
  Payload ID: 11585
  Gene Symbol: OBP2A
  Gene Name: odorant binding protein 2A
  ENST ID: ENST00000471886
  CDS Start-End: 43-483
cgcccagtgacctgccgaggtcggcagcacagagctctggagatgaagaccctgttcctgggtgtcacgctcggcctggccgctgccctgtccttcaccctggaggaggaggatatcacagggacctggtacgtgaaggccatggtggtcgataaggactttccggaggacaggaggcccaggaaggtgtccccagtgaaggtgacagccctgggcggtgggaacttggaagccacgttcaccttcatgagggaggatcggtgcatccagaagaaaatcctgatgcggaagacggaggagcctggcaaattcagcgcctatgggggcaggaagctcatatacctgcaggagctgcccgggacggacgactacgtcttttactgcaaagaccagcgccgtgggggcctgcgctacatgggaaagcttgtggggccgtgccgctgtccccaccttggctcacctggccacctcacctgcaggtaggaatcctaataccaacctggaggccctggaagaatttaagaaattggtgcagcacaagggactctcggaggaggacattttcatgcccctgcagacgggaagctgcgttctcgaacactaggcagcccccgggtctgcacctccagagcccaccctaccaccagacacagagcccggaccacctggacctaccctccagccatgacccttccctgctcccacccacctgactccaaataaag

SEQ ID NO: 161819 - DNA, 914 bp, Homo sapiens
  Payload ID: 11585
  Gene Symbol: OBP2A
  Gene Name: odorant binding protein 2A
  Uniprot ID: Q9NY56
  ENST ID: ENST00000539850
  CDS Start-End: 27-539
gaggtcggcagcacagagctctggagatgaagaccctgttcctgggtgtcacgctcggcctggccgctgccctgtccttcaccctggaggaggaggatatcacagggacctggtacgtgaaggccatggtggtcgataaggactttccggaggacaggaggcccaggaaggtgtccccagtgaaggtgacagccctgggcggtgggaacttggaagccacgttcaccttcatgagggaggatcggtgcatccagaagaaaatcctgatgcggaagacggaggagcctggcaaattcagcgcctatgggggcaggaagctcatatacctgcaggagctgcccgggacggacgactacgtcttttactgcaaagaccagcgccgtgggggcctgcgctacatgggaaagcttgtgggtaggaatcctaataccaacctggaggccctggaagaatttaagaaattggtgcagcacaagggactctcggaggaggacattttcatgcccctgcagacgggaagctgcgttctcgaacactaggcgaggcctccctccggctccctcaggtgtcagctcggcccatcgccccctgcacctgtccccactcggtctactcccccccacccactcaccaaggatgctcagaggcctgcccagtcattggaggagctgaggctgctctggagccccgaggctgcccagcagtggccgatgtggaagctgcagagcctggggagggagctctgggcctggcctctgccctaccctgcagcctccctgacctctgctcctcttcccagcacagcagcccccgggtctgcacctccagagcccaccctaccaccagacacagagcccggaccacctggacctaccctccagccatgacccttccctgctcccacccacctgact

SEQ ID NO: 161820 - DNA, 542 bp, Homo sapiens
  Payload ID: 11585
  Gene Symbol: OBP2A
  Gene Name: odorant binding protein 2A
  ENST ID: ENST00000537747
  CDS Start-End: 43-300
cgcccagtgacctgccgaggtcggcagcacagagctctggagatgaagaccctgttcctgggtgtcacgctcggcctggccgctgccctgtccttcaccctggaggaggaggatgagggaggatcggtgcatccagaagaaaatcctgatgcggaagacggaggagcctggcaaattcagcgcctatgggggcaggaagctcatatacctgcaggagctgcccgggacggacgactacgtcttttactgcaaagaccagcgccgtgggggcctgcgctacatgggaaagcttgtgggtaggaatcctaataccaacctggaggccctggaagaatttaagaaattggtgcagcacaagggactctcggaggaggacattttcatgcccctgcagacgggaagctgcgttctcgaacactaggcagcccccgggtctgcacctccagagcccaccctaccaccagacacagagcccggaccacctggacctaccctccagccatgacccttccctgctcccacccacctgactccaaataaag

SEQ ID NO: 161821 - DNA, 705 bp, Homo sapiens
  Payload ID: 11585
  Gene Symbol: OBP2A
  Gene Name: odorant binding protein 2A
  ENST ID: ENST00000619164
  CDS Start-End: 43-705
cgcccagtgacctgccgaggtcggcagcacagagctctggagatgaagaccctgttcctgggtgtcacgctcggcctggccgctgccctgtccttcaccctggaggaggaggatatcacagggacctggtacgtgaaggccatggtggtcgataaggactttccggaggacaggaggcccaggaaggtgtccccagtgaaggtgacagccctgggcggtgggaacttggaagccacgttcaccttcatgagggaggatcggtgcatccagaagaaaatcctgatgcggaagacggaggagcctggcaaattcagcgcctatgggggcaggaagctcatatacctgcaggagctgcccgggacggacgactacgtcttttactgcaaagaccagcgccgtgggggcctgcgctacatgggaaagcttgtggcatctgctccctgcagggccgtgccgctgtccccaccttggctcacctggccacctcacctgcaggtaggaatcctaataccaacctggaggccctggaagaatttaagaaattggtgcagcacaagggactctcggaggaggacattttcatgcccctgcagacgggaagctgcgttctcgaacactagggtgacccccgggtctgcacctccagagcccaccctaccaccagacacagagcccggaccacctggacctaccctccagccatga

SEQ ID NO: 161822 - DNA, 702 bp, Homo sapiens
  Payload ID: 11586
  Gene Symbol: OBP2B
  Gene Name: odorant binding protein 2B
  ENST ID: ENST00000372032
  CDS Start-End: 29-691
ccgaggtcggcagcacagagctctggagatgaagaccctgttcctgggtgtcacgctcggcctggccgctgccctgtccttcaccctggaggaggaggatatcacagggacctggtacgtgaaggccatggtggtcgataaggactttccggaggacaggaggcccaggaaggtgtccccagtgaaggtgacagccctgggcggtgggaagttggaagccacgttcaccttcatgagggaggataggtgcatccagaagaaaatcctgatgcggaagacggaggagcctggcaaatacagcgcctatgggggcaggaagctcatgtacctgcaggagctgcccaggagggaccactacatcttttactgcaaagaccagcaccatgggggcctgctccacatgggaaagcttgtggcatctgctccctgcagggccgtgccgctgtccccacgtcggctcacctggccacctcacctgcaggtaggaattctgataccaaccgggaggccctggaagaatttaagaaattggtgcagcgcaagggactctcggaggaggacattttcacgcccctgcagacgggaagctgcgttcccgaacactaggcaggcccccgggtctgcacctccagagcccaccctaccaccagacacagagcctggaccacctggacctaccctccagccatgacccttccctgc

SEQ ID NO: 161823 - DNA, 691 bp, Homo sapiens
  Payload ID: 11586
  Gene Symbol: OBP2B
  Gene Name: odorant binding protein 2B
  Uniprot ID: Q9NPH6
  ENST ID: ENST00000372034
  CDS Start-End: 43-555
cgcccagtgacctgccgaggtcggcagcacagagctctggagatgaagaccctgttcctgggtgtcacgctcggcctggccgctgccctgtccttcaccctggaggaggaggatatcacagggacctggtacgtgaaggccatggtggtcgataaggactttccggaggacaggaggcccaggaaggtgtccccagtgaaggtgacagccctgggcggtgggaagttggaagccacgttcaccttcatgagggaggataggtgcatccagaagaaaatcctgatgcggaagacggaggagcctggcaaatacagcgcctatgggggcaggaagctcatgtacctgcaggagctgcccaggagggaccactacatcttttactgcaaagaccagcaccatgggggcctgctccacatgggaaagcttgtgggtaggaattctgataccaaccgggaggccctggaagaatttaagaaattggtgcagcgcaagggactctcggaggaggacattttcacgcccctgcagacgggaagctgcgttcccgaacactaggcagcccccgggtctgcacctccagagcccaccctaccaccagacacagagcctggaccacctggacctaccctccagccatgacccttccctgctcccacccacctgactccaaataaagtccttctcccccagc

SEQ ID NO: 161824 - DNA, 797 bp, Homo sapiens
  Payload ID: 11586
  Gene Symbol: OBP2B
  Gene Name: odorant binding protein 2B
  Uniprot ID: Q9NPH6
  ENST ID: ENST00000473737
  CDS Start-End: 43-540
cgcccagtgacctgccgaggtcggcagcacagagctctggagatgaagaccctgttcctgggtgtcacgctcggcctggccgctgccctgtccttcaccctggaggaggaggatatcacagggacctggtacgtgaaggccatggtggtcgataaggactttccggaggacaggaggcccaggaaggtgtccccagtgaaggtgacagccctgggcggtgggaagttggaagccacgttcaccttcatgagggaggataggtgcatccagaagaaaatcctgatgcggaagacggaggagcctggcaaatacagcgcctgcttgtccgcagtcgagatggaccagatcacgcctgccctctgggaggccctagccattgacacattgaggaagctgaggattgggacaaggaggccaaggattagatgggggcaggaagctcatgtacctgcaggagctgcccaggagggaccactacatcttttactgcaaagaccagcaccatgggggcctgctccacatgggaaagcttgtgggtaggaattctgataccaaccgggaggccctggaagaatttaagaaattggtgcagcgcaagggactctcggaggaggacattttcacgcccctgcagacgggaagctgcgttcccgaacactaggcagcccccgggtctgcacctccagagcccaccctaccaccagacacagagcctggaccacctggacctaccctccagccatgacccttccctgctcccacccacctgactccaaataaagtccttctcccccagc

SEQ ID NO: 161825 - DNA, 961 bp, Homo sapiens
  Payload ID: 11586
  Gene Symbol: OBP2B
  Gene Name: odorant binding protein 2B
  Uniprot ID: Q9NPH6
  ENST ID: ENST00000618116
  CDS Start-End: 52-564
ttgttcagacgcccagtgacctgccgaggtcggcagcacagagctctggagatgaagaccctgttcctgggtgtcacgctcggcctggccgctgccctgtccttcaccctggaggaggaggatatcacagggacctggtacgtgaaggccatggtggtcgataaggactttccggaggacaggaggcccaggaaggtgtccccagtgaaggtgacagccctgggcggtgggaagttggaagccacgttcaccttcatgagggaggataggtgcatccagaagaaaatcctgatgcggaagacggaggagcctggcaaatacagcgcctatgggggcaggaagctcatgtacctgcaggagctgcccaggagggaccactacatcttttactgcaaagaccagcaccatgggggcctgctccacatgggaaagcttgtgggtaggaattctgataccaaccgggaggccctggaagaatttaagaaattggtgcagcgcaagggactctcggaggaggacattttcacgcccctgcagacgggaagctgcgttcccgaacactaggcgaggcctccctccggctccctcaggtgtcagctcagcccatcgccccctgcacctgtccccacgcggtccactccccaccatccacccaccaaggatgctcagaggcctgcccagtcattggaggagctgaggtcgctctggagccccgaggttgcccagcagtggccgatgtgggggctgcagagcctggggagggagctctggccctggcctctgccctaccctgcagcctccctgacctctgctcctcttcccagcacagcagcccccgggtctgcacctccagagcccaccctaccaccagacacagagcctggaccacctggacctaccctccagccatgacccttccctgctcccacccacctgactccaaataaagtccttctccccc

SEQ ID NO: 161826 - DNA, 961 bp, Homo sapiens; identical to SEQ ID NO: 161825
  Payload ID: 11587
  Gene Symbol:
  Gene Name: Odorant-binding protein 2b [Source:UniProtKB/Swiss-Prot
  Acc:Q9NPH6]
  Uniprot ID: Q9NPH6
  ENST ID: ENST00000628865
  CDS Start-End: 52-564

SEQ ID NO: 161827 - DNA, 797 bp, Homo sapiens; identical to SEQ ID NO: 161824
  Payload ID: 11587
  Gene Symbol:
  Gene Name: Odorant-binding protein 2b [Source:UniProtKB/Swiss-Prot
  Acc:Q9NPH6]
  Uniprot ID: Q9NPH6
  ENST ID: ENST00000630166
  CDS Start-End: 43-540

SEQ ID NO: 161828 - DNA, 702 bp, Homo sapiens; identical to SEQ ID NO: 161822
  Payload ID: 11587
  Gene Symbol:
  Gene Name: Odorant-binding protein 2b [Source:UniProtKB/Swiss-Prot
  Acc:Q9NPH6]
  ENST ID: ENST00000629408
  CDS Start-End: 29-691

SEQ ID NO: 161829 - DNA, 691 bp, Homo sapiens; identical to SEQ ID NO: 161823
  Payload ID: 11587
  Gene Symbol:
  Gene Name: Odorant-binding protein 2b [Source:UniProtKB/Swiss-Prot
  Acc:Q9NPH6]
  Uniprot ID: Q9NPH6
  ENST ID: ENST00000627758
  CDS Start-End: 43-555

SEQ ID NO: 161830 - DNA, 1767 bp, Homo sapiens
  Payload ID: 11588
  Gene Symbol: OLAH
  Gene Name: oleoyl-ACP hydrolase
  Uniprot ID: Q9NV23
  ENST ID: ENST00000378217
  CDS Start-End: 188-1144
agagttcatctcaaagcctggcaaggattggagaggtcaataagagtcagcgcctttaaaaagaaatctactcactcttctgtgtgcataaggccgagcagaggttcttcgtctcaagaggaactgacttctgttgagcactcaacacgccacagagaccagccatcttgcaacctcacctcacagcatggagagaggagaccaacctaagagaaccaggaatgaaaacattttcaactgcttatacaaaaaccctgaggcaacttttaagctgatttgctttccctggatgggaggtggctccactcattttgccaaatggggccaagatactcatgatttgctggaagagacagcatctcaccatgttgccaaggctggtctcaaactccggcgctcaagtgatcctcctgcttcagcctacccatgtgctggcgtgagccaccgtaggcgtgagccaccgtgcctggccaaaattcttggtctattctggattctaattttttttatgcactccttaaggcttcctggaagagaaagcagagttgaagaacctcttgaaaatgacatctcccagttagttgatgaagttgtttgtgctctgcagccagtcatccaggataaaccatttgcattttttggccacagtatgggatcctacattgcttttaggactgcactaggtctaaaagaaaacaatcaaccagaaccattgcatttatttttgtcaagtgcaactcctgtacattcaaaggcctggcatcgcattcccaaagatgatgaattgtcagaagaacaaataagtcattaccttatggaatttggaggcacccccaagcattttgctgaagccaaggaatttgtgaaacaatgtagtcccatcataagggcagatctgaacattgttagaagttgcacctctaacgtaccatctaaggctgttctttcctgtgacttgacatgttttgttggatctgaagacatagcaaaggacatggaagcctggaaagatgtaaccagtggaaatgctaaaatttaccagcttccagggggtcacttttatcttctggatcctgcgaacgagaaattaatcaagaactacataatcaagtgtctagaagtatcatcgatatccaatttttagatattttccctttcacttttaaaataatcaaagtaatatcatactcttctcagttattcagatatagctcagttttattcagattggaaattacacattttctactgtcagggagattcgttacataaatatatttacgtatctggggacaaaggtcaagccagtaaagaatacttctggcagcactttgggaggccaaggcgggcggatcacgaggtcaggagatcgagaccgtcctggctaacaccgtgaaaccccatctctactaaaaatacacaaaattagccgggcgtggtggtgggcacctgtagtcccagctactcgggaggctgaggcaggagaatggtgtgaacctgggaggtggagcttgcagtgaaccgagatcgctccactgcactccagcctgggtgacagatccagactctgtctcaaaaaaaaaaaaaaaaaaaatacttctggcagagtcttttatcttcctattaaaatctcacttgattctcctttatgggaagtttgtcgacaaaattcatgattagtaaattatccattttttccttcagttagtttaatggtgaagatgattaacaggggaaatgcttgaagtaaatgattgtttcaatggc

SEQ ID NO: 161831 - DNA, 810 bp, Homo sapiens
  Payload ID: 11588
  Gene Symbol: OLAH
  Gene Name: oleoyl-ACP hydrolase
  ENST ID: ENST00000378225
  CDS Start-End: 224-637
caatccaaagaaagtcatctttcagattgtctgctcagagttcatctcaaagcctggcaaggattggagaggtcaataagagtcagcgcctttaaaaagaaatctactcactcttctgtgtgcataaggccgagcagaggttcttcgtctcaagaggaactgacttctgttgagcactcaacacgccacagagaccagccatcttgcaacctcacctcacagcatggagagaggagaccaacctaagagaaccaggcaggccaccccttgtgccaccaggctcttcctccatcccaggggctccgataccctgcctttgaatgaaaacattttcaactgcttatacaaaaaccctgaggcaacttttaagctgatttgctttccctggatgggaggtggctccactcattttgccaaatggggccaagatactcatgatttgctggaagtgcactccttaaggcttcctggaagagaaagcagagttgaagaacctcttgaaaatgacatctcccagttagttgatgaagttgtttgtgctctgcagccagtcatccaggataaaccatttgcattttttggccacaggtatttgatatctgttttaaaagacttcaggggagtttcttctatctgaagtttgaggttaatgttattctttgtgttttgtaagatgcatacctttgtattggttagacagcatgttaggtaattatggccatcacaacttttacaattcaccagtttgtatggtaagtatacctattttttttccttttaggcaaataaagtcaacacttgtaaaaccaa

SEQ ID NO: 161832 - DNA, 1675 bp, Homo sapiens
  Payload ID: 11588
  Gene Symbol: OLAH
  Gene Name: oleoyl-ACP hydrolase
  Uniprot ID: Q9NV23
  ENST ID: ENST00000378228
  CDS Start-End: 255-1052
acctcatttcctgtgtcctctctttctttggcaatccaaagaaagtcatctttcagattgtctgctcagagttcatctcaaagcctggcaaggattggagaggtcaataagagtcagcgcctttaaaaagaaatctactcactcttctgtgtgcataaggccgagcagaggttcttcgtctcaagaggaactgacttctgttgagcactcaacacgccacagagaccagccatcttgcaacctcacctcacagcatggagagaggagaccaacctaagagaaccaggaatgaaaacattttcaactgcttatacaaaaaccctgaggcaacttttaagctgatttgctttccctggatgggaggtggctccactcattttgccaaatggggccaagatactcatgatttgctggaagtgcactccttaaggcttcctggaagagaaagcagagttgaagaacctcttgaaaatgacatctcccagttagttgatgaagttgtttgtgctctgcagccagtcatccaggataaaccatttgcattttttggccacagtatgggatcctacattgcttttaggactgcactaggtctaaaagaaaacaatcaaccagaaccattgcatttatttttgtcaagtgcaactcctgtacattcaaaggcctggcatcgcattcccaaagatgatgaattgtcagaagaacaaataagtcattaccttatggaatttggaggcacccccaagcattttgctgaagccaaggaatttgtgaaacaatgtagtcccatcataagggcagatctgaacattgttagaagttgcacctctaacgtaccatctaaggctgttctttcctgtgacttgacatgttttgttggatctgaagacatagcaaaggacatggaagcctggaaagatgtaaccagtggaaatgctaaaatttaccagcttccagggggtcacttttatcttctggatcctgcgaacgagaaattaatcaagaactacataatcaagtgtctagaagtatcatcgatatccaatttttagatattttccctttcacttttaaaataatcaaagtaatatcatactcttctcagttattcagatatagctcagttttattcagattggaaattacacattttctactgtcagggagattcgttacataaatatatttacgtatctggggacaaaggtcaagccagtaaagaatacttctggcagcactttgggaggccaaggcgggcggatcacgaggtcaggagatcgagaccgtcctggctaacaccgtgaaaccccatctctactaaaaatacacaaaattagccgggcgtggtggtgggcacctgtagtcccagctactcgggaggctgaggcaggagaatggtgtgaacctgggaggtggagcttgcagtgaaccgagatcgctccactgcactccagcctgggtgacagatccagactctgtctcaaaaaaaaaaaaaaaaaaaatacttctggcagagtcttttatcttcctattaaaatctcacttgattctcctttatgggaagtttgtcgacaaaattcatgattagtaaattatccattttttccttcagttagtttaatggtgaagatgattaacaggggaaatgcttgaagtaaatgattgtttcaatggc

SEQ ID NO: 161833 - DNA, 717 bp, Homo sapiens
  Payload ID: 11588
  Gene Symbol: OLAH
  Gene Name: oleoyl-ACP hydrolase
  ENST ID: ENST00000428897
  CDS Start-End: 288-717
tcccatgctggatgcttcccgcccttgaacatcagactccaatttcttcagttctgggactctgactggcttccttgctcctcagcctgcagatggcctattgtgagacctcacgttgtcatatggattggagaggtcaataagagtcagcgcctttaaaaagaaatctactcactcttctgtgtgcataaggccgagcagaggttcttcgtctcaagaggaactgacttctgttgagcactcaacacgccacagagaccagccatcttgcaacctcacctcacagcatggagagaggagaccaacctaagagaaccaggaatgaaaacattttcaactgcttatacaaaaaccctgaggcaacttttaagctgatttgctttccctggatgggaggtggctccactcattttgccaaatggggccaagatactcatgatttgctggaagtgcactccttaaggcttcctggaagagaaagcagagttgaagaacctcttgaaaatgacatctcccagttagttgatgaagttgtttgtgctctgcagccagtcatccaggataaaccatttgcattttttggccacagtatgggatcctacattgcttttaggactgcactaggtctaaaagaaaacaatcaaccagaaccattgcatttatttttgtcaagtgcaactcctgtacattcaaaggcctggcatcgcattcccaaag

SEQ ID NO: 161834 - DNA, 551 bp, Homo sapiens
  Payload ID: 11588
  Gene Symbol: OLAH
  Gene Name: oleoyl-ACP hydrolase
  ENST ID: ENST00000413672
  CDS Start-End: 262-551
gaacatcagactccaatttcttcagttctgggactctgactggcttccttgctcctcagcctgcagatggcctattgtgagacctcacgttgtcatatggattggagaggtcaataagagtcagcgcctttaaaaagaaatctactcactcttctgtgtgcataaggccgagcagaggttcttcgtctcaagaggaactgacttctgttgagcactcaacacgccacagagaccagccatcttgcaacctcacctcacagcatggagagaggagaccaacctaagagaaccaggaatgaaaacattttcaactgcttatacaaaaaccctgaggcaacttttaagctgatttgctttccctggatgggaggtggctccactcattttgccaaatggggccaagatactcatgatttgctggaagagacagcatctcaccatgttgccaaggctggtctcaaactccggcgctcaagtgatcctcctgcttcagcctacccatgtgctggcgtgagccaccgtaggcgtgagccaccgtgcctggccaaaat

SEQ ID NO: 161835 - DNA, 768 bp, Homo sapiens
  Payload ID: 11588
  Gene Symbol: OLAH
  Gene Name: oleoyl-ACP hydrolase
  ENST ID: ENST00000429028
  CDS Start-End: 226-768
atgtgacttgcttctccttgccttccaccatgattgtgaggcctccccagctatgtggcactggattggagaggtcaataagagtcagcgcctttaaaaagaaatctactcactcttctgtgtgcataaggccgagcagaggttcttcgtctcaagaggaactgacttctgttgagcactcaacacgccacagagaccagccatcttgcaacctcacctcacagcatggagagaggagaccaacctaagagaaccaggaatgaaaacattttcaactgcttatacaaaaaccctgaggcaacttttaagctgatttgctttccctggatgggaggtggctccactcattttgccaaatggggccaagatactcatgatttgctggaagtgcactccttaaggcttcctggaagagaaagcagagttgaagaacctcttgaaaatgacatctcccagttagttgatgaagttgtttgtgctctgcagccagtcatccaggataaaccatttgcattttttggccacagtatgggatcctacattgcttttaggactgcactaggtctaaaagaaaacaatcaaccagaaccattgcatttatttttgtcaagtgcaactcctgtacattcaaaggcctggcatcgcattcccaaagatgatgaattgtcagaagaacaaataagtcattaccttatggaatttggaggcacccccaagcattttgctgaagccaaggaatttgtgaaacaatgtagtcccatcataagg

SEQ ID NO: 161836 - DNA, 2591 bp, Homo sapiens
  Payload ID: 11589
  Gene Symbol: OLFM1
  Gene Name: olfactomedin 1
  Uniprot ID: Q99784
  ENST ID: ENST00000252854
  CDS Start-End: 188-1591
gggacgcgataaatatgcagagcggaggcttcgcgcagcagagcccgcgcgccgcccgctccgggtgctgaatccaggcgtggggacacgagccaggcgccgccgccggagccagcggagccggggccagagccggagcgcgtccgcgtccacgcagccgccggccggccagcacccagggccctgcatgccaggtcgttggaggtggcagcgagacatgcacccggcccggaagctcctcagcctcctcttcctcatcctgatgggcactgaactcactcaagtgctgcccaccaaccctgaggagagctggcaggtgtacagctctgcccaggacagcgagggcaggtgtatctgcacagtggtcgctccacagcagaccatgtgttcacgggatgcccgcacaaaacagctgaggcagctactggagaaggtgcagaacatgtctcaatccatagaggtcttggacaggcggacccagagagacttgcagtacgtggagaagatggagaaccaaatgaaaggactggagtccaagttcaaacaggtggaggagagtcataagcaacacctggccaggcagtttaaggcgataaaagcgaaaatggatgaacttaggcctttgatacctgtgttggaagagtacaaggccgatgccaaattggtattgcagtttaaagaggaggtccagaatctgacgtcagtgcttaacgagctgcaagaggaaattggcgcctatgactacgatgaacttcagagcagagtgtccaatcttgaagaaaggctccgtgcatgcatgcaaaaactagcttgcgggaagttgacgggcatcagtgaccccgtgactgtcaagacctccggctcgaggttcggatcctggatgacagaccctctcgcccctgaaggcgataaccgggtgtggtacatggacggctatcacaacaaccgcttcgtacgtgagtacaagtccatggttgacttcatgaacacggacaatttcacctcccaccgtctcccccacccctggtcgggcacggggcaggtggtctacaacggttctatctacttcaacaagttccagagccacatcatcatcaggtttgacctgaagacagagaccatcctcaagacccgcagcctggactatgccggttacaacaacatgtaccactacgcctggggtggccactcggacatcgacctcatggtggacgagagcgggctgtgggccgtgtacgccaccaaccagaacgctggcaacatcgtggtcagtaggctggaccccgtgtccctgcagaccctgcagacctggaacacgagctaccccaagcgcagcgccggggaggccttcatcatctgcggcacgctgtacgtcaccaacggctactcagggggtaccaaggtccactatgcataccagaccaatgcctccacctatgaatacatcgacatcccattccagaacaaatactcccacatctccatgctggactacaaccccaaggaccgggccctgtatgcctggaacaacggccaccagatcctctacaacgtgaccctcttccacgtcatccgctccgacgagttgtagctccctcctcctggaagccaagggcccacgtcctcaccacaaagggactcctgtgaaactgctgccaaaaagataccaataacactaacaataccgatcttgaaaaatcatcagcagtgcggattctgacatcgagggatggcattacctccgtgtttctccctttcgagccggcgggccacagacgtcggaagaaactcccgtatttgcagctggaactgcagcccacggcgccccggttttcctccccgccctgtccctctctggtcaaacaacatactaaagaggcgaggcaatgactgttggccagttctcaccggggaaaaacccactgttaggatggcatgaacatttccttagatcgtggtcagctccgaggaatgtggcgtccaggctctttgagagccatgggctgcacccggccgtaggctagtgtaactcgcatcccattgcagtgccgtttcttgactgtgttgctgtctcttagattaaccgtgctgaggctccacatagctcctggacctgtgtctagtacatactgaagcgatggtcagagtgtgtagagtgaagttgctgtgcccacattgtttgaactcgcgtaccccgtagatacattgtgcaacgttcttctgttattcccttgaggtggtaacttcgtatgttcagtttatgcgatgattgttgtaaatgcaatgccgtagtttggattaataagtggatggtttttgtttctaaaaagaaaaaaaaaatcagtgttcacccttatagagacatagtcaagttcatgttgataataatcaaaggaattactctcttcttgttaaattagctaaatcatgtaaccgcagataggaagggctcgcctggggaaactctggtttccgatgggacaggaaagtcatacgggcaacagtatgcggaaagtacgttttttaagtaaaaaacaaaggcaaactttgtactatccagttatctaaggaacaataaaaacattaggaga

SEQ ID NO: 161837 - DNA, 1014 bp, Homo sapiens
  Payload ID: 11589
  Gene Symbol: OLFM1
  Gene Name: olfactomedin 1
  Uniprot ID: Q99784
  ENST ID: ENST00000277415
  CDS Start-End: 286-693
gcgcgggggagccattaggaggcgaggagagaggagggcgcagctcccgcccagcccagccctgcccagccctgcccggaggcagacgcgccggaaccgggacgcgataaatatgcagagcggaggcttcgcgcagcagagcccgcgcgccgcccgctccgggtgctgaatccaggcgtggggacacgagccaggcgccgccgccggagccagcggagccggggccagagccggagcgcgtccgcgtccacgcagccgccggccggccagcacccagggccctgcatgccaggtcgttggaggtggcagcgagacatgcacccggcccggaagctcctcagcctcctcttcctcatcctgatgggcactgaactcactcaagtgctgcccaccaaccctgaggagagctggcaggtgtacagctctgcccaggacagcgagggcaggtgtatctgcacagtggtcgctccacagcagaccatgtgttcacgggatgcccgcacaaaacagctgaggcagctactggagaaggtgcagaacatgtctcaatccatagaggtcttggacaggcggacccagagagacttgcagtacgtggagaagatggagaaccaaatgaaaggactggagtccaagttcaaacaggtggaggagagtcataagcaacacctggccaggcagtttaagggctaacttaaaagagttttttcaatgctgcagtgactgaagaagcagtccactcccatgtaaccatgaaagagagccagagagctttttgcaccatgcatttttactattattttccaatacttagcaccatttcactaaggaaccttgaatacaaccaggatcctcctttgcatgcgactgtagctgcatttcatgaatagtttgaacccttgtcaatgcattttttgaaaaagaaagaaaaaaaaaacttcgtgtatgtgactcaaagcatgtaaccttaagatgttgcattctaaactgacaataaagacctttcccaaatat

SEQ ID NO: 161838 - DNA, 542 bp, Homo sapiens
  Payload ID: 11589
  Gene Symbol: OLFM1
  Gene Name: olfactomedin 1
  ENST ID: ENST00000339720
  CDS Start-End: 53-542
gtagtgagtgatctggaggattctttccttcccaaatggctgggaaagcttaatggaaggccccggaggaagtggctttcatctccgattagaagccttctgtaaatgcaaaagccctattaacgtgtttgacccagtcaggcctgcgcttcaggtgggactgacacgcgtgctgcccaccaaccctgaggagagctggcaggtgtacagctctgcccaggacagcgagggcaggtgtatctgcacagtggtcgctccacagcagaccatgtgttcacgggatgcccgcacaaaacagctgaggcagctactggagaaggtgcagaacatgtctcaatccatagaggtcttggacaggcggacccagagagacttgcagtacgtggagaagatggagaaccaaatgaaaggactggagtccaagttcaaacaggtggaggagagtcataagcaacacctggccaggcagtttaaggcgataaaagcgaaaatggatgaacttaggcctttgatacctgtgttggaagagtacaaggccgatg

SEQ ID NO: 161839 - DNA, 2444 bp, Homo sapiens
  Payload ID: 11589
  Gene Symbol: OLFM1
  Gene Name: olfactomedin 1
  Uniprot ID: Q99784
  ENST ID: ENST00000371793
  CDS Start-End: 252-1709
ggcgggcggcgcgaggcgcagggcgcggcgggcagaggccacctggccaccttccctggcgcccggggaaggcgcggcgatggccggggcgcgcggggcggcggcggcggcgggcgggcggcggcgggccgagggggcgcggggacacagccaggcgcccctgcccgccgcggtgcccgccgcctgaaggccgcctgggcgcgggagccggtgccagctcggagcgggcgctggaggcagctcgaggcgcgatgtcggtgccgctgctcaagatcggggtcgtgctgagcaccatggccatgatcactaactggatgtcccagacgctgccctcgctggtgggcctcaacaccaccaagctctcggcggccggcggcgggacgctggaccgcagcaccggcgtgctgcccaccaaccctgaggagagctggcaggtgtacagctctgcccaggacagcgagggcaggtgtatctgcacagtggtcgctccacagcagaccatgtgttcacgggatgcccgcacaaaacagctgaggcagctactggagaaggtgcagaacatgtctcaatccatagaggtcttggacaggcggacccagagagacttgcagtacgtggagaagatggagaaccaaatgaaaggactggagtccaagttcaaacaggtggaggagagtcataagcaacacctggccaggcagtttaaggcgataaaagcgaaaatggatgaacttaggcctttgatacctgtgttggaagagtacaaggccgatgccaaattggtattgcagtttaaagaggaggtccagaatctgacgtcagtgcttaacgagctgcaagaggaaattggcgcctatgactacgatgaacttcagagcagagtgtccaatcttgaagaaaggctccgtgcatgcatgcaaaaactagcttgcgggaagttgacgggcatcagtgaccccgtgactgtcaagacctccggctcgaggttcggatcctggatgacagaccctctcgcccctgaaggcgataaccgggtgtggtacatggacggctatcacaacaaccgcttcgtacgtgagtacaagtccatggttgacttcatgaacacggacaatttcacctcccaccgtctcccccacccctggtcgggcacggggcaggtggtctacaacggttctatctacttcaacaagttccagagccacatcatcatcaggtttgacctgaagacagagaccatcctcaagacccgcagcctggactatgccggttacaacaacatgtaccactacgcctggggtggccactcggacatcgacctcatggtggacgagagcgggctgtgggccgtgtacgccaccaaccagaacgctggcaacatcgtggtcagtaggctggaccccgtgtccctgcagaccctgcagacctggaacacgagctaccccaagcgcagcgccggggaggccttcatcatctgcggcacgctgtacgtcaccaacggctactcagggggtaccaaggtccactatgcataccagaccaatgcctccacctatgaatacatcgacatcccattccagaacaaatactcccacatctccatgctggactacaaccccaaggaccgggccctgtatgcctggaacaacggccaccagatcctctacaacgtgaccctcttccacgtcatccgctccgacgagttgtagctccctcctcctggaagccaagggcccacgtcctcaccacaaagggactcctgtgaaactgctgccaaaaagataccaataacactaacaataccgatcttgaaaaatcatcagcagtgcggattctgacatcgagggatggcattacctccgtgtttctccctttcgagccggcgggccacagacgtcggaagaaactcccgtatttgcagctggaactgcagcccacggcgccccggttttcctccccgccctgtccctctctggtcaaacaacatactaaagaggcgaggcaatgactgttggccagttctcaccggggaaaaacccactgttaggatggcatgaacatttccttagatcgtggtcagctccgaggaatgtggcgtccaggctctttgagagccatgggctgcacccggccgtaggctagtgtaactcgcatcccattgcagtgccgtttcttgactgtgttgctgtctcttagattaaccgtgctgaggctccacatagctcctggacctgtgtctagtacatactgaagcgatggtcagagtgtgtagagtgaagttgctgtgcccacattgtttgaactcgcgtaccccgtagatacattgtgcaacgttcttctgttattcccttgaggtggtaacttcgtatgttcagtttatgcgatgattgttgtaaatgcaatgccgtagtttggattaataagtggatggtttttgtttctaa

SEQ ID NO: 161840 - DNA, 2492 bp, Homo sapiens
  Payload ID: 11589
  Gene Symbol: OLFM1
  Gene Name: olfactomedin 1
  Uniprot ID: Q99784
  ENST ID: ENST00000371796
  CDS Start-End: 115-1491
gaatcaccgcggaaaagggctccagtaggcaggacggcgccgtctctctgccggcaacctttgccccaaagcggaccctctgcggggatcggagagggatgccccggcgtgaggatgggagaagccccgggacgggagggccgcgggccgtgcccccagctggagtccccgcgccgccgccgggtgctgcccaccaaccctgaggagagctggcaggtgtacagctctgcccaggacagcgagggcaggtgtatctgcacagtggtcgctccacagcagaccatgtgttcacgggatgcccgcacaaaacagctgaggcagctactggagaaggtgcagaacatgtctcaatccatagaggtcttggacaggcggacccagagagacttgcagtacgtggagaagatggagaaccaaatgaaaggactggagtccaagttcaaacaggtggaggagagtcataagcaacacctggccaggcagtttaaggcgataaaagcgaaaatggatgaacttaggcctttgatacctgtgttggaagagtacaaggccgatgccaaattggtattgcagtttaaagaggaggtccagaatctgacgtcagtgcttaacgagctgcaagaggaaattggcgcctatgactacgatgaacttcagagcagagtgtccaatcttgaagaaaggctccgtgcatgcatgcaaaaactagcttgcgggaagttgacgggcatcagtgaccccgtgactgtcaagacctccggctcgaggttcggatcctggatgacagaccctctcgcccctgaaggcgataaccgggtgtggtacatggacggctatcacaacaaccgcttcgtacgtgagtacaagtccatggttgacttcatgaacacggacaatttcacctcccaccgtctcccccacccctggtcgggcacggggcaggtggtctacaacggttctatctacttcaacaagttccagagccacatcatcatcaggtttgacctgaagacagagaccatcctcaagacccgcagcctggactatgccggttacaacaacatgtaccactacgcctggggtggccactcggacatcgacctcatggtggacgagagcgggctgtgggccgtgtacgccaccaaccagaacgctggcaacatcgtggtcagtaggctggaccccgtgtccctgcagaccctgcagacctggaacacgagctaccccaagcgcagcgccggggaggccttcatcatctgcggcacgctgtacgtcaccaacggctactcagggggtaccaaggtccactatgcataccagaccaatgcctccacctatgaatacatcgacatcccattccagaacaaatactcccacatctccatgctggactacaaccccaaggaccgggccctgtatgcctggaacaacggccaccagatcctctacaacgtgaccctcttccacgtcatccgctccgacgagttgtagctccctcctcctggaagccaagggcccacgtcctcaccacaaagggactcctgtgaaactgctgccaaaaagataccaataacactaacaataccgatcttgaaaaatcatcagcagtgcggattctgacatcgagggatggcattacctccgtgtttctccctttcgagccggcgggccacagacgtcggaagaaactcccgtatttgcagctggaactgcagcccacggcgccccggttttcctccccgccctgtccctctctggtcaaacaacatactaaagaggcgaggcaatgactgttggccagttctcaccggggaaaaacccactgttaggatggcatgaacatttccttagatcgtggtcagctccgaggaatgtggcgtccaggctctttgagagccatgggctgcacccggccgtaggctagtgtaactcgcatcccattgcagtgccgtttcttgactgtgttgctgtctcttagattaaccgtgctgaggctccacatagctcctggacctgtgtctagtacatactgaagcgatggtcagagtgtgtagagtgaagttgctgtgcccacattgtttgaactcgcgtaccccgtagatacattgtgcaacgttcttctgttattcccttgaggtggtaacttcgtatgttcagtttatgcgatgattgttgtaaatgcaatgccgtagtttggattaataagtggatggtttttgtttctaaaaagaaaaaaaaaatcagtgttcacccttatagagacatagtcaagttcatgttgataataatcaaaggaattactctcttcttgttaaattagctaaatcatgtaaccgcagataggaagggctcgcctggggaaactctggtttccgatgggacaggaaagtcatacgggcaacagtatgcggaaagtacgttttttaagtaaaaaacaaaggcaaactttgtactatccagttatctaaggaacaataaaaacattaggagat

SEQ ID NO: 161841 - DNA, 961 bp, Homo sapiens
  Payload ID: 11589
  Gene Symbol: OLFM1
  Gene Name: olfactomedin 1
  ENST ID: ENST00000371799
  CDS Start-End: 286-789
gcgcgggggagccattaggaggcgaggagagaggagggcgcagctcccgcccagcccagccctgcccagccctgcccggaggcagacgcgccggaaccgggacgcgataaatatgcagagcggaggcttcgcgcagcagagcccgcgcgccgcccgctccgggtgctgaatccaggcgtggggacacgagccaggcgccgccgccggagccagcggagccggggccagagccggagcgcgtccgcgtccacgcagccgccggccggccagcacccagggccctgcatgccaggtcgttggaggtggcagcgagacatgcacccggcccggaagctcctcagcctcctcttcctcatcctgatgggcactgaactcactcaaaataaaagagaaaacaaagcagagaagatgggagggccagagagcgagaggaagaccacaggagagaagacactgaacgagcttcccttgttttgcctggaagcccacgctggctccctggctctgcccaggatgtgcagtccaaatcccaatccagcagtggggttatgtcgtcccgcttaccctcagagcccttctcctggtgctgcccagacgatcagccagtccctcctggagaggttctgcatggcctctaggagaggttttcttggccccaggaaggcctggtggagggtggtggttgtgcactgttgctggacagatgcattcattcatgtgcacacacacacacacacatgcacacacaggggagcagatacctgcagagaagagccaaccaggtcctgattagtggcaagctgccccacaaagggctatgcctgtgtcttattgagacaccttggcaaagagatggctgattctgggtggtcctggacatggccgcacccaagggccctccaagccttaatggcaccctgaagcctccatgcccaggccaaaagatgcttttcctccctaa

SEQ ID NO: 161842 - DNA, 568 bp, Homo sapiens
  Payload ID: 11589
  Gene Symbol: OLFM1
  Gene Name: olfactomedin 1
  ENST ID: ENST00000371801
  CDS Start-End: 42-431
cgtccacgcagccgccggccggccagcacccagggccctgcatgccaggtcgttggaggtggcagcgagacatgcacccggcccggaagctcctcagcctcctcttcctcatcctgatgggcactgaactcactcaagactccgctgcccccgactccctgctgagaagttcaaagggcagcacgagggggtctttggctgctattgtcatctggagggggaagagtgagagccggatagccaagaccccaggcattttcagaggtggcgggaccttagtcctacccccaacacacacccctgagtggctcatcctccctttgggcataacgctgcccttgggggctccagaaacaggcggtggggattgtgccgctgagacctggaagggcagccagcgtgccggccagctgtgtgcattgctggcttaatatgcagggcttggggggctgtggccacatgcccggcaggaggtgagtgaggagccctgtggcgtgctggtgtggggatcgtgggcatttcaaacgggcttgtcgtaccctgaacaatgtatcaatagagaaaggtc

SEQ ID NO: 161843 - DNA, 1057 bp, Homo sapiens
  Payload ID: 11589
  Gene Symbol: OLFM1
  Gene Name: olfactomedin 1
  Uniprot ID: Q99784
  ENST ID: ENST00000392991
  CDS Start-End: 317-778
ggacggcgcttcccggtggcggcggaggagcccggagggacgcagccgggcaaggcagggcgcagggcgggcggcgcgaggcgcagggcgcggcgggcagaggccacctggccaccttccctggcgcccggggaaggcgcggcgatggccggggcgcgcggggcggcggcggcggcgggcgggcggcggcgggccgagggggcgcggggacacagccaggcgcccctgcccgccgcggtgcccgccgcctgaaggccgcctgggcgcgggagccggtgccagctcggagcgggcgctggaggcagctcgaggcgcgatgtcggtgccgctgctcaagatcggggtcgtgctgagcaccatggccatgatcactaactggatgtcccagacgctgccctcgctggtgggcctcaacaccaccaagctctcggcggccggcggcgggacgctggaccgcagcaccggcgtgctgcccaccaaccctgaggagagctggcaggtgtacagctctgcccaggacagcgagggcaggtgtatctgcacagtggtcgctccacagcagaccatgtgttcacgggatgcccgcacaaaacagctgaggcagctactggagaaggtgcagaacatgtctcaatccatagaggtcttggacaggcggacccagagagacttgcagtacgtggagaagatggagaaccaaatgaaaggactggagtccaagttcaaacaggtggaggagagtcataagcaacacctggccaggcagtttaagggctaacttaaaagagttttttcaatgctgcagtgactgaagaagcagtccactcccatgtaaccatgaaagagagccagagagctttttgcaccatgcatttttactattattttccaatacttagcaccatttcactaaggaaccttgaatacaaccaggatcctcctttgcatgcgactgtagctgcatttcatgaatagtttgaacccttgtcaatgcattttttgaaaaagaaagaaaaaaaaaacttcgtgtatgtgactcaaagcatgtaaccttaag

SEQ ID NO: 161844 - DNA, 727 bp, Homo sapiens
  Payload ID: 11589
  Gene Symbol: OLFM1
  Gene Name: olfactomedin 1
  ENST ID: ENST00000545657
  CDS Start-End: 1-298
gagtcataagcaacacctggccaggcagtttaaggcgataaaagcgaaaatggatgaacttaggcctttgatacctgtgttggaagagtacaaggccgatgccaaattggtattgcagtttaaagaggaggtccagaatctgacgtcagtgcttaacgagctgcaagaggaaattggcgcctatgactacgatgaacttcagagcagagtgtccaatcttgaagaaaggctccgtgcatgcatgcaaaaactaggtgtggtacatggacggctatcacaacaaccgcttcgtacgtgagtacaagtccatggttgacttcatgaacacggacaatttcacctcccaccgtctcccccacccctggtcgggcacggggcaggtggtctacaacggttctatctacttcaacaagttccagagccacatcatcatcaggtttgacctgaagacagagaccatcctcaagacccgcagcctggactatgccggttacaacaacatgtaccactacgcctggggtggccactcggacatcgacctcatggtggacgagagcgggctgtgggccgtgtacgccaccaaccagaacgctggcaacatcgtggtcagtaggctggaccccgtgtccctgcagaccctgcagacctggaacacgagctaccccaagcgcagcgccggggaggccttcatcatctgcggcacgctgtacgtcaccaacggctactc

SEQ ID NO: 161845 - DNA, 791 bp, Homo sapiens
  Payload ID: 11589
  Gene Symbol: OLFM1
  Gene Name: olfactomedin 1
  ENST ID: ENST00000539877
  CDS Start-End: 167-791
gctgcactaaaactgtttttcttttaagctccctggaatcctgttgaatattaaagttccatcttgaggctagactcaattcagatctgcctgtaaagatgtaaaacagcgattcttcatttgctgggtgattgattcctgactctatgctcagaatgtacataacatgtctcaatccatagaggtcttggacaggcggacccagagagacttgcagtacgtggagaagatggagaaccaaatgaaaggactggagtccaagttcaaacaggtggaggagagtcataagcaacacctggccaggcagtttaaggcgataaaagcgaaaatggatgaacttaggcctttgatacctgtgttggaagagtacaaggccgatgccaaattggtattgcagtttaaagaggaggtccagaatctgacgtcagtgcttaacgagctgcaagaggaaattggcgcctatgactacgatgaacttcagagcagagtgtccaatcttgaagaaaggctccgtgcatgcatgcaaaaactagcttgcgggaagttgacgggcatcagtgaccccgtgactgtcaagacctccggctcgaggttcggatcctggatgacagaccctctcgcccctgaaggcgataaccgggtgtggtacatggacggctatcacaacaaccgcttcgtacgtgagtacaagtccatggttgacttcatgaacacggacaatttcacctcccaccgtctcccccacccctggtcgggcacggggcaggtggtctacaacggttctatctact

SEQ ID NO: 161846 - DNA, 546 bp, Homo sapiens
  Payload ID: 11589
  Gene Symbol: OLFM1
  Gene Name: olfactomedin 1
  ENST ID: ENST00000539529
  CDS Start-End: 159-546
gagccggacggcgcttcccggtggcggcggaggagcccggagggacgcagccgggcaaggtgctgcccaccaaccctgaggagagctggcaggtgtacagctctgcccaggacagcgagggcaggtgtatctgcacagtggtcgctccacagcagaccatgtgttcacgggatgcccgcacaaaacagctgaggcagctactggagaaggtgcagaacatgtctcaatccatagaggtcttggacaggcggacccagagagacttgcagtacgtggagaagatggagaaccaaatgaaaggactggagtccaagttcaaacaggtggaggagagtcataagcaacacctggccaggcagtttaaggcgataaaagcgaaaatggatgaacttaggcctttgatacctgtgttggaagagtacaaggccgatgccaaattggtattgcagtttaaagaggaggtccagaatctgacgtcagtgcttaacgagctgcaagaggaaattggcgcctatgactacgatgaacttcagagcagagtgtcca

SEQ ID NO: 161847 - DNA, 971 bp, Homo sapiens
  Payload ID: 11589
  Gene Symbol: OLFM1
  Gene Name: olfactomedin 1
  ENST ID: ENST00000615948
  CDS Start-End: 465-971
atcctgtcccagcctgcttccccgccggccgccgccctcctccccgggagagagcgaggcgcgcgggtccctctgcgccacccccgcccccgccccttccgagcaaacttttggcacccaccgcagcccagcgcgcgttcgtgctccgcagggcgcgcctctctccgccaatgccaggcgcgcgggggagccattaggaggcgaggagagaggagggcgcagctcccgcccagcccagccctgcccagccctgcccggaggcagacgcgccggaaccgggacgcgataaatatgcagagcggaggcttcgcgcagcagagcccgcgcgccgcccgctccgggtgctgaatccaggcgtggggacacgagccaggcgccgccgccggagccagcggagccggggccagagccggagcgcgtccgcgtccacgcagccgccggccggccagcacccagggccctgcatgccaggtcgttggaggtggcagcgagacatgcacccggcccggaagctcctcagcctcctcttcctcatcctgatgggcactgaactcactcaaaataaaagagaaaacaaagcagagaagatgggagggccagagagcgagaggaagaccacaggagagaagacactgaacgagcttcccttgttttgcctggaagcccacgctggctccctggctctgcccaggatgtgcagtccaaatcccaatccagcagtggggttatgtcgtcccgcttaccctcagagcccttctcctggtgctgcccagacgatcagccagtccctcctggagaggttctgcatggcctctaggagagttttcttggccccaggaaggcctggtggagggtggtggttgtgcactgttgctggacagatgcattcattcatgtgcacacacacacacacacatgcacacacaggggagcagatacctgcagagaagagccaaccaggtcctgattag

SEQ ID NO: 161848 - DNA, 2019 bp, Homo sapiens
  Payload ID: 11590
  Gene Symbol: OLFM2
  Gene Name: olfactomedin 2
  Uniprot ID: O95897
  ENST ID: ENST00000264833
  CDS Start-End: 187-1551
cgcaacaaagactcggagcgagcgagggggcgggggtggggcggaatcccggccgccggcgaggcgggggaggcggcggcgcagggtcgccccggccgggcgggcggggtcgcgcctggtggcggtccccgcgccgaggcgccgctagggcgggcgggggtcgggacgccgggctaggggcgcgtcatgtggccgctcacggtcccgccgccgctgctgctgctgctgtgctcaggcctggccggacagactctcttccagaacccagaagagggctggcagctgtacacctcagcccaggcccctgacgggaaatgcatctgcacggccgtgatcccagcgcagagtacctgctctcgagatggcaggagtcgggagctgcggcaactgatggagaaggtccagaacgtctcccagtccatggaggtccttgagttgcggacgtatcgcgacctccagtatgtacgcggcatggagaccctcatgcggagcctggatgcgcggctccgggcagctgatgggtccctctcggccaagagcttccaggagctgaaggacaggatgacggaactgttgcccctgagctcggtcctggagcagtacaaggcagacacgcggaccattgtacgcttgcgggaggaggtgaggaatctctccggcagtctggcggccattcaggaggagatgggtgcctacgggtatgaggacctgcagcaacgggtgatggccctggaggcccggctccacgcctgcgcccagaagctgggctgtgggaagctgaccggggtcagtaaccccatcaccgttcgggccatggggtcccgcttcggctcctggatgactgacacgatggcccccagtgcggatagccgggtctggtacatggatggctattacaaaggccgccgggtcctggagttccgtaccctgggagacttcatcaaaggccagaactttatccagcacctgctgccccagccgtgggcgggcacgggccacgtggtgtacaacggctccctgttctataacaagtaccagagcaacgtggtggtcaaataccacttccgctcgcgctctgtgctggtgcagaggagcctcccgggcgccggttacaacaacaccttcccctactcctggggcggcttctccgacatggacttcatggtggacgagagcgggctctgggctgtgtacaccaccaaccagaacgcgggcaacatcgtggtcagccggctggacccgcacaccctcgaggtcatgcggtcctgggacaccggctaccccaagcgcagcgctggcgaggccttcatgatctgcggtgtgctctacgtgaccaactcccacctggctggggccaaggtctacttcgcctattttaccaacacgtccagttacgagtacacggacgtgcccttccacaaccagtattcccacatctcgatgctggattacaacccccgggagcgcgccctctatacctggaacaacggccaccaggtgctctacaatgtcaccctgtttcacgtcatcagcacctctggggacccctgagccaatgctgtggctcgggctgctgcctggggggcctctgggggctgggggcccttttcattctgcctgtgtccctcaagggtgatctctctgtctctgtcacgccctttctccccgcctttttgctgggcttttgttctctgcctatgtatttctgtctattttttcaatttcccctcttctcctttattgatctctgcttttaatacaccacttctttctttctgcctttttatggatgtctttttctttttatggctctggttctccagttctttccgtctctgcctctctctgtctctctctctctgtccttccacccctccctccttgcttcccacccattcctcatccctcactcccacccccacccccacccccaggagttgagtgcatggatctgtttctttttttatttacactttttctttccggtttgccggaataaacaggacctttgacatttga

SEQ ID NO: 161849 - DNA, 1665 bp, Homo sapiens
  Payload ID: 11590
  Gene Symbol: OLFM2
  Gene Name: olfactomedin 2
  ENST ID: ENST00000590841
  CDS Start-End: 94-1224
aagttccttctgtctgctgtgtagagaattgactacaggggatgaaggtggaactgggagactagggaggaggtccagaacgtctcccagtccatggaggtccttgagttgcggacgtatcgcgacctccagtatgtacgcggcatggagaccctcatgcggagcctggatgcgcggctccgggcagctgatgggtccctctcggccaagagcttccaggagctgaaggacaggatgacggaactgttgcccctgagctcggtcctggagcagtacaaggcagacacgcggaccattgtacgcttgcgggaggaggtgaggaatctctccggcagtctggcggccattcaggaggagatgggtgcctacgggtatgaggacctgcagcaacgggtgatggccctggaggcccggctccacgcctgcgcccagaagctgggctgtgggaagctgaccggggtcagtaaccccatcaccgttcgggccatggggtcccgcttcggctcctggatgactgacacgatggcccccagtgcggatagccgggtctggtacatggatggctattacaaaggccgccgggtcctggagttccgtaccctgggagacttcatcaaaggccagaactttatccagcacctgctgccccagccgtgggcgggcacgggccacgtggtgtacaacggctccctgttctataacaagtaccagagcaacgtggtggtcaaataccacttccgctcgcgctctgtgctggtgcagaggagcctcccgggcgccggttacaacaacaccttcccctactcctggggcggcttctccgacatggacttcatggtggacgagagcgggctctgggctgtgtacaccaccaaccagaacgcgggcaacatcgtggtcagccggctggacccgcacaccctcgaggtcatgcggtcctgggacaccggctaccccaagcgcagcgctggcgaggccttcatgatctgcggtgtgctctacgtgaccaactcccacctggctggggccaaggtctacttcgcctattttaccaacacgtccagttacgagtacacggacgtgcccttccacaaccagtattcccacatctcgatgctggattacaacccccgggagcgcgccctctatacctggaacaacggccaccaggtgctctacaatgtcaccctgtttcacgtcatcagcacctctggggacccctgagccaatgctgtggctcgggctgctgcctggggggcctctgggggctgggggcccttttcattctgcctgtgtccctcaagggtgatctctctgtctctgtcacgccctttctccccgcctttttgctgggcttttgttctctgcctatgtatttctgtctattttttcaatttcccctcttctcctttattgatctctgcttttaatacaccacttctttctttctgcctttttatggatgtctttttctttttatggctctggttctccagttctttccgtctctgcctctctctgtctctctctctctgtccttccacccctccctccttgcttcccacccattcctcatccctcactcccacccccacccccacccccaggagttgagtgcatggatctgtttctttttttatttacactttttctttccggtttgcc

SEQ ID NO: 161850 - DNA, 1226 bp, Homo sapiens
  Payload ID: 11590
  Gene Symbol: OLFM2
  Gene Name: olfactomedin 2
  ENST ID: ENST00000593091
  CDS Start-End: 220-1226
cggcgctttataagaggagcccgccaggcgcgccgagccgcagcccgcgtccccgagccccccctcaccccgtcccggaccccctgccccgcagctcgcgctcgtgccccctcccccacgcccccccggggcgcctgggtgtcgagggaccgagcgccccgcggcgggccagagaagggacgcgcggcgggcggccgcggggcatgaggcggaggcgcgatgtcggtgccgctgctcaagatcggggccgtgctgagcaccatggccatggtcaccaactggatgtcgcagacgctgccctcgctcgtggggctcaacggcaccgtgtcccgtgcgggcgcctctgagaaaatcactctcttccagaacccagaagagggctggcagctgtacacctcagcccaggcccctgacgggaaatgcatctgcacggccgtgatcccagcgcagagtacctgctctcgagatggcaggagtcgggagctgcggcaactgatggagaaggtccagaacgtctcccagtccatggaggtccttgagttgcggacgtatcgcgacctccagtatgtacgcggcatggagaccctcatgcggagcctggatgcgcggctccgggcagctgatgggtccctctcggccaagagcttccaggagctgaaggacaggatgacggaactgttgcccctgagctcggtcctggagcagtacaaggcagacacgcggaccattgtacgcttgcgggaggaggtgaggaatctctccggcagtctggcggccattcaggaggagatgggtgcctacgggtatgaggacctgcagcaacgggtgatggccctggaggcccggctccacgcctgcgcccagaagctgggctgtgggaagctgaccggggtcagtaaccccatcaccgttcgggccatggggtcccgcttcggctcctggatgactgacacgatggcccccagtgcggatagccgggtctggtacatggatggctattacaaaggccgccgggtcctggagttccgtaccctgggagacttcatcaaaggccagaactttatccagcacctgctgccccagccgtgggcgggcacgggccacgtggtgtacaacggctccctgttctataacaagtaccagagcaacgtggtggtcaaataccacttccgctcgcgctctgtgctggtgcagaggagcctcccgggcgccggttacaacaacac

SEQ ID NO: 161851 - DNA, 713 bp, Homo sapiens
  Payload ID: 11590
  Gene Symbol: OLFM2
  Gene Name: olfactomedin 2
  ENST ID: ENST00000592448
  CDS Start-End: 72-308
agagaattgactacaggggatgaaggtggaactgggagactagggaggaggtccagaacgtctcccagtccatggaggtccttgagttgcggacgtatcgcgacctccagtatgtacgcggcatggagaccctcatgcggagcctggatgcgcggctccgggcagctgatgggtccctctcggccaagagcttccaggagctgaaggacaggatgacggaactgttgcccctgagctcggtcctggagcagtacaaggcagacacgcggaccattgtacgcttgcgggaggaggctgtgggaagctgaccggggtcagtaaccccatcaccgttcgggccatggggtcccgcttcggctcctggatgactgacacgatggcccccagtgcggatagccgggtctggtacatggatggctattacaaaggccgccgggtcctggagttccgtaccctgggagacttcatcaaaggccagaactttatccagcacctgctgccccagccgtgggcgggcacgggccacgtggtgtacaacggctccctgttctataacaagtaccagagcaacgtggtggtcaaataccacttccgctcgcgctctgtgctggtgcagaggagcctcccgggcgccggttacaacaacaccttcccctactcctggggcggcttctccgacatggacttcatggtggacgagagcgggctctggg

SEQ ID NO: 161852 - DNA, 2189 bp, Homo sapiens
  Payload ID: 11591
  Gene Symbol: OLFM3
  Gene Name: olfactomedin 3
  Uniprot ID: Q96PB7
  ENST ID: ENST00000338858
  CDS Start-End: 1-1437
atgagtcctccactgctgaagcttggcgctgtgcttagtaccatggcaatgatctcaaactggatgtcccaaactctcccatccttggtgggactgaacaccacgaggctgtcgactccggataccttaactcagattagtcctaaagaagggtggcaggtgtacagctcagctcaggatcctgatgggcggtgcatttgcacagttgttgctccagaacaaaacctgtgttcccgggatgccaaaagcaggcaacttcgccaactactggaaaaggttcagaacatgtcccagtctattgaagtcttaaacttgagaactcagagagatttccaatatgttttaaaaatggaaacccaaatgaaagggctgaaggcaaaatttcggcagattgaagatgatcgaaagacacttatgaccaagcattttcaggagttgaaagagaaaatggacgagctcctgcctttgatccccgtgctggaacagtacaaaacagatgctaagttaatcacccagttcaaggaggaaataaggaatctgtctgctgtcctcactggtattcaggaggaaattggtgcctatgactacgaggaactacaccaaagagtgctgagcttggaaacaagacttcgtgactgcatgaaaaagctaacatgtggcaaactgatgaaaatcacaggcccagttacagtcaagacatctggaacccgatttggtgcttggatgacagaccctttagcatctgagaaaaacaacagagtctggtacatggacagttatactaacaataaaattgttcgtgaatacaaatcaattgcagactttgtcagtggggctgaatcaaggacatacaaccttcctttcaagtgggcaggaactaaccatgttgtctacaatggctcactctattttaacaagtatcagagtaatatcatcatcaaatacagctttgatatggggagagtgcttgcccaacgaagcctggagtatgctggttttcataatgtttacccctacacatggggtggattctctgacatcgacctaatggctgatgaaatcgggctgtgggctgtgtatgcaactaaccagaatgcaggcaatattgtcatcagccaacttaaccaagataccttggaggtgatgaagagctggagcactggctaccccaagagaagtgcaggggaatctttcatgatctgtgggacactgtatgtcaccaactcccacttaactggagccaaggtgtattattcctattccaccaaaacctccacatatgagtacacagacattcccttccataaccaatactttcacatatccatgcttgactacaatgcaagagatcgagctctctatgcctggaacaatggccaccaggtgctgttcaatgtcacccttttccatatcatcaagacagaggatgacacataggcaaatgtgacatgttttcattgatttaaacagtgtgatttgtgataaactctataagaccccttccgtttttttcttcactattatttttcatcatttctccaaagcaaagcatttttattgtaaagttggtgtttcaaaaacatagctgagcttgtctaacttaccatgttggaaacacatcttaacttctaaatttacaaggcctatcatgtccttgtcatgaaaagcactaaaaaaaaaaagagtttaagtggctaaagtcatagttttgcaagagattaatgatctgccttatattagagtcagagactaatggtggcttaaatgcacgaatgtctttttttttaaaactgtcattttttactgtcttttgctccatatcaggaaatattttggtaggaattaggagaacaaaaagcacttttatcccatttatttctttaaaaaatgtaaggatttcatttatattgaaaaataatattaatcattttgctgttaacacaattctctgatgcggtgctgtacagtcatttttaaatctcttgctaacattttattggcagtatgtatttctaccattgtaaccaccattgtgctattgtatctcttcacttctgtgaaagtaatattttttataaaatacactgaaatttaacctcagtaattgagtccattttcaagtgtggtcaagaataatcttcttggcttacccctttacataagcattataaactaaaatgaaaaccaaa

SEQ ID NO: 161853 - DNA, 3255 bp, Homo sapiens
  Payload ID: 11591
  Gene Symbol: OLFM3
  Gene Name: olfactomedin 3
  Uniprot ID: Q96PB7
  ENST ID: ENST00000370103
  CDS Start-End: 215-1591
tcctagctctgagaatgcctgcggaatgatcgccccccagggcggctgccgccgctgccgctgctgctgttattgctactgctgctgccgccgcctctgcttccactcggctctgactggcaggcagaaagtgcaactgacgagggaaaggtctctgcagtgagtggagagcctacataaaagagagtaaagaggggcaaaaacccagatcagaatgcaggcgacgtccaaccttctcaacctcctgctgctgtctttgtttgccggattagatccttccaagactcagattagtcctaaagaagggtggcaggtgtacagctcagctcaggatcctgatgggcggtgcatttgcacagttgttgctccagaacaaaacctgtgttcccgggatgccaaaagcaggcaacttcgccaactactggaaaaggttcagaacatgtcccagtctattgaagtcttaaacttgagaactcagagagatttccaatatgttttaaaaatggaaacccaaatgaaagggctgaaggcaaaatttcggcagattgaagatgatcgaaagacacttatgaccaagcattttcaggagttgaaagagaaaatggacgagctcctgcctttgatccccgtgctggaacagtacaaaacagatgctaagttaatcacccagttcaaggaggaaataaggaatctgtctgctgtcctcactggtattcaggaggaaattggtgcctatgactacgaggaactacaccaaagagtgctgagcttggaaacaagacttcgtgactgcatgaaaaagctaacatgtggcaaactgatgaaaatcacaggcccagttacagtcaagacatctggaacccgatttggtgcttggatgacagaccctttagcatctgagaaaaacaacagagtctggtacatggacagttatactaacaataaaattgttcgtgaatacaaatcaattgcagactttgtcagtggggctgaatcaaggacatacaaccttcctttcaagtgggcaggaactaaccatgttgtctacaatggctcactctattttaacaagtatcagagtaatatcatcatcaaatacagctttgatatggggagagtgcttgcccaacgaagcctggagtatgctggttttcataatgtttacccctacacatggggtggattctctgacatcgacctaatggctgatgaaatcgggctgtgggctgtgtatgcaactaaccagaatgcaggcaatattgtcatcagccaacttaaccaagataccttggaggtgatgaagagctggagcactggctaccccaagagaagtgcaggggaatctttcatgatctgtgggacactgtatgtcaccaactcccacttaactggagccaaggtgtattattcctattccaccaaaacctccacatatgagtacacagacattcccttccataaccaatactttcacatatccatgcttgactacaatgcaagagatcgagctctctatgcctggaacaatggccaccaggtgctgttcaatgtcacccttttccatatcatcaagacagaggatgacacataggcaaatgtgacatgttttcattgatttaaacagtgtgatttgtgataaactctataagaccccttccgtttttttcttcactattatttttcatcatttctccaaagcaaagcatttttattgtaaagttggtgtttcaaaaacatagctgagcttgtctaacttaccatgttggaaacacatcttaacttctaaatttacaaggcctatcatgtccttgtcatgaaaagcactaaaaaaaaaaagagtttaagtggctaaagtcatagttttgcaagagattaatgatctgccttatattagagtcagagactaatggtggcttaaatgcacgaatgtctttttttttaaaactgtcattttttactgtcttttgctccatatcaggaaatattttggtaggaattaggagaacaaaaagcacttttatcccatttatttctttaaaaaatgtaaggatttcatttatattgaaaaataatattaatcattttgctgttaacacaattctctgatgcggtgctgtacagtcatttttaaatctcttgctaacattttattggcagtatgtatttctaccattgtaaccaccattgtgctattgtatctcttcacttctgtgaaagtaatattttttataaaatacactgaaatttaacctcagtaattgagtccattttcaagtgtggtcaagaataatcttcttggcttacccctttacataagcattataaactaaaatgaaaaccaaaccagacacctgacatagagtctttattttaccccaagttttttgggccactgacattgaatgcaacaactgatttcatacaactgagttactctgttcactccactgaatgcaacccatatagtttcttgcacaaggtgcatctggattccaaatattggatttgagttgactctactcatttattatacactaaagaaattttgttcttcatagttaaatgtactagcatttaatttatattttacatacaacttgcaataatgaaattccttatgtcaggaccctgaaaataagcacatttgaaaactcttagaaaaaaaaaattctgtaatgtcctctagatttagattatgagccctgaggagttattggcaagatttgtgcaaaataaaatatggggagacttgggagttgtctttgtggtttcaaaagtgtaaataaccaattcagaaaacaaaatggaaaaacgaccccttgttaccttgattcactgtatgtggaaaaataatgtaaccaaaagggaagagctttaataatacttatgttaataactctatgaaacatataagctaactatatatcaaacatttcattgagtttggatgtattttccacatattaaaaaaatagttccctaaggcagctttatggaaactaatataggttggttttacaatttaaaaagtatattctataataaataataaaacaaattgttttaaatgtttagtttcacacatacatagtaccatgattttctttgaaagataaggatgtaatgatttagataaagcatcatgtaaagaaatcctaacatttaagtgtaattcatttcaaatgtcacaagtaaagcatcatcctcaaatatctcactgtcaaaattgtagaattaaataacccaatcttgaaa

SEQ ID NO: 161854 - DNA, 2801 bp, Homo sapiens
  Payload ID: 11591
  Gene Symbol: OLFM3
  Gene Name: olfactomedin 3
  Uniprot ID: Q96PB7
  ENST ID: ENST00000536598
  CDS Start-End: 161-583
tcagactcagattagtcctaaagaagggtggcaggtgtacagctcagctcaggatcctgatgggcggtgcatttgcacagttgttgctccagaacaaaacctgtgttcccgggatgccaaaagcaggcaacttcgccaactactggaaaaggttcagaacatgtcccagtctattgaagtcttaaacttgagaactcagagagatttccaatatgttttaaaaatggaaacccaaatgaaagggctgaaggcaaaatttcggcagattgaagatgatcgaaagacacttatgaccaagcattttcaggagttgaaagagaaaatggacgagctcctgcctttgatccccgtgctggaacagtacaaaacagatgctaagttaatcacccagttcaaggaggaaataaggaatctgtctgctgtcctcactggtattcaggaggaaattggtgcctatgactacgaggaactacaccaaagagtgctgagcttggaaacaagacttcgtgactgcatgaaaaagctaattgatttaaaaaagagaaaagaagaagaaaaaaggcaacagaaaggagaagcataagcaatagtattttgggaagctataacacgcgacttgcctccctgttcacctttgtattctcagcacctagaatagttctggtacaaaataagttcacagtaaatggttgtcaaatgaataaattaattattatatctttaaatagtaactattgtttttaccctctaacatatttcagagaaatgcttagtgctacaagaaagtaaagtttgctttctaaggtatgattgactggagtaagaatcaattttcctcacaaaaccaggtacaaaataaaagagtcaactagccaaaagaccactttaccatggtcacccaatgtttagtttaagagccagaagcttttaacctccggtacaaattctgtcctaagttttggccgaaacaacctaagactcagcagtatccctttgccatagagatgcaaggctggattagattcaagcaccatcgaagccaaagacaccccaagccagtgatgtgctgtgggttgtttggaaatgtcgattagataaggctcatggtatgattcagagctccaaggacagttcttgttcaggtttcaactaatcaacatcggattatgcacacctcaacatctgaaatatgcagacatttgagacaaataccagaattgtgtcttcttgctttgtacaaatcatgcttcagtctggcaataagcatgtggcaaactgatgaaaatcacaggcccagttacagtcaagacatctggaacccgatttggtgcttggatgacagaccctttagcatctgagaaaaacaacagagtctggtacatggacagttatactaacaataaaattgttcgtgaatacaaatcaattgcagactttgtcagtggggctgaatcaaggacatacaaccttcctttcaagtgggcaggaactaaccatgttgtctacaatggctcactctattttaacaagtatcagagtaatatcatcatcaaatacagctttgatatggggagagtgcttgcccaacgaagcctggagtatgctggttttcataatgtttacccctacacatggggtggattctctgacatcgacctaatggctgatgaaatcgggctgtgggctgtgtatgcaactaaccagaatgcaggcaatattgtcatcagccaacttaaccaagataccttggaggtgatgaagagctggagcactggctaccccaagagaagtgcaggggaatctttcatgatctgtgggacactgtatgtcaccaactcccacttaactggagccaaggtgtattattcctattccaccaaaacctccacatatgagtacacagacattcccttccataaccaatactttcacatatccatgcttgactacaatgcaagagatcgagctctctatgcctggaacaatggccaccaggtgctgttcaatgtcacccttttccatatcatcaagacagaggatgacacataggcaaatgtgacatgttttcattgatttaaacagtgtgatttgtgataaactctataagaccccttccgtttttttcttcactattatttttcatcatttctccaaagcaaagcatttttattgtaaagttggtgtttcaaaaacatagctgagcttgtctaacttaccatgttggaaacacatcttaacttctaaatttacaaggcctatcatgtccttgtcatgaaaagcactaaaaaaaaaaagagtttaagtggctaaagtcatagttttgcaagagattaatgatctgccttatattagagtcagagactaatggtggcttaaatgcacgaatgtctttttttttaaaactgtcattttttactgtcttttgctccatatcaggaaatattttggtaggaattaggagaacaaaaagcacttttatcccatttatttctttaaaaaatgtaaggatttcatttatattgaaaaataatattaatcattttgctgttaacacaattctctgatgcggtgctgtacagtcatttttaaatctcttgctaacattttattggcagtatgtatttctaccattgtaaccaccattgtgctattgtatctcttcacttctgtgaaagtaatattttttataaaatacactgaaatttaacctcagtaattgagtccattttcaagtgtggtcaagaataatcttcttggcttacccctttacataagcattataaactaaaatgaaaaccaaa

SEQ ID NO: 161855 - DNA, 2897 bp, Homo sapiens
  Payload ID: 11592
  Gene Symbol: OLFM4
  Gene Name: olfactomedin 4
  Uniprot ID: Q6UX06
  ENST ID: ENST00000219022
  CDS Start-End: 79-1611
atggggaaatcaccactgggcactataagaagcccctgggctctctgcagagccagcggctccagctaagaggacaagatgaggcccggcctctcatttctcctagcccttctgttcttccttggccaagctgcaggggatttgggggatgtgggacctccaattcccagccccggcttcagctctttcccaggtgttgactccagctccagcttcagctccagctccaggtcgggctccagctccagccgcagcttaggcagcggaggttctgtgtcccagttgttttccaatttcaccggctccgtggatgaccgtgggacctgccagtgctctgtttccctgccagacaccacctttcccgtggacagagtggaacgcttggaattcacagctcatgttctttctcagaagtttgagaaagaactttccaaagtgagggaatatgtccaattaattagtgtgtatgaaaagaaactgttaaacctaactgtccgaattgacatcatggagaaggataccatttcttacactgaactggacttcgagctgatcaaggtagaagtgaaggagatggaaaaactggtcatacagctgaaggagagttttggtggaagctcagaaattgttgaccagctggaggtggagataagaaatatgactctcttggtagagaagcttgagacactagacaaaaacaatgtccttgccattcgccgagaaatcgtggctctgaagaccaagctgaaagagtgtgaggcctctaaagatcaaaacacccctgtcgtccaccctcctcccactccagggagctgtggtcatggtggtgtggtgaacatcagcaaaccgtctgtggttcagctcaactggagagggttttcttatctatatggtgcttggggtagggattactctccccagcatccaaacaaaggactgtattgggtggcgccattgaatacagatgggagactgttggagtattatagactgtacaacacactggatgatttgctattgtatataaatgctcgagagttgcggatcacctatggccaaggtagtggtacagcagtttacaacaacaacatgtacgtcaacatgtacaacaccgggaatattgccagagttaacctgaccaccaacacgattgctgtgactcaaactctccctaatgctgcctataataaccgcttttcatatgctaatgttgcttggcaagatattgactttgctgtggatgagaatggattgtgggttatttattcaactgaagccagcactggtaacatggtgattagtaaactcaatgacaccacacttcaggtgctaaacacttggtataccaagcagtataaaccatctgcttctaacgccttcatggtatgtggggttctgtatgccacccgtactatgaacaccagaacagaagagattttttactattatgacacaaacacagggaaagagggcaaactagacattgtaatgcataagatgcaggaaaaagtgcagagcattaactataacccttttgaccagaaactttatgtctataacgatggttaccttctgaattatgatctttctgtcttgcagaagccccagtaagctgtttaggagttagggtgaaagagaaaatgtttgttgaaaaaatagtcttctccacttacttagatatctgcaggggtgtctaaaagtgtgttcattttgcagcaatgtttaggtgcatagttctaccacactagagatctaggacatttgtcttgatttggtgagttctcttgggaatcatctgcctcttcaggcgcattttgcaataaagtctgtctagggtgggattgtcagaggtctaggggcactgtgggcctagtgaagcctactgtgaggaggcttcactagaagccttaaattaggaattaaggaacttaaaactcagtatggcgtctagggattctttgtacaggaaatattgcccaatgactagtcctcatccatgtagcaccactaattcttccatgcctggaagaaacctggggacttagttaggtagattaatatctggagctcctcgagggaccaaatctccaacttttttttcccctcactagcacctggaatgatgctttgtatgtggcagataagtaaatttggcatgcttatatattctacatctgtaaagtgctgagttttatggagagaggcctttttatgcattaaattgtacatggcaaataaatcccagaaggatctgtagatgaggcacctgctttttcttttctctcattgtccaccttactaaaagtcagtagaatcttctacctcataacttccttccaaaggcagctcagaagattagaaccagacttactaaccaattccaccccccaccaacccccttctactgcctactttaaaaaaattaatagttttctatggaactgatctaagattagaaaaattaattttctttaatttcattatgaacttttatttacatgactctaagactataagaaaatctgatggcagtgacaaagtgctagcatttattgttatctaataaagaccttggagcatatgtgcaacttatgagtgtatcagttgttgcatgtaatttttgcctttgtttaagcctggaacttgtaagaaaatgaaaatttaatttttttttctaggacgagctatagaaaagctattgagagtatctagttaatcagtgcagtagttggaaaccttgctggtgtatgtgatgtgcttctgtgcttttgaatgactttatcatctagtctttgtctatttttcctttgatgttcaagtcctagtctataggattggcagtttaaatgctttactcccccttttaaaataaatgattaaaatgtgctttgaaaaaa

SEQ ID NO: 161856 - DNA, 2792 bp, Homo sapiens
  Payload ID: 11593
  Gene Symbol: OLFML1
  Gene Name: olfactomedin-like 1
  Uniprot ID: Q6UWY5
  ENST ID: ENST00000329293
  CDS Start-End: 395-1603
gggggaagggaacggggggaagccatcttcaccccccaccccaatgcacacacaattaagccaggaagcagcttgcaaccactagcctggggagggtccgcatgtgtcaagggtgagggcaacagatgctggacccagggagctctctgccacaggtcagtctacaaggcctcagggaccaacttgccaacagctggacttgatcactagctggcaaactgagctcacgtatcgggtggaataacaagcggactttgctctctgctgtgcaaaacgctgtttttagaggatttgccacagcagcggatagagcaggagagcaccaccggagcccttgagacatccttgagaagagccacagcataagagactgccctgcttggtgttttgcaggatgatggtggcccttcgaggagcttctgcattgctggttctgttccttgcagcttttctgcccccgccgcagtgtacccaggacccagccatggtgcattacatctaccagcgctttcgagtcttggagcaagggctggaaaaatgtacccaagcaacgagggcatacattcaagaattccaagagttctcaaaaaatatatctgtcatgctgggaagatgtcagacctacacaagtgagtacaagagtgcagtgggtaacttggcactgagagttgaacgtgcccaacgggagattgactacatacaataccttcgagaggctgacgagtgcatcgaatcagaggacaagacactggcagaaatgttgctccaagaagctgaagaagagaaaaagatccggactctgctgaatgcaagctgtgacaacatgctgatgggcataaagtctttgaaaatagtgaagaagatgatggacacacatggctcttggatgaaagatgctgtctataactctccaaaggtgtacttattaattggatccagaaacaacactgtttgggaatttgcaaacatacgggcattcatggaggataacaccaagccagctccccggaagcaaatcctaacactttcctggcagggaacaggccaagtgatctacaaaggttttctattttttcataaccaagcaacttctaatgagataatcaaatataacctgcagaagaggactgtggaagatcgaatgctgctcccaggaggggtaggccgagcattggtttaccagcactccccctcaacttacattgacctggctgtggatgagcatgggctctgggccatccactctgggccaggcacccatagccatttggttctcacaaagattgagccgggcacactgggagtggagcattcatgggataccccatgcagaagccaggatgctgaagcctcattcctcttgtgtggggttctctatgtggtctacagtactgggggccagggccctcatcgcatcacctgcatctatgatccactgggcactatcagtgaggaggacttgcccaacttgttcttccccaagagaccaagaagtcactccatgatccattacaaccccagagataagcagctctatgcctggaatgaaggaaaccagatcatttacaaactccagacaaagagaaagctgcctctgaagtaatgcattacagctgtgagaaagagcactgtggctttggcagctgttctacaggacagtgaggctatagccccttcacaatatagtatccctctaatcacacacaggaagagtgtgtagaagtggaaatacgtatgcctcctttcccaaatgtcactgccttaggtatcttccaagagcttagatgagagcatatcatcaggaaagtttcaacaatgtccattactcccccaaacctcctggctctcaaggatgaccacattctgatacagcctacttcaagccttttgttttactgctccccagcatttactgtaactctgccatcttccctcccacaattagagttgtatgccagcccctaatattcaccactggcttttctctcccctggcctttgctgaagctcttccctctttttcaaatgtctattgatattctcccattttcactgcccaactaaaatactattaatatttctttcttttcttttcttttttttgagacaaggtctcactatgttgcccaggctggtctcaaactccagagctcaagagatcctcctgcctcagcctcctaagtacctgggattacaggcatgtgccaccacacctggcttaaaatactatttcttattgaggtttaacctctatttcccctagccctgtccttccactaagcttggtagatgtaataataaagtgaaaatattaacatttgaatatcgctttccaggtgtggagtgtttgcacatcatttaattctcgtttcacctttgtgaaacatgcacaagtctttacagctgtcattctagagtttaggtgagtaacacaattacaaagtgaaagatacagctagaaaatactacaaatcccatagtttttccattgcccaaggaagcatcaaatacgtatgtttgttcacctactcttatagtcaatgcgttcatcgtttcagcctaaaaataatagtctgtccctttagccagttttcatgtctgcacaagacctttcaataggcctttcaaatgataattcctccagaaaaccagtctaagggtgaggaccccaactctagcctcctcttgtcttgctgtcctctgtttctctctttctgctttaaattcaataaaagtgacactgagcaaataacctcatcaggttatatttgcccacataccctaagcacaaaa

SEQ ID NO: 161857 - DNA, 575 bp, Homo sapiens
  Payload ID: 11593
  Gene Symbol: OLFML1
  Gene Name: olfactomedin-like 1
  ENST ID: ENST00000534244
  CDS Start-End: 371-575
atcttcaccccccaccccaatgcacacacaattaagccaggaagcagcttgcaaccactagcctggggagggtccgcatgtgtcaagggtgagggcaacagatgctggacccagggagctctctgccacaggtcagtctacaaggcctcagggaccaacttgccaacagctggacttgatcactagctggcaaactgagctcacgtatcgggtggaataacaagcggactttgctctctgctgtgcaaaacgctgtttttagaggatttgccacagcagcggatagagcaggagagcaccaccggagcccttgagacatccttgagaagagccacagcataagagactgccctgcttggtgttttgcaggatgatggtggcccttcgaggagcttctgcattgctggttctgttccttgcagcttttctgcccccgccgcagtgtacccaggacccagccatggtgcattacatctaccagcgctttcgagtcttggagggctggaaaaatgtacccaagcaacgagggcatacattcaagaattccaagagttctcaaaaaatatatctgtcat

SEQ ID NO: 161858 - DNA, 1620 bp, Homo sapiens
  Payload ID: 11593
  Gene Symbol: OLFML1
  Gene Name: olfactomedin-like 1
  Uniprot ID: Q6UWY5
  ENST ID: ENST00000530135
  CDS Start-End: 251-1459
aaaaagttgggggtggtttgtgttggggaaggcctgcgattggactgcagaatccactagggaggaggaaagcaaaagtaaaaaggaaatagctgggggaagggaacggggggaagccatcttcaccccccaccccaatgcacacacaattaagccaggaagcagcttgcaaccactagcctggggagggtccgcatgtgtcaagggtgagggcaacagatgctggacccagggagctctctgccacaggatgatggtggcccttcgaggagcttctgcattgctggttctgttccttgcagcttttctgcccccgccgcagtgtacccaggacccagccatggtgcattacatctaccagcgctttcgagtcttggagcaagggctggaaaaatgtacccaagcaacgagggcatacattcaagaattccaagagttctcaaaaaatatatctgtcatgctgggaagatgtcagacctacacaagtgagtacaagagtgcagtgggtaacttggcactgagagttgaacgtgcccaacgggagattgactacatacaataccttcgagaggctgacgagtgcatcgaatcagaggacaagacactggcagaaatgttgctccaagaagctgaagaagagaaaaagatccggactctgctgaatgcaagctgtgacaacatgctgatgggcataaagtctttgaaaatagtgaagaagatgatggacacacatggctcttggatgaaagatgctgtctataactctccaaaggtgtacttattaattggatccagaaacaacactgtttgggaatttgcaaacatacgggcattcatggaggataacaccaagccagctccccggaagcaaatcctaacactttcctggcagggaacaggccaagtgatctacaaaggttttctattttttcataaccaagcaacttctaatgagataatcaaatataacctgcagaagaggactgtggaagatcgaatgctgctcccaggaggggtaggccgagcattggtttaccagcactccccctcaacttacattgacctggctgtggatgagcatgggctctgggccatccactctgggccaggcacccatagccatttggttctcacaaagattgagccgggcacactgggagtggagcattcatgggataccccatgcagaagccaggatgctgaagcctcattcctcttgtgtggggttctctatgtggtctacagtactgggggccagggccctcatcgcatcacctgcatctatgatccactgggcactatcagtgaggaggacttgcccaacttgttcttccccaagagaccaagaagtcactccatgatccattacaaccccagagataagcagctctatgcctggaatgaaggaaaccagatcatttacaaactccagacaaagagaaagctgcctctgaagtaatgcattacagctgtgagaaagagcactgtggctttggcagctgttctacaggacagtgaggctatagccccttcacaatatagtatccctctaatcacacacaggaagagtgtgtagaagtggaaatacgtatgcctcctttcccaaatgtcactgcctta

SEQ ID NO: 161859 - DNA, 1438 bp, Homo sapiens
  Payload ID: 11593
  Gene Symbol: OLFML1
  Gene Name: olfactomedin-like 1
  ENST ID: ENST00000528758
  CDS Start-End: 271-441
gatgctggacccagggagctctctgccacaggtcagtctacaaggcctcagggaccaacttgccaacagctggacttgatcactagctggcaaactgagctcacgtatcgggtggaataacaagcggactttgctctctgctgtgcaaaacgctgtttttagaggatttgccacagcagcggatagagcaggagagcaccaccggagcccttgagacatccttgagaagagccacagcataagagactgccctgcttggtgttttgcaggatgatggtggcccttcgaggagcttctgcattgctggttctgttccttgcagcttttctgcccccgccgcagtgtacccaggacccagccatggtgcattacatctaccagcgctttcgagtcttggagcaagggctggaaaaatgtacccaagctgtgacaacatgctgatgggcataaagtctttgaaaatagtgaagaagatgatggacacacatggctcttggatgaaagatgctgtctataactctccaaaggtgtacttattaattggatccagaaacaacactgtttgggaatttgcaaacatacgggcattcatggaggataacaccaagccagctccccggaagcaaatcctaacactttcctggcagggaacaggccaagtgatctacaaaggttttctattttttcataaccaagcaacttctaatgagataatcaaatataacctgcagaagaggactgtggaagatcgaatgctgctcccaggaggggtaggccgagcattggtttaccagcactccccctcaacttacattgacctggctgtggatgagcatgggctctgggccatccactctgggccaggcacccatagccatttggttctcacaaagattgagccgggcacactgggagtggagcattcatgggataccccatgcagaagccaggatgctgaagcctcattcctcttgtgtggggttctctatgtggtctacagtactgggggccagggccctcatcgcatcacctgcatctatgatccactgggcactatcagtgaggaggacttgcccaacttgttcttccccaagagaccaagaagtcactccatgatccattacaaccccagagataagcagctctatgcctggaatgaaggaaaccagatcatttacaaactccagacaaagagaaagctgcctctgaagtaatgcattacagctgtgagaaagagcactgtggctttggcagctgttctacaggacagtgaggctatagccccttcacaatatagtatccctctaatcacacacaggaagagtgtgtagaagtggaaatacgtatgcctcctttcccaaatgtcactgccttaggtatcttccaagagcttagatgagagcatatcatcaggaaagtttcaacaatgtccattact

SEQ ID NO: 161860 - DNA, 5964 bp, Homo sapiens
  Payload ID: 11594
  Gene Symbol: OLFML2A
  Gene Name: olfactomedin-like 2A
  Uniprot ID: Q68BL7
  ENST ID: ENST00000288815
  CDS Start-End: 175-1491
catatcctagaggttgggtgaccaaccctgtcccagtttgcctgggacttgagggtttttccaggatgcagcactttcagtgctaaaactaggaatgttccaggcactctgggatgagttggtcaccttgcctaggtgcctaagaacctctcccctgcccacgtactaagaccaatgagtaagagagacaaggctgggaaggacacagctagaggaaaaggcaaggacatcagcaagtatggcagtgtgcagaaaagctttgcagacagaggcctcccaaaacctcccaaggagaagctgcttcaggtggagaagctgagaaaggagagcggcaagggcagtttcctccagcccacagccaagccccgcgccctggcccagcagcaggctgtgatccggggcttcacctactacaaggcaggcaagcaggaggtgaccgaggcggtggcagacaacaccctccagggcacttcctggctggagcaactgccgcccaaggtggagggcaggtccaactccgcagagcccaactccgcagagcaggatgaggctgagcccaggtcctccgagcgagtggacctggcttctggcacccccacttcaatccctgccaccaccaccaccgccaccaccaccccaacccccaccaccagtctcctgcccaccgagccaccttcaggtccagaagtctccagccaaggcagagaggcgagctgtgagggcaccctccgggctgtggacccccctgtgaggcaccacagctatgggcgccacgagggagcctggatgaaggaccctgcagctcgagacgacaggatctatgtcaccaactactactatggaaacagcctggtggagttccgcaacctggaaaacttcaagcaaggccgctggagtaacatgtacaagctaccctacaactggatcggcacaggccacgtggtgtaccagggcgccttctactacaaccgcgccttcaccaagaacatcatcaagtacgacctacggcagcgcttcgtggcctcctgggcgctgctgcccgacgtggtatatgaggacaccacaccttggaagtggcgcggacactcggacattgactttgccgtggacgagagcggcctgtgggtcatctaccccgccgtggacgaccgcgatgaggcccagcccgaggtgatcgtcctgagtcgcttggaccccggcgatctctccgtgcaccgggagaccacgtggaagacacggctgcggcggaactcctacgggaactgcttcctggtgtgcggcatcctgtatgccgtggacacgtacaaccagcaggaaggccaggtcgcctacgctttcgacacgcacacgggcaccgacgcacgcccccagctgccgttcctcaacgagcacgcctacaccacccagatcgactacaaccccaaggagcgggtgctgtacgcctgggacaatggccaccagctcacctacaccctccacttcgtggtctgagtggagacctgtgctccccggagaggggcagcagtgcgggaggggctttgcacagcagctcctgcaactgacccagtccgcaaatatttattgggggccagcccagggctgggactgggcatgaggtggtcaccaggattgagcttcctcagcacccagtgggtaatacttgcttccacttgcagagcaccgtgccaagcacttcccacacacttacccgtttgattctcctagcacctcccttggaggtagagatcatgaacccatttaacagacgaggagacaggctcagagaggcaccgtcccttgcctaacacctcagttgtgatcaggcaggctgtgctctcaggacagccccattttagggatgaggagacttcaccacgccctcccctccctgccctcccccatctccccggtctcccttgttctctcaacccagtctcccttcccagggccactcagaaccagaggtctttagggccagtgtactggtgtggggtggaggccctggctctgcctgccatcctagggccctgttctggctgagctgttggtggccctgggctttgggccccttagccaatgtccttgtctcttgtctttggccagccccctcagcccagcccaccccacccgctgtccggccacattccaaacctctaccgtcacctagctgctgagcagaaaccgcaccccgagagaaaatcccatcctctgttccaaggcccctgtctgctctatgctcatttttattttctcttattcttcatcagtgccgtcatttgtttctgcagcagcagctgagaaggcagccggcagctctgccagggtggggagctgagctgaggctccctctccacccagaagcactggcgttgttcacatagtcaggccttgggtcccctccctggttcatcccagagcctttgggcctggagtccgccttgtcctttttctctgggctttcaaacccacaacctttacacactcagggatacctccgggtctgccatgaataagaccctaggcccaagtctggtgtggtgccaggatggcacagtttccctcttccttgccagccctgacctggtcactgggcaggctggcccagcagcctgggggctgcagaagacatggtgtgagtagttgggtccaggggaggcatcaggccttcttctggttgcaggagagaaccagagggtgggaacggggagggaagaactgagggtctgcagactggacttttcctggctcgacccaggacttgggttgaggatgcacgggggccaccttgcccggggccactggtggctccccagagcctcagacccacacagcccagaggacgaggccttcaagcctgcccctcttctgcttttttagacagtatttttagagctggaaagaaattttctagcccaactccctgtttcatgaaagagaaaagaggctcagaaaagtttagagagcagctcagtgtcacactgggagctgggcacagccgatctccttccagaagggttctgtctgtatcctttattctccgcacatggaggctgccctacctgggaaggcaccccagcacctgtgaaggacatttactgctcatcctcacctgccccctggcccttgctgccttcattctgtcccaatgccagctccctggatgtctgtatgtttgaataccagttgccatgttaggaaggtcagctgcacagccaagagtgtaagagtgtaaagaaatgcctttttttttttttttgagttggagttttgctcttgtcgcccaggctggagtgcagtggcgcgatctcggctcactgcaacctctgccccctgggttcaagcgattctcctgcctcagcctccctagtagctgggactacagcacccaccaccacacccagctaatttttgtatttttagtagagacaggggtttcaccacgttggccaggctggtctcgaactcctgaccttaggtgatccgcccgcctcagcctcccaaagtgttgggattacaggcatgagccactgcgcctggccagcaaatgctttttgtgcagaatacacttctttcaggcattgtcaggtgctgttttgtttaagctctaactcacccctggaatacaggggaatgatgacaaccagcccagccaggcctgactcatcatggtcacatccagcccccacccccggccaactaaccactgcaggctcctcttccagactcaccagggggcctcgaggccccggcatctcccttggccctgggtgtgggttttacaagactgtgtctttcatgacatcatagcccaaccatgtgagaagaaggagaaggcccccctttcttcattaatctgaaaaaaaggaaagtgagaataggctgatttttaaaagttaaggggcaagcagcattgcattctgggggaacgatcctggccacagccgccaaacaaacattcactaggcctcttctgttttcatacccttgtaagtgggttatgtggtgggtatggtcagttttttcttttttcttttcttttcttttttttgagacagagtttcgcttttgttgcccgggctggaatgcaatggcgcgattcagctcactgcaatctccgcctcccgggttcaagtgattctcctgccttagcctcctgaaaagctgggattacagggccctgccaccaagcccagctaattgtatttttagtagagacaggatttcaccatgttggccaggccagtctcaaactcctgacctcaggtgatccacctgcctcagcctcccagactgttgggattacaggcatgagccaccacgcctggccagtttcttcattttacatatggtcacattggcgcctagaacagttaggtcgctcgtcacataggcagttaagtggagaaccaggtttcaaaatcaggtaagaaaaccatcatcattaactgagcaccagctgtgctaagcctgccacgggcgtatccttgcagcctcacaacagtgggaggtctgtatcctgaatgtcctcattttacagatgaggacattgaggagaagagacttacccaggctcacacagcagctcagcctgttccaggcgctggtcagtgcgtgttctttgccaccagcctgtcactccagtggcagctccagaaacggaggctgttgcttttatccctaaactgcatccacagagaagccccaagaaggaggttggggccagctcataaaaagcctgaatgccaagccaaggagtggatgcctccagtcatatttagaacaaagtcaagtataaatttacagagaaaaaattctaagacagttggatgttgtcctgttggtgaggaagggaaaggtttttcttgtagggaactggaaccagcccacaactgcacacttgtgagctgtcatggaaacctgatccccaacagcttttgaggttgtttgtttgtttgtttgtttacctgtcttgggctttgttgcttttggcaaaaggtacttcaaacaagggagggcctggactgagggggaccaggtcttcttgctgacctcgtctacaaaggcaaaggaaggcaaaggaagctgtctcgggtgtttctgaacaacgtgactcatgaggggctttggctacctcttgcgttccccctagagatgtccaggccttacatttaatcggctttctctgcggtggggtagagaatggagctcccgccttgcgggcagtgctaaaggtggagctgggggattttcctgggaatgatttgagggctcttgaaagcccatgtgttccaaagcgtctttaactctgggatagcattggaagccgctgtcatgacaggacatggcactggatggctggcagagagccctggctgggagttagggagccctgggttggaatccagccccacctcttttatgccacaggtttggtcaagttctctcccgctcagggtagggctgtgaactccctcttacagctaagaacatgcagcttagtgaggacaagacccttctagagctttacccctaatccccccccaggagccccgaggccggcattattcctccccattacaggtgatgagcctcaaattcagagagcttaagcaacctgctcagggtcacgtctccaacaggcagtagagtcaaggtataaaccaggtctgtttttgtaccagagtcccagactaactgttggtaggaatcttgtaaccagtcatgttttcttccttgttttggccgctgggaagctcaaagtcaaattcgagacccttttttttccaattgtgctgagtctcctactagactcgcttcattctagctttctgcttttacctttaccctaatctttttatttttatgctattgtactttatttttgtaagttgctgagatatctgttttgcaacaagatgggctatatctaaataaagacatgatcaaaggtttgatttaaaagtc

SEQ ID NO: 161861 - DNA, 1067 bp, Homo sapiens
  Payload ID: 11594
  Gene Symbol: OLFML2A
  Gene Name: olfactomedin-like 2A
  ENST ID: ENST00000331715
  CDS Start-End: 114-1067
gcaggcgcggggcgcggggcaggcagagcgggcgaaggcgcggagctcgcagtgcagcccgcgcttcccagcgtccgtgcccggccgcctgtgcctaccgtgcccgtggcgccatggccgctgccgccctcccgccccggccgctgctccttctgccgctagtgctgctgctgagcggccgccccacgcgcgccgacagtaaggtgtttggggacctggaccaggtgaggatgacctcggagggctccgactgccgttgcaagtgcatcatgcggcccctgagcaaggacgcgtgtagccgagtgcgcagtgggcgggcacgcgtggaggacttctacacggtggagactgtgagctcgggcactgactgccgctgctcctgtaccgcacctccctcctctctcaacccctgtgagaacgagtggaagatggagaaactcaaaaagcaggcgcccgagctcctcaagagcatcaaggccaacctgagccgggagaatgaggtggtgaaggacagcgtgcgccacctcagtgagcagttgaggcactatgagaatcactctgccatcatgctgggcatcaagaaggagctgtcccgcctgggcctccagctgctgcagaaggatgccgccgccgcccctgccacccctgccacgggcactggtagcaaggcccaggacacagctagaggaaaaggcaaggacatcagcaagtatggcagtgtgcagaaaagctttgcagacagaggcctcccaaaacctcccaaggagaagctgcttcaggtggagaagctgagaaaggagagcggcaagggcagtttcctccagcccacagccaagccccgcgccctggcccagcagcaggctgtgatccggggcttcacctactacaaggcaggcaagcaggaggtgaccgaggcggtggcagacaacaccctccagggcacttcctggctggagcaactgccgcccaaggtggagggcaggtccaactccgcagagcccaactccgcagagcaggatgaggctgagcccaggtcctccgagcgagtggacctggcttctggcacc

SEQ ID NO: 161862 - DNA, 6425 bp, Homo sapiens
  Payload ID: 11594
  Gene Symbol: OLFML2A
  Gene Name: olfactomedin-like 2A
  Uniprot ID: Q68BL7
  ENST ID: ENST00000373580
  CDS Start-End: 1-1959
atggccgctgccgccctcccgccccggccgctgctccttctgccgctagtgctgctgctgagcggccgccccacgcgcgccgacagtaaggtgtttggggacctggaccaggtgaggatgacctcggagggctccgactgccgttgcaagtgcatcatgcggcccctgagcaaggacgcgtgtagccgagtgcgcagtgggcgggcacgcgtggaggacttctacacggtggagactgtgagctcgggcactgactgccgctgctcctgtaccgcacctccctcctctctcaacccctgtgagaacgagtggaagatggagaaactcaaaaagcaggcgcccgagctcctcaagctgcagtccatggtggatctcctggagggcaccctgtacagcatggacttgatgaaggtgcacgcctacgtccacaaggtggcctcccagatgaacacactggaagagagcatcaaggccaacctgagccgggagaatgaggtggtgaaggacagcgtgcgccacctcagtgagcagttgaggcactatgagaatcactctgccatcatgctgggcatcaagaaggagctgtcccgcctgggcctccagctgctgcagaaggatgccgccgccgcccctgccacccctgccacgggcactggtagcaaggcccaggacacagctagaggaaaaggcaaggacatcagcaagtatggcagtgtgcagaaaagctttgcagacagaggcctcccaaaacctcccaaggagaagctgcttcaggtggagaagctgagaaaggagagcggcaagggcagtttcctccagcccacagccaagccccgcgccctggcccagcagcaggctgtgatccggggcttcacctactacaaggcaggcaagcaggaggtgaccgaggcggtggcagacaacaccctccagggcacttcctggctggagcaactgccgcccaaggtggagggcaggtccaactccgcagagcccaactccgcagagcaggatgaggctgagcccaggtcctccgagcgagtggacctggcttctggcacccccacttcaatccctgccaccaccaccaccgccaccaccaccccaacccccaccaccagtctcctgcccaccgagccaccttcaggtccagaagtctccagccaaggcagagaggcgagctgtgagggcaccctccgggctgtggacccccctgtgaggcaccacagctatgggcgccacgagggagcctggatgaaggaccctgcagctcgagacgacaggatctatgtcaccaactactactatggaaacagcctggtggagttccgcaacctggaaaacttcaagcaaggccgctggagtaacatgtacaagctaccctacaactggatcggcacaggccacgtggtgtaccagggcgccttctactacaaccgcgccttcaccaagaacatcatcaagtacgacctacggcagcgcttcgtggcctcctgggcgctgctgcccgacgtggtatatgaggacaccacaccttggaagtggcgcggacactcggacattgactttgccgtggacgagagcggcctgtgggtcatctaccccgccgtggacgaccgcgatgaggcccagcccgaggtgatcgtcctgagtcgcttggaccccggcgatctctccgtgcaccgggagaccacgtggaagacacggctgcggcggaactcctacgggaactgcttcctggtgtgcggcatcctgtatgccgtggacacgtacaaccagcaggaaggccaggtcgcctacgctttcgacacgcacacgggcaccgacgcacgcccccagctgccgttcctcaacgagcacgcctacaccacccagatcgactacaaccccaaggagcgggtgctgtacgcctgggacaatggccaccagctcacctacaccctccacttcgtggtctgagtggagacctgtgctccccggagaggggcagcagtgcgggaggggctttgcacagcagctcctgcaactgacccagtccgcaaatatttattgggggccagcccagggctgggactgggcatgaggtggtcaccaggattgagcttcctcagcacccagtgggtaatacttgcttccacttgcagagcaccgtgccaagcacttcccacacacttacccgtttgattctcctagcacctcccttggaggtagagatcatgaacccatttaacagacgaggagacaggctcagagaggcaccgtcccttgcctaacacctcagttgtgatcaggcaggctgtgctctcaggacagccccattttagggatgaggagacttcaccacgccctcccctccctgccctcccccatctccccggtctcccttgttctctcaacccagtctcccttcccagggccactcagaaccagaggtctttagggccagtgtactggtgtggggtggaggccctggctctgcctgccatcctagggccctgttctggctgagctgttggtggccctgggctttgggccccttagccaatgtccttgtctcttgtctttggccagccccctcagcccagcccaccccacccgctgtccggccacattccaaacctctaccgtcacctagctgctgagcagaaaccgcaccccgagagaaaatcccatcctctgttccaaggcccctgtctgctctatgctcatttttattttctcttattcttcatcagtgccgtcatttgtttctgcagcagcagctgagaaggcagccggcagctctgccagggtggggagctgagctgaggctccctctccacccagaagcactggcgttgttcacatagtcaggccttgggtcccctccctggttcatcccagagcctttgggcctggagtccgccttgtcctttttctctgggctttcaaacccacaacctttacacactcagggatacctccgggtctgccatgaataagaccctaggcccaagtctggtgtggtgccaggatggcacagtttccctcttccttgccagccctgacctggtcactgggcaggctggcccagcagcctgggggctgcagaagacatggtgtgagtagttgggtccaggggaggcatcaggccttcttctggttgcaggagagaaccagagggtgggaacggggagggaagaactgagggtctgcagactggacttttcctggctcgacccaggacttgggttgaggatgcacgggggccaccttgcccggggccactggtggctccccagagcctcagacccacacagcccagaggacgaggccttcaagcctgcccctcttctgcttttttagacagtatttttagagctggaaagaaattttctagcccaactccctgtttcatgaaagagaaaagaggctcagaaaagtttagagagcagctcagtgtcacactgggagctgggcacagccgatctccttccagaagggttctgtctgtatcctttattctccgcacatggaggctgccctacctgggaaggcaccccagcacctgtgaaggacatttactgctcatcctcacctgccccctggcccttgctgccttcattctgtcccaatgccagctccctggatgtctgtatgtttgaataccagttgccatgttaggaaggtcagctgcacagccaagagtgtaagagtgtaaagaaatgcctttttttttttttttgagttggagttttgctcttgtcgcccaggctggagtgcagtggcgcgatctcggctcactgcaacctctgccccctgggttcaagcgattctcctgcctcagcctccctagtagctgggactacagcacccaccaccacacccagctaatttttgtatttttagtagagacaggggtttcaccacgttggccaggctggtctcgaactcctgaccttaggtgatccgcccgcctcagcctcccaaagtgttgggattacaggcatgagccactgcgcctggccagcaaatgctttttgtgcagaatacacttctttcaggcattgtcaggtgctgttttgtttaagctctaactcacccctggaatacaggggaatgatgacaaccagcccagccaggcctgactcatcatggtcacatccagcccccacccccggccaactaaccactgcaggctcctcttccagactcaccagggggcctcgaggccccggcatctcccttggccctgggtgtgggttttacaagactgtgtctttcatgacatcatagcccaaccatgtgagaagaaggagaaggcccccctttcttcattaatctgaaaaaaaggaaagtgagaataggctgatttttaaaagttaaggggcaagcagcattgcattctgggggaacgatcctggccacagccgccaaacaaacattcactaggcctcttctgttttcatacccttgtaagtgggttatgtggtgggtatggtcagttttttcttttttcttttcttttcttttttttgagacagagtttcgcttttgttgcccgggctggaatgcaatggcgcgattcagctcactgcaatctccgcctcccgggttcaagtgattctcctgccttagcctcctgaaaagctgggattacagggccctgccaccaagcccagctaattgtatttttagtagagacaggatttcaccatgttggccaggccagtctcaaactcctgacctcaggtgatccacctgcctcagcctcccagactgttgggattacaggcatgagccaccacgcctggccagtttcttcattttacatatggtcacattggcgcctagaacagttaggtcgctcgtcacataggcagttaagtggagaaccaggtttcaaaatcaggtaagaaaaccatcatcattaactgagcaccagctgtgctaagcctgccacgggcgtatccttgcagcctcacaacagtgggaggtctgtatcctgaatgtcctcattttacagatgaggacattgaggagaagagacttacccaggctcacacagcagctcagcctgttccaggcgctggtcagtgcgtgttctttgccaccagcctgtcactccagtggcagctccagaaacggaggctgttgcttttatccctaaactgcatccacagagaagccccaagaaggaggttggggccagctcataaaaagcctgaatgccaagccaaggagtggatgcctccagtcatatttagaacaaagtcaagtataaatttacagagaaaaaattctaagacagttggatgttgtcctgttggtgaggaagggaaaggtttttcttgtagggaactggaaccagcccacaactgcacacttgtgagctgtcatggaaacctgatccccaacagcttttgaggttgtttgtttgtttgtttgtttacctgtcttgggctttgttgcttttggcaaaaggtacttcaaacaagggagggcctggactgagggggaccaggtcttcttgctgacctcgtctacaaaggcaaaggaaggcaaaggaagctgtctcgggtgtttctgaacaacgtgactcatgaggggctttggctacctcttgcgttccccctagagatgtccaggccttacatttaatcggctttctctgcggtggggtagagaatggagctcccgccttgcgggcagtgctaaaggtggagctgggggattttcctgggaatgatttgagggctcttgaaagcccatgtgttccaaagcgtctttaactctgggatagcattggaagccgctgtcatgacaggacatggcactggatggctggcagagagccctggctgggagttagggagccctgggttggaatccagccccacctcttttatgccacaggtttggtcaagttctctcccgctcagggtagggctgtgaactccctcttacagctaagaacatgcagcttagtgaggacaagacccttctagagctttacccctaatccccccccaggagccccgaggccggcattattcctccccattacaggtgatgagcctcaaattcagagagcttaagcaacctgctcagggtcacgtctccaacaggcagtagagtcaaggtataaaccaggtctgtttttgtaccagagtcccagactaactgttggtaggaatcttgtaaccagtcatgttttcttccttgttttggccgctgggaagctcaaagtcaaattcgagacccttttttttccaattgtgctgagtctcctactagactcgcttcattctagctttctgcttttacctttaccctaatctttttatttttatgctattgtactttatttttgtaagttgctgagatatctgttttgcaacaagatgggctatatctaaataaagacatgatcaaaggtttgattt

SEQ ID NO: 161863 - DNA, 3160 bp, Homo sapiens
  Payload ID: 11595
  Gene Symbol: OLFML2B
  Gene Name: olfactomedin-like 2B
  Uniprot ID: Q68BL8
  ENST ID: ENST00000294794
  CDS Start-End: 425-2677
gcccgcgccgccaccgcctcttccctccccgtgtccggtccccgtgcgtcccgaggctccccgccgcccgtcccggcgcgcaccgcgggcgtctgtccgaacgccttccagccacctgagccctcctgcgggcgactcgctcagctagcccgtgcccgcctccaccttctccgtcatcccctcttccttgcgtccggctctccactggggctgcacagtcgagggctgctcgcgtcgggaaggagatgcccagagtctctggggcgcaccctcccgtcccgctcagccgcacccagctttagaaggtgctctcagcagccactttcgggctctagcgaggacaccctctcgcagaagtccttgccgagaccccccgccccagccattctctgaaggggctgaggacactcttatcgcgcccctcatggccaagcctcggctgctagttctctacttcgctctgattgtggttccggcctgggtgtccagcattgtcctcacagggacaagcgagcccccagatgcgcagacagtggcgcctgcggaggacgagactctgcaaaacgaggcggacaaccaggagaacgttttatctcagttgctgggggactatgacaaggtcaaggctatgtctgagggctcggactgtcagtgcaagtgtgtggtgagacccctgggccgggatgcctgccagaggatcaatgcgggggcctccaggaaggaagacttctataccgtggaaaccatcacctcaggctcgtcgtgcaagtgtgcctgtgtagcacccccatcggccctcaatccctgcgagggagacttcaggctccagaagctgcgggaggcagacagccaggacttgaagctctccacaatcatagacatgttggaaggagcgttctatggcctggatctcctgaagctacattcagtcaccaccaaactggtggggcgagtggataaactggaggaggaagtgtctaaaaacctcaccaaggaaaatgaacaaatcaaagaggacatggaagaaattcgaaccgagatgaataagcgaggcaaagaaaattgctctgaaaacatcctagatagcatgccagacatccgctcagccctgcagagggatgcagcagcagcctacgcccacccagagtatgaagagcggtttctgcaggaagaaaccgtgtcccagcagatcaactccatcgaacttctgcagacgcgacccctggctctgcctgaggtggtgaagtcacagcggcccctgcagaggcaggtccacctgagaggccggccggcctcccagcccactgtcatccggggcatcacctactataaagccaaggtctctgaagaagagaatgacattgaagagcagcaagatgagtttttcagcggtgacaatggagtggatttgctgattgaagatcagctcctgagacacaacggcctgatgaccagtgtcacccggaggcctgcagccacccgtcagggacacagcactgctgtgacaagcgacctgaacgctcggaccgcaccctggtcctcagcactgccacagccctcgacctcagatcccagcatcgccaaccatgcctcagtgggaccaacactccaaacaacctcggtgtctccagatcccacaagggagtcagtcctgcagccttctcctcaggtaccagccaccactgtggcccacacagccacccagcaaccagcagccccagctcctccggcagtgtctcccagggaggcattgatggaagctatgcacacagtcccagtgcctcccaccacagtcagaacagactcgctggggaaagatgctcctgctgggtggggaacaacccctgccagccccacgctgagccccgaagaagaagatgacatccggaatgtcataggaaggtgcaaggacactctctccacaatcacggggccgaccacccagaacacatatgggcggaatgaaggggcctggatgaaggaccccctggccaaggatgagcggatttacgtaaccaactattactacggcaacaccctggtagagttccggaacctggagaacttcaaacaaggtcgctggagcaattcctacaagctcccgtacagctggatcggcacaggccacgtggtatacaatggcgccttctactacaatcgcgccttcacccgcaacatcatcaagtacgacctgaagcagcgctacgtggctgcctgggccatgctgcatgacgtggcctacgaggaggccaccccctggcgatggcagggccactcagacgtggactttgctgtggacgagaatggcctatggctcatctacccggccctggacgatgagggcttcagccaggaggtcattgtcctgagcaagctcaatgccgcggacctgagcacacagaaggagaccacatggcgcacggggctccggaggaatttctacggcaactgcttcgtcatctgtggggtgctgtatgccgtggatagctacaaccagcggaatgccaacatctcctacgctttcgacacccacaccaacacacagatcgtccccaggctgctgttcgagaatgagtattcctatacgacccagatagactacaaccccaaggaccgcctgctctatgcctgggacaatggccaccaggtcacttaccatgtcatctttgcctactgacacccttgtccccacaagcagaagcacagaggggtcactagcaccttgtgtgtatgtgtgtgcgcgcacgtgtgtgtaggtgggtatgtgttgtttaaaaatatatattattttgtataatattgcaaatgtaaaatgacaatttgggtctatttttttatatggattgtagatcaatccatacgtgtatgtgctggtctcatcctccccagtttatatttttgtgcaaatgaacttctccttttgaccagtaaccaccttccttcaagccttcagcccctccagctccaagtctcagatctcgaccattgaaaaggtttcttcatctgggtcttgcaggaggcaggcaacaccaggagcagaaatgaaagaggcaagaaagaagtgctatgtggcgagaaaaaaagttttaatgtattggagaagttttaaaaaacccagaaaaacgctttttttttttaataaagaagaaatttaaaatca

SEQ ID NO: 161864 - DNA, 1153 bp, Homo sapiens
  Payload ID: 11595
  Gene Symbol: OLFML2B
  Gene Name: olfactomedin-like 2B
  Uniprot ID: Q68BL8
  ENST ID: ENST00000367938
  CDS Start-End: 330-1031
agaacaggagcaaagcatagtggtgtgaaagttgccaaagatgggcatggtggaggctcaagtgtagggtcaagtgtagggtggatcaggggagtagcaggagatggtgtggaaaaatgtttggggtcaggttatacagggctgttaaagcctgccgaggagtccagactctaaatggatgaacagcaaaggtttaaggggtgaggcatcactagatcagcccaaaacctccatccacctcttctccaccaggaaggtgcaaggacactctctccacaatcacggggccgaccacccagaacacatatgggcggaatgaaggggcctggatgaaggaccccctggccaaggatgagcggatttacgtaaccaactattactacggcaacaccctggtagagttccggaacctggagaacttcaaacaaggtcgctggagcaattcctacaagctcccgtacagctggatcggcacaggccacgtggtatacaatggcgccttctactacaatcgcgccttcacccgcaacatcatcaagtacgacctgaagcagcgctacgtggctgcctgggccatgctgcatgacgtggcctacgaggaggccaccccctggcgatggcagggccactcagacgtggactttgctgtggacgagaatggcctatggctcatctacccggccctggacgatgagggcttcagccaggaggtcattgtcctgagcaagctcaatgccgcggacctgagcacacagaaggagaccacatggcgcacggggctccggaggaatttctacggcaactgcttcgtcatctgtggggtgctgtatgccgtggatagctacaaccagcggaatgccaacatctcctacgctttcgacacccacaccaacacacagatcgtccccaggctgctgttcgagaatgagtattcctatacgacccagatagactacaaccccaaggaccgcctgctctatgcctgggacaatggccaccaggtcacttaccatgtcatctttgcctactgacacccttgtccccacaagcagaagcacagaggggtcactagcaccttgtgtgtatgtgtgtgcgcgcacgtgtgtgtaggtgggtatgtgttgtttaaaaatatatattattttgtataata

SEQ ID NO: 161865 - DNA, 2685 bp, Homo sapiens
  Payload ID: 11595
  Gene Symbol: OLFML2B
  Gene Name: olfactomedin-like 2B
  ENST ID: ENST00000367940
  CDS Start-End: 211-2466
acagtcgagggctgctcgcgtcgggaaggagatgcccagagtctctggggcgcaccctcccgtcccgctcagccgcacccagctttagaaggtgctctcagcagccactttcgggctctagcgaggacaccctctcgcagaagtccttgccgagaccccccgccccagccattctctgaaggggctgaggacactcttatcgcgcccctcatggccaagcctcggctgctagttctctacttcgctctgattgtggttccggcctgggtgtccagcattgtcctcacagggacaagcgagcccccagatgcgcagacagtggcgcctgcggaggacgagactctgcaaaacgaggcggacaaccaggagaacgttttatctcagttgctgggggactatgacaaggtcaaggctatgtctgagggctcggactgtcagtgcaagtgtgtggtgagacccctgggccgggatgcctgccagaggatcaatgcgggggcctccaggaaggaagacttctataccgtggaaaccatcacctcaggctcgtcgtgcaagtgtgcctgtgtagcacccccatcggccctcaatccctgcgagggagacttcaggctccagaagctgcgggaggcagacagccaggacttgaagctctccacaatcatagacatgttggaaggagcgttctatggcctggatctcctgaagctacattcagtcaccaccaaactggtggggcgagtggataaactggaggaggaagtgtctaaaaacctcaccaaggaaaatgaacaaatcaaagaggacatggaagaaattcgaaccgagatgaataagcgaggcaaagaaaattgctctgaaaacatcctagatagcatgccagacatccgctcagccctgcagagggatgcagcagcagcctacgcccacccagagcagtatgaagagcggtttctgcaggaagaaaccgtgtcccagcagatcaactccatcgaacttctgcagacgcgacccctggctctgcctgaggtggtgaagtcacagcggcccctgcagaggcaggtccacctgagaggccggccggcctcccagcccactgtcatccggggcatcacctactataaagccaaggtctctgaagaagagaatgacattgaagagcagcaagatgagtttttcagcggtgacaatggagtggatttgctgattgaagatcagctcctgagacacaacggcctgatgaccagtgtcacccggaggcctgcagccacccgtcagggacacagcactgctgtgacaagcgacctgaacgctcggaccgcaccctggtcctcagcactgccacagccctcgacctcagatcccagcatcgccaaccatgcctcagtgggaccaacactccaaacaacctcggtgtctccagatcccacaagggagtcagtcctgcagccttctcctcaggtaccagccaccactgtggcccacacagccacccagcaaccagcagccccagctcctccggcagtgtctcccagggaggcattgatggaagctatgcacacagtcccagtgcctcccaccacagtcagaacagactcgctggggaaagatgctcctgctgggtggggaacaacccctgccagccccacgctgagccccgaagaagaagatgacatccggaatgtcataggaaggtgcaaggacactctctccacaatcacggggccgaccacccagaacacatatgggcggaatgaaggggcctggatgaaggaccccctggccaaggatgagcggatttacgtaaccaactattactacggcaacaccctggtagagttccggaacctggagaacttcaaacaaggtcgctggagcaattcctacaagctcccgtacagctggatcggcacaggccacgtggtatacaatggcgccttctactacaatcgcgccttcacccgcaacatcatcaagtacgacctgaagcagcgctacgtggctgcctgggccatgctgcatgacgtggcctacgaggaggccaccccctggcgatggcagggccactcagacgtggactttgctgtggacgagaatggcctatggctcatctacccggccctggacgatgagggcttcagccaggaggtcattgtcctgagcaagctcaatgccgcggacctgagcacacagaaggagaccacatggcgcacggggctccggaggaatttctacggcaactgcttcgtcatctgtggggtgctgtatgccgtggatagctacaaccagcggaatgccaacatctcctacgctttcgacacccacaccaacacacagatcgtccccaggctgctgttcgagaatgagtattcctatacgacccagatagactacaaccccaaggaccgcctgctctatgcctgggacaatggccaccaggtcacttaccatgtcatctttgcctactgacacccttgtccccacaagcagaagcacagaggggtcactagcaccttgtgtgtatgtgtgtgcgcgcacgtgtgtgtaggtgggtatgtgttgtttaaaaatatatattattttgtataatattgcaaatgtaaaatgacaatttgggtctatttttttatatggattgtagatcaatccatacgtgtatgtgctggtctcatcctccccagtttatat

SEQ ID NO: 161866 - DNA, 559 bp, Homo sapiens
  Payload ID: 11595
  Gene Symbol: OLFML2B
  Gene Name: olfactomedin-like 2B
  ENST ID: ENST00000525589
  CDS Start-End: 1-267
acatggcgcacggggctccggaggaatttctacggcaactgcttcgtcatctgtggggtgctgtatgccgtggatagctacaaccagcggaatgccaacatctcctacgctttcgacacccacaccaacacacagatcgtccccaggctgctgttcgagaatgagtattcctatacgacccagatagactacaaccccaaggaccgcctgctctatgcctgggacaatggccaccaggtcacttaccatgtcatctttgcctactgacacccttgtccccacaagcagaagcacagaggggtcactagcaccttgtgtgtatgtgtgtgcgcgcacgtgtgtgtagccttcagcccctccagctccaagtctcagatctcgaccattgaaaaggtttcttcatctgggtcttgcaggaggcaggcaacaccaggagcagaaatgaaagaggcaagaaagaagtgctatgtggcgagaaaaaaagttttaatgtattggagaagttttaaaaaacccagaaaaacgctttttttttttaataaagaagaaatttaaaatc

SEQ ID NO: 161867 - DNA, 496 bp, Homo sapiens
  Payload ID: 11595
  Gene Symbol: OLFML2B
  Gene Name: olfactomedin-like 2B
  ENST ID: ENST00000533556
  CDS Start-End: 1-273
gagaccacatggcgcacggggctccggaggaatttctacggcaactgcttcgtcatctgtggggtgctgtatgccgtggatagctacaaccagcggaatgccaacatctcctacgctttcgacacccacaccaacacacagatcgtccccaggctgctgttcgagaatgagtattcctatacgacccagatagactacaaccccaaggaccgcctgctctatgcctgggacaatggccaccaggtcacttaccatgtcatctttgcctactgacacccttgtccccacaagcagaagcacagaggggtcactagcaccttgtgtgtatgtgtgtgcgcgcacgtgtgtgtaggaggcaggcaacaccaggagcagaaatgaaagaggcaagaaagaagtgctatgtggcgagaaaaaaagttttaatgtattggagaagttttaaaaaacccagaaaaacgctttttttttttaataaagaagaaatttaaaatca

SEQ ID NO: 161868 - DNA, 1780 bp, Homo sapiens
  Payload ID: 11596
  Gene Symbol: OLFML3
  Gene Name: olfactomedin-like 3
  Uniprot ID: Q9NRN5
  ENST ID: ENST00000320334
  CDS Start-End: 75-1295
agctaaccctcgggcttgaggggaagaggctgactgtacgttccttctactctggcaccactctccaggctgccatggggcccagcacccctctcctcatcttgttccttttgtcatggtcgggacccctccaaggacagcagcaccaccttgtggagtacatggaacgccgactagctgctttagaggaacggctggcccagtgccaggaccagagtagtcggcatgctgctgagctgcgggacttcaagaacaagatgctgccactgctggaggtggcagagaaggagcgggaggcactcagaactgaggccgacaccatctccgggagagtggatcgtctggagcgggaggtagactatctggagacccagaacccagctctgccctgtgtagagtttgatgagaaggtgactggaggccctgggaccaaaggcaagggaagaaggaatgagaagtacgatatggtgacagactgtggctacacaatctctcaagtgagatcaatgaagattctgaagcgatttggtggcccagctggtctatggaccaaggatccactggggcaaacagagaagatctacgtgttagatgggacacagaatgacacagcctttgtcttcccaaggctgcgtgacttcacccttgccatggctgcccggaaagcttcccgagtccgggtgcccttcccctgggtaggcacagggcagctggtatatggtggctttctttattttgctcggaggcctcctggaagacctggtggaggtggtgagatggagaacactttgcagctaatcaaattccacctggcaaaccgaacagtggtggacagctcagtattcccagcagaggggctgatccccccctacggcttgacagcagacacctacatcgacctggcagctgatgaggaaggtctttgggctgtctatgccacccgggaggatgacaggcacttgtgtctggccaagttagatccacagacactggacacagagcagcagtgggacacaccatgtcccagagagaatgctgaggctgcctttgtcatctgtgggaccctctatgtcgtctataacacccgtcctgccagtcgggcccgcatccagtgctcctttgatgccagcggcaccctgacccctgaacgggcagcactcccttattttccccgcagatatggtgcccatgccagcctccgctataacccccgagaacgccagctctatgcctgggatgatggctaccagattgtctataagctggagatgaggaagaaagaggaggaggtttgaggagctagccttgttttttgcatctttctcactcccatacatttatattatatccccactaaatttcttgttcctcattcttcaaatgtgggccagttgtggctcaaatcctctatatttttagccaatggcaatcaaattctttcagctcctttgtttcatacggaactccagatcctgagtaatccttttagagcccgaagagtcaaaaccctcaatgttccctcctgctctcctgccccatgtcaacaaatttcaggctaaggatgccccagacccagggctctaaccttgtatgcgggcaggcccagggagcaggcagcagtgttcttcccctcagagtgacttggggagggagaaataggaggagacgtccagctctgtcctctcttcctcactcctcccttcagtgtcctgaggaacaggactttctccacattgttttgtattgcaacattttgcattaaaaggaaaatccactgctc

SEQ ID NO: 161869 - DNA, 1934 bp, Homo sapiens
  Payload ID: 11596
  Gene Symbol: OLFML3
  Gene Name: olfactomedin-like 3
  Uniprot ID: Q9NRN5
  ENST ID: ENST00000369551
  CDS Start-End: 289-1449
aaagctaaccctcgggcttgaggggaagaggctgactgtacgttccttctactctggcaccactctccaggctgccatggggcccagcacccctctcctcatcttgttccttttgtcatggtcgggacccctccaaggacagcagcaccaccttgtggagtacatggaacgccgactagctgctttagaggttgagatccgtagcattttagtgtccgagaggataattgctaagggagcagagacctcttcacaccttcatgcgcttagacctgcctagaggctcagatggctcagtggcactgctcacagagaacacaggctggaggacatggagtcggggaacggctggcccagtgccaggaccagagtagtcggcatgctgctgagctgcgggacttcaagaacaagatgctgccactgctggaggtggcagagaaggagcgggaggcactcagaactgaggccgacaccatctccgggagagtggatcgtctggagcgggaggtagactatctggagacccagaacccagctctgccctgtgtagagtttgatgagaaggtgactggaggccctgggaccaaaggcaagggaagaaggaatgagaagtacgatatggtgacagactgtggctacacaatctctcaagtgagatcaatgaagattctgaagcgatttggtggcccagctggtctatggaccaaggatccactggggcaaacagagaagatctacgtgttagatgggacacagaatgacacagcctttgtcttcccaaggctgcgtgacttcacccttgccatggctgcccggaaagcttcccgagtccgggtgcccttcccctgggtaggcacagggcagctggtatatggtggctttctttattttgctcggaggcctcctggaagacctggtggaggtggtgagatggagaacactttgcagctaatcaaattccacctggcaaaccgaacagtggtggacagctcagtattcccagcagaggggctgatccccccctacggcttgacagcagacacctacatcgacctggcagctgatgaggaaggtctttgggctgtctatgccacccgggaggatgacaggcacttgtgtctggccaagttagatccacagacactggacacagagcagcagtgggacacaccatgtcccagagagaatgctgaggctgcctttgtcatctgtgggaccctctatgtcgtctataacacccgtcctgccagtcgggcccgcatccagtgctcctttgatgccagcggcaccctgacccctgaacgggcagcactcccttattttccccgcagatatggtgcccatgccagcctccgctataacccccgagaacgccagctctatgcctgggatgatggctaccagattgtctataagctggagatgaggaagaaagaggaggaggtttgaggagctagccttgttttttgcatctttctcactcccatacatttatattatatccccactaaatttcttgttcctcattcttcaaatgtgggccagttgtggctcaaatcctctatatttttagccaatggcaatcaaattctttcagctcctttgtttcatacggaactccagatcctgagtaatccttttagagcccgaagagtcaaaaccctcaatgttccctcctgctctcctgccccatgtcaacaaatttcaggctaaggatgccccagacccagggctctaaccttgtatgcgggcaggcccagggagcaggcagcagtgttcttcccctcagagtgacttggggagggagaaataggaggagacgtccagctctgtcctctcttcctcactcctcccttcagtgtcctgaggaacaggactttctccacattgttttgtattgcaacattttgcattaaaaggaaaatccactgctc

SEQ ID NO: 161870 - DNA, 1961 bp, Homo sapiens
  Payload ID: 11596
  Gene Symbol: OLFML3
  Gene Name: olfactomedin-like 3
  ENST ID: ENST00000393300
  CDS Start-End: 439-1476
gagagagacccagagatcaggagagaaggcaccgcccccaccccgcctccaaagctaaccctcgggcttgaggggaagaggctgactgtacgttccttctactctggcaccactctccaggctgccatggggcccagcacccctctcctcatcttgttccttttgtcatggtcgggacccctccaaggacagcagcaccaccttgtggagtacatggaacgccgactagctgctttagaggagtggaaggggatattgaagcctggctgagtttgctctttttttcccattcctgactcccgagttgggcctctccctgcctgggagttgtaaccctgcagcctccctcctgatcccccatcccttcaggaacggctggcccagtgccaggaccagagtagtcggcatgctgctgagctgcgggacttcaagaacaagatgctgccactgctggaggtggcagagaaggagcgggaggcactcagaactgaggccgacaccatctccgggagagtggatcgtctggagcgggaggtagactatctggagacccagaacccagctctgccctgtgtagagtttgatgagaaggtgactggaggccctgggaccaaaggcaagggaagaaggaatgagaagtacgatatggtgacagactgtggctacacaatctctcaagtgagatcaatgaagattctgaagcgatttggtggcccagctggtctatggaccaaggatccactggggcaaacagagaagatctacgtgttagatgggacacagaatgacacagcctttgtcttcccaaggctgcgtgacttcacccttgccatggctgcccggaaagcttcccgagtccgggtgcccttcccctgggtaggcacagggcagctggtatatggtggctttctttattttgctcggaggcctcctggaagacctggtggaggtggtgagatggagaacactttgcagctaatcaaattccacctggcaaaccgaacagtggtggacagctcagtattcccagcagaggggctgatccccccctacggcttgacagcagacacctacatcgacctggcagctgatgaggaaggtctttgggctgtctatgccacccgggaggatgacaggcacttgtgtctggccaagttagatccacagacactggacacagagcagcagtgggacacaccatgtcccagagagaatgctgaggctgcctttgtcatctgtgggaccctctatgtcgtctataacacccgtcctgccagtcgggcccgcatccagtgctcctttgatgccagcggcaccctgacccctgaacgggcagcactcccttattttccccgcagatatggtgcccatgccagcctccgctataacccccgagaacgccagctctatgcctgggatgatggctaccagattgtctataagctggagatgaggaagaaagaggaggaggtttgaggagctagccttgttttttgcatctttctcactcccatacatttatattatatccccactaaatttcttgttcctcattcttcaaatgtgggccagttgtggctcaaatcctctatatttttagccaatggcaatcaaattctttcagctcctttgtttcatacggaactccagatcctgagtaatccttttagagcccgaagagtcaaaaccctcaatgttccctcctgctctcctgccccatgtcaacaaatttcaggctaaggatgccccagacccagggctctaaccttgtatgcgggcaggcccagggagcaggcagcagtgttcttcccctcagagtgacttggggagggagaaataggaggagacgtccagctctgtcctctcttcctcactcctcccttcagtgtcctgaggaacaggactttctccacattgttttgtattgcaacattttgcattaaaaggaaaatccactgctc

SEQ ID NO: 161871 - DNA, 492 bp, Homo sapiens
  Payload ID: 11597
  Gene Symbol: OMP
  Gene Name: olfactory marker protein
  Uniprot ID: P47874
  ENST ID: ENST00000529803
  CDS Start-End: 1-492
atggcggaggacaggccgcagcagccgcagctggacatgccgctggtcctggaccagggcctgaccaggcagatgcggctacgcgtggagagcctgaagcagcgcggggagaagcgccaggatggggagaagctgctgcagccagcggagtctgtgtaccgcctcaacttcacccagcagcagcggctacagttcgagcgctggaatgtcgtgctggacaagccgggcaaggtcaccatcacaggcacctcgcagaactggacgcctgacctcaccaacctcatgacacgccagctgctggaccccactgccatcttctggcgcaaggaggactcggatgccatagattggaatgaggccgacgccctggagtttggggagcgcctgtcggacctggccaagatccgcaaggtcatgtacttcctcgtcacctttggcgagggtgtggagcccgccaacctcaaggcctccgtggtttttaaccagctctga

SEQ ID NO: 161872 - DNA, 1030 bp, Homo sapiens
  Payload ID: 11598
  Gene Symbol:
  Gene Name: Olfactory receptor 10A6 [Source:UniProtKB/Swiss-Prot
  Acc:Q8NH74]
  Uniprot ID: Q8NH74
  ENST ID: ENST00000622207
  CDS Start-End: 1-945
atggaaagacaaaatcaaagctgtgtggttgaattcatcctcttgggcttttctaactatcctgagctccaggggcagctctttgtggctttcctggttatttatctggtgaccctgataggaaatgccattattatagtcatcgtctccctagaccagagcctccacgttcccatgtacctgtttctcctgaacttatctgtggtggacctgagtttcagtgcagttattatgcctgaaatgctggtggtcctctctactgaaaaaactacaatttcttttgggggctgttttgcacagatgtatttcatccttctttttggtggggctgaatgttttcttctgggagcaatggcttatgaccgatttgctgcaatttgccatcctctcaactaccaaatgattatgaataaaggagtttttatgaaattaattatattttcatgggccttaggttttatgttaggtactgttcaaacatcatgggtatctagttttcccttttgtggccttaatgaaattaaccatatatcttgtgaaaccccagcagtgttagaacttgcatgtgcagacacgtttttgtttgaaatctatgcattcacaggcacctttttgattattttggttcctttcttgttgatactcttgtcttacattcgagttctgtttgccatcctgaagatgccatcaaccactgggagacaaaaggccttttccacctgtgccgctcacctcacatctgtgaccctattctatggcacagccagtatgacttatttacaacccaaatctggctactcaccggaaaccaagaaagtgatgtcattgtcttactcacttctgacaccactgctgaatctgcttatctacagtttgcgaaatagtgagatgaagagggctttgatgaaattatggcgaaggcgagtggttttacacacaatctgactgtgttgagaagccatgtaagatttagtcactgcatgactgtattcaatctaaatttaataaatttagattcattaagtttgca

SEQ ID NO: 161873 - DNA, 1030 bp, Homo sapiens; identical to SEQ ID NO: 161872
  Payload ID: 11598
  Gene Symbol:
  Gene Name: Olfactory receptor 10A6 [Source:UniProtKB/Swiss-Prot
  Acc:Q8NH74]
  Uniprot ID: Q8NH74
  ENST ID: ENST00000623991
  CDS Start-End: 1-945

SEQ ID NO: 161874 - DNA, 945 bp, Homo sapiens
  Payload ID: 11598
  Gene Symbol:
  Gene Name: Olfactory receptor 10A6 [Source:UniProtKB/Swiss-Prot
  Acc:Q8NH74]
  Uniprot ID: Q8NH74
  ENST ID: ENST00000623813
  CDS Start-End: 1-945
atggaaagacaaaatcaaagctgtgtggttgaattcatcctcttgggcttttctaactatcctgagctccaggggcagctctttgtggctttcctggttatttatctggtgaccctgataggaaatgccattattatagtcatcgtctccctagaccagagcctccacgttcccatgtacctgtttctcctgaacttatctgtggtggacctgagtttcagtgcagttattatgcctgaaatgctggtggtcctctctactgaaaaaactacaatttcttttgggggctgttttgcacagatgtatttcatccttctttttggtggggctgaatgttttcttctgggagcaatggcttatgaccgatttgctgcaatttgccatcctctcaactaccaaatgattatgaataaaggagtttttatgaaattaattatattttcatgggccttaggttttatgttaggtactgttcaaacatcatgggtatctagttttcccttttgtggccttaatgaaattaaccatatatcttgtgaaaccccagcagtgttagaacttgcatgtgcagacacgtttttgtttgaaatctatgcattcacaggcacctttttgattattttggttcctttcttgttgatactcttgtcttacattcgagttctgtttgccatcctgaagatgccatcaaccactgggagacaaaaggccttttccacctgtgccgctcacctcacatctgtgaccctattctatggcacagccagtatgacttatttacaacccaaatctggctactcaccggaaaccaagaaagtgatgtcattgtcttactcacttctgacaccactgctgaatctgcttatctacagtttgcgaaatagtgagatgaagagggctttgatgaaattatggcgaaggcgagtggttttacacacaatctga

SEQ ID NO: 161875 - DNA, 945 bp, Homo sapiens; identical to SEQ ID NO: 161874
  Payload ID: 11598
  Gene Symbol:
  Gene Name: Olfactory receptor 10A6 [Source:UniProtKB/Swiss-Prot
  Acc:Q8NH74]
  Uniprot ID: Q8NH74
  ENST ID: ENST00000626590
  CDS Start-End: 1-945

SEQ ID NO: 161876 - DNA, 1030 bp, Homo sapiens; identical to SEQ ID NO: 161872
  Payload ID: 11598
  Gene Symbol:
  Gene Name: Olfactory receptor 10A6 [Source:UniProtKB/Swiss-Prot
  Acc:Q8NH74]
  Uniprot ID: Q8NH74
  ENST ID: ENST00000625231
  CDS Start-End: 1-945

SEQ ID NO: 161877 - DNA, 945 bp, Homo sapiens; identical to SEQ ID NO: 161874
  Payload ID: 11598
  Gene Symbol:
  Gene Name: Olfactory receptor 10A6 [Source:UniProtKB/Swiss-Prot
  Acc:Q8NH74]
  Uniprot ID: Q8NH74
  ENST ID: ENST00000629539
  CDS Start-End: 1-945

SEQ ID NO: 161878 - DNA, 981 bp, Homo sapiens
  Payload ID: 11599
  Gene Symbol:
  Gene Name: Olfactory receptor 10X1 [Source:UniProtKB/Swiss-Prot
  Acc:Q8NGY0]
  Uniprot ID: Q8NGY0
  ENST ID: ENST00000625122
  CDS Start-End: 1-981
atggtgttgaatgtttattgttgtttctttcaaatttcagacattcaaacgatgaagatcaaccagacaatcctgaaggaattcattcttgttggcttttctgtgtacccacatgtacagacatttctttttgtggtcttcttttgtctctaccttctcacccttgcaggtaatctgatcatcatgggtctaacttgggtggacaggtccctccacacccctatgtatctcttccttagtgcactctccttctctgagacctgctatacgctgaccatcgtccccaagatgctggaagatctactggccaaggacagaagcatttcagtcacaggttgtagcttacagatgtgcttcttcttgggacttggtggcacaaactgtatcattctcactttgatgggatatgaccgcttcctggccatctgtaaccctctaagatatccactgcttatgaccaacattgtatgtggacaacttgtggcctctgcttgcactgcaggcttctttatctctcttacagagactgcactgatattcagggactctttctgcagacccaaccttgtcaaacacttcttctgccatatgctggcagttattaggctgtcttgtatagacagtaaccacacagaattcattataacactgatctcagtgtctggtttgctgggtacccttctgctcatcatcctgactgatgtcttcattatttctactgtcctcaggatcccttcagctgagggcaagcagaaggccttcaccacctgtgcctcccacctcaccgtggttataatccactttggttttgcatctattgtttatttgaagccagaagcctcaggagatgacacactcatagcagtcccttatactgtcattacccccttcctcagccccatcatattcagcctgaggaataaggacatgaaaaatgcttttagaagaatgatgggaaacacagttgccttgaaaaaataa

SEQ ID NO: 161879 - DNA, 981 bp, Homo sapiens; identical to SEQ ID NO: 161878
  Payload ID: 11599
  Gene Symbol:
  Gene Name: Olfactory receptor 10X1 [Source:UniProtKB/Swiss-Prot
  Acc:Q8NGY0]
  Uniprot ID: Q8NGY0
  ENST ID: ENST00000623167
  CDS Start-End: 1-981

SEQ ID NO: 161880 - DNA, 1072 bp, Homo sapiens
  Payload ID: 11600
  Gene Symbol:
  Gene Name: Olfactory receptor 2T11 [Source:UniProtKB/Swiss-Prot
  Acc:Q8NH01]
  Uniprot ID: Q8NH01
  ENST ID: ENST00000625160
  CDS Start-End: 63-1013
tcttgcctccttcctggtccttgtgtcttcccgttgccctgggacgctcgtgggccatatcaatgacgaacacatcatcctctgacttcaccctcctggggcttctggtgaacagtgaggctgccgggattgtatttacagtgatccttgctgttttcttgggggccgtgactgcaaatttggtcatgatattcttgattcaggtggactctcgcctccacacccccatgtactttctgctcagtcagctgtccatcatggacacccttttcatctgtaccactgtcccaaaactcctggcagacatggtttctaaagagaagatcatttcctttgtggcctgtggcatccagatcttcctctacctgaccatgattggttctgagttcttcctcctgggcctcatggcctatgactgctacgtggctgtctgtaaccctctgagatacccagtcctgatgaaccgcaagaagtgtcttttgctggctgctggtgcctggtttgggggctccctcgatggctttctgctcactcccatcaccatgaatgtcccttactgtggctcccgaagtatcaaccattttttctgtgagatcccagcagttctgaaactggcctgtgcagacacgtccttgtatgaaactctgatgtacatctgctgtgtcctcatgttgctcatccccatctctatcatctccacttcctactccctcatcttgttaaccatccaccgcatgccctctgctgaaggtcgcaaaaaggccttcaccacttgttcctcccacttgactgtagttagcatcttctatggggctgccttctacacatacgtgctgccccagtccttccacacccccgagcaggacaaagtagtgtcagccttctataccattgtcacgcccatgcttaatcctctcatctacagcctcagaaacaaggacgtcataggggcatttaaaaaggtatttgcatgttgctcatctgctcagaaagtagcaacaagtgatgcttagagagtcactgcccagaggataaggcttcctaaggacttcctccatttgccctgtttccc

SEQ ID NO: 161881 - DNA, 951 bp, Homo sapiens
  Payload ID: 11600
  Gene Symbol:
  Gene Name: Olfactory receptor 2T11 [Source:UniProtKB/Swiss-Prot
  Acc:Q8NH01]
  Uniprot ID: Q8NH01
  ENST ID: ENST00000625105
  CDS Start-End: 1-951
atgacgaacacatcatcctctgacttcaccctcctggggcttctggtgaacagtgaggctgccgggattgtatttacagtgatccttgctgttttcttgggggccgtgactgcaaatttggtcatgatattcttgattcaggtggactctcgcctccacacccccatgtactttctgctcagtcagctgtccatcatggacacccttttcatctgtaccactgtcccaaaactcctggcagacatggtttctaaagagaagatcatttcctttgtggcctgtggcatccagatcttcctctacctgaccatgattggttctgagttcttcctcctgggcctcatggcctatgactgctacgtggctgtctgtaaccctctgagatacccagtcctgatgaaccgcaagaagtgtcttttgctggctgctggtgcctggtttgggggctccctcgatggctttctgctcactcccatcaccatgaatgtcccttactgtggctcccgaagtatcaaccattttttctgtgagatcccagcagttctgaaactggcctgtgcagacacgtccttgtatgaaactctgatgtacatctgctgtgtcctcatgttgctcatccccatctctatcatctccacttcctactccctcatcttgttaaccatccaccgcatgccctctgctgaaggtcgcaaaaaggccttcaccacttgttcctcccacttgactgtagttagcatcttctatggggctgccttctacacatacgtgctgccccagtccttccacacccccgagcaggacaaagtagtgtcagccttctataccattgtcacgcccatgcttaatcctctcatctacagcctcagaaacaaggacgtcataggggcatttaaaaaggtatttgcatgttgctcatctgctcagaaagtagcaacaagtgatgcttag

SEQ ID NO: 161882 - DNA, 933 bp, Homo sapiens
  Payload ID: 11601
  Gene Symbol:
  Gene Name: Olfactory receptor 4C16 [Source:UniProtKB/Swiss-Prot
  Acc:Q8NGL9]
  Uniprot ID: Q8NGL9
  ENST ID: ENST00000623907
  CDS Start-End: 1-933
atgcaactgaataataatgtgactgagttcattctgcttggattgacacaggatcctttttggaagaaaatagtgtttgttatttttttgcgtctctacttgggaacactgttgggtaatttgctaatcattattagtgtcaagaccagccaggcacttaagaacccaatgttcttcttccttttctacttatccttatctgatacttgcctctctacttccataacccctagaatgattgtggatgcccttttgaagaagacaactatctccttcagcgagtgcatgatccaagtcttttcatcccatgtctttggctgcctggagatcttcatcctcatcctcacggctgttgaccgctatgtggacatctgtaagcccctgcactacatgaccatcataagccagtgggtctgtggtgttttgatggctgtggcctgggtgggatcctgtgtgcattctttagttcagatttttcttgccctgagtttgccattctgtggccccaatgtgatcaatcactgtttctgtgacttgcagcccttgttgaaacaagcctgttcagaaacctatgtggttaacctactcctggtttccaatagtggggccatttgtgcagtgagttatgtcatgctaatattctcctatgtcatcttcttgcattctctgagaaaccacagtgctgaagtgataaagaaagcactttccacatgtgtctcccacatcattgtggtcatcttgttctttggaccttgcatatttatgtacacatgccttgcaaccgtattccccatggataagatgatagctgtattttatacagttggaacatcttttctcaaccctgtgatttacacgctgaagaatacagaagtgaaaagtgccatgaggaagctttggagcaagaaattgatcacagatgacaaaagataa

SEQ ID NO: 161883 - DNA, 933 bp, Homo sapiens; identical to SEQ ID NO: 161882
  Payload ID: 11601
  Gene Symbol:
  Gene Name: Olfactory receptor 4C16 [Source:UniProtKB/Swiss-Prot
  Acc:Q8NGL9]
  Uniprot ID: Q8NGL9
  ENST ID: ENST00000624571
  CDS Start-End: 1-933

SEQ ID NO: 161884 - DNA, 1084 bp, Homo sapiens
  Payload ID: 11602
  Gene Symbol:
  Gene Name: Olfactory receptor 4M2 [Source:UniProtKB/Swiss-Prot
  Acc:Q8NGB6]
  Uniprot ID: Q8NGB6
  ENST ID: ENST00000332663
  CDS Start-End: 99-1040
ttttgaaagcagtgatataactctaggtaaatgctatgtctactaattatagtttcttaattttcatagctatattatgaaaagagtaaattgaagaaatggaaactgcaaattacaccaaggtgacagaatttgttctcactggcctatcccagactccagaggtccaactagtcctatttgttatatttctatccttctatttgttcatcctaccaggaaatatccttatcatttgcaccatcagtctagaccctcatctgacctctcctatgtatttcctgttggctaatctggccttccttgatatttggtactcttccattacagcccctgaaatgctcatagacttctttgtggagaggaagataatttcttttgatgaatgcattgcacagctcttcttcttacactttgctggggcttcagagatgttcttgctcacagtgatggcctttgacctctacactgctatctgccgacccctccactatgctaccatcatgaatcaacgtctctgctgtatcctggtggctctctcctggagggggggcttcattcattctatcatacaggtggctctcattgttcgacttcctttctgtgggcccaatgagttagacagttacttctgtgacatcacacaggttgtccggattgcctgtgccaacaccttcccagaggagttagtgatgatctgtagtagtggtctgatctctgtggtgtgtttgattgctctgttaatgtcctatgccttccttctggccttgctcaagaaactttcaggctcaggtgagaataccaacagggccgtgtccacctgctattcccacattaccattgtggtgctaatgtttgggccatccatctacatttatgctcgcccatttgactcgttttccctagataaagtggtgtctgtgttcaatactttaatattccctttacataatcccattatttacacattgagaaacaaggaagtaaaggcagccatgaggaagttggtcaccaaatatattttgtgtaaagagaagtgaaagataaattatacattttatagttcccctgaggatcattgtcc

SEQ ID NO: 161885 - DNA, 1015 bp, Homo sapiens
  Payload ID: 11603
  Gene Symbol:
  Gene Name: Olfactory receptor 4X2 [Source:UniProtKB/Swiss-Prot
  Acc:Q8NGF9]
  Uniprot ID: Q8NGF9
  ENST ID: ENST00000302329
  CDS Start-End: 49-960
cccaaattgctgcctcttgatgatgacctcttggctaacatacacaacatgactgaattcatttttctggtactttctcccaaccaggaggtgcagagggtttgctttgtgatatttctgttcttgtacacagcaattgtgctggggaatttcctcattgtgctcactgtcatgaccagcagaagccttggttcccccatgtacttcttcctcagctacctctccttcatggagatctgctactcctccgctacagcccccaaactcatctcagatctgctggctgaaaggaaagtcatatcttggtggggctgcatggcacagcttttcttcttgcacttctttggtggcactgagattttcctgctcactgtgatggcctatgaccactatgtggccatctgcaagcccctcagctacaccaccatcatgaactggcaggtgtgtactgtccttgtaggaatagcatgggtgggaggcttcatgcattcctttgcacaaatccttctcatcttccacctgctcttctgtggccccaatgtgatcaatcactatttctgtgacctagttccccttctcaaacttgcctgctctgacaccttcctcattggtctgctgattgttgccaatggaggcaccctgtctgtgatcagttttggggtcctcttagcatcctatatggtcatcttgctccatctgagaacctggagctctgaagggtggtgcaaagccctctccacctgtgggtcccatttcgctgtggttatcttgttctttgggccctgcgtcttcaactctctgaggccttctaccactctgcccatagacaagatggtggctgtgttctacacagtgataaccgcgatcctgaaccctgtcatctactctctgagaaatgctgaaatgaggaaggccatgaagaggctgtggattaggacattgagactaaatgagaaatagaggctgagtctttgtattgatacttgggtttagaatgactgttgagtccaaactg

SEQ ID NO: 161886 - DNA, 1025 bp, Homo sapiens
  Payload ID: 11603
  Gene Symbol:
  Gene Name: Olfactory receptor 4X2 [Source:UniProtKB/Swiss-Prot
  Acc:Q8NGF9]
  Uniprot ID: Q8NGF9
  ENST ID: ENST00000624868
  CDS Start-End: 49-960
cccaaattgctgcctcttgatgatgacctcttggctaacatacacaacatgactgaattcatttttctggtactttctcccaaccaggaggtgcagagggtttgctttgtgatatttctgttcttgtacacagcaattgtgctggggaatttcctcattgtgctcactgtcatgaccagcagaagccttggttcccccatgtacttcttcctcagctacctctccttcatggagatctgctactcctccgctacagcccccaaactcatctcagatctgctggctgaaaggaaagtcatatcttggtggggctgcatggcacagcttttcttcttgcacttctttggtggcactgagattttcctgctcactgtgatggcctatgaccactatgtggccatctgcaagcccctcagctacaccaccatcatgaactggcaggtgtgtactgtccttgtaggaatagcatgggtgggaggcttcatgcattcctttgcacaaatccttctcatcttccacctgctcttctgtggccccaatgtgatcaatcactatttctgtgacctagttccccttctcaaacttgcctgctctgacaccttcctcattggtctgctgattgttgccaatggaggcaccctgtctgtgatcagttttggggtcctcttagcatcctatatggtcatcttgctccatctgagaacctggagctctgaagggtggtgcaaagccctctccacctgtgggtcccatttcgctgtggttatcttgttctttgggccctgcgtcttcaactctctgaggccttctaccactctgcccatagacaagatggtggctgtgttctacacagtgataaccgcgatcctgaaccctgtcatctactctctgagaaatgctgaaatgaggaaggccatgaagaggctgtggattaggacattgagactaaatgagaaatagaggctgagtctttgtattgatacttgggtttagaatgactgttgagtccaaactgaaggagcaga

SEQ ID NO: 161887 - DNA, 960 bp, Homo sapiens
  Payload ID: 11604
  Gene Symbol:
  Gene Name: Olfactory receptor 51F1 [Source:UniProtKB/Swiss-Prot
  Acc:A6NGY5]
  Uniprot ID: A6NGY5
  ENST ID: ENST00000380383
  CDS Start-End: 1-960
atgctgcaaaaccaggacaccatggaaatcctaagcaactcaacatctaaatttccaaccttcttgttgaccggcattcctggcctagagtctgcccatgtctggatctccattcctttctgttgtttttatgccattgccctctctgggaacagcgtgatcctgtttgtcatcattacccagcagagtctccatgaacccatgtattatttcctcttcaggctatcagccactgatctgggcttgactgtttcttcattgtcaacaacattaggtatcctctggtttgaggcacgtgaaatcagtctatatagctgcattgtccagatgttttttcttcatggattcacttttatggaatctggagtgctggtggctacagcctttgaccgttatgtggccatctgtgaccctctgaggtacactaccattctcactaattccagaatcattcaaatgggtcttctgatgattacacgtgctatagtactaatattgccactacttttgctccttaagcctctctatttctgtagaatgaatgccctttctcactcctattgttaccatccagatgtgattcaattagcatgttcagacattcgggcaaatagcatctgtggattaattgatctcatcctgaccactggaatagatacaccatgcattgtcctgtcatatatcttaattattcactctgtcctcagaattgcctcccctgaagaatggcacaaggtcttcagcacctgtgtctcccatgtgggagcagttgctttcttctacatccacatgctgagcctgtccttggtgtatcgctatggtcggtcagcccccagagtagtccattcagtgatggctaatgtatacctgcttttaccccctgtgctcaaccccatcatcgacagtgtaaaaacaaaacaaatccgcaaggctatgctcagtctgctgcttacaaaatga

SEQ ID NO: 161888 - DNA, 939 bp, Homo sapiens
  Payload ID: 11604
  Gene Symbol:
  Gene Name: Olfactory receptor 51F1 [Source:UniProtKB/Swiss-Prot
  Acc:A6NGY5]
  ENST ID: ENST00000624103
  CDS Start-End: 1-939
atggaaatcctaagcaactcaacatctaaatttccaaccttcttgttgaccggcattcctggcctagagtctgcccatgtctggatctccattcctttctgttgtttttatgccattgccctctctgggaacagcgtgatcctgtttgtcatcattacccagcagagtctccatgaacccatgtattatttcctcttcaggctatcagccactgatctgggcttgactgtttcttcattgtcaacaacattaggtatcctctggtttgaggcacgtgaaatcagtctatatagctgcattgtccagatgttttttcttcatggattcacttttatggaatctggagtgctggtggctacagcctttgaccgttatgtggccatctgtgaccctctgaggtacactaccattctcactaattccagaatcattcaaatgggtcttctgatgattacacgtgctatagtactaatattgccactacttttgctccttaagcctctctatttctgtagaatgaatgccctttctcactcctattgttaccatccagatgtgattcaattagcatgttcagacattcgggcaaatagcatctgtggattaattgatctcatcctgaccactggaatagatacaccatgcattgtcctgtcatatatcttaattattcactctgtcctcagaattgcctcccctgaagaatggcacaaggtcttcagcacctgtgtctcccatgtgggagcagttgctttcttctacatccacatgctgagcctgtccttggtgtatcgctatggtcggtcagcccccagagtagtccattcagtgatggctaatgtatacctgcttttaccccctgtgctcaaccccatcatcgacagtgtaaaaacaaaacaaatccgcaaggctatgctcagtctgctgcttacaaaatga

SEQ ID NO: 161889 - DNA, 948 bp, Homo sapiens
  Payload ID: 11605
  Gene Symbol:
  Gene Name: Olfactory receptor 52R1 [Source:UniProtKB/Swiss-Prot
  Acc:Q8NGF1]
  Uniprot ID: Q8NGF1
  ENST ID: ENST00000624978
  CDS Start-End: 1-948
atggtgctggcttcagggaacagctcttctcatcctgtgtccttcatcctgcttggaatcccaggcctggagagtttccagttgtggattgcctttccgttctgtgccacgtatgctgtggctgttgttggaaatatcactctcctccatgtaatcagaattgaccacaccctgcatgagcccatgtacctctttctggccatgctggccatcactgacctggtcctctcctcctccactcaacctaagatgttggccatattctggtttcatgctcatgagattcagtaccatgcctgcctcatccaggtgttcttcatccatgccttttcttctgtggagtctggggtgctcatggctatggccctggactgctacgtggctatctgcttcccactccgacactctagcatcctgaccccatcggtcgtgatcaaactggggaccatcgtgatgctgagagggctgctgtgggtgagccccttctgcttcatggtgtctaggatgcccttctgccaacaccaagccattccccagtcatactgtgagcacatggctgtgctgaagttggtgtgtgctgatacaagcataagtcgtgggaatgggctctttgtggccttctctgtggctggctttgatatgattgtcattggtatgtcatacgtgatgattttgagagctgtgcttcagttgccctcaggtgaagcccgcctcaaagcttttagcacacgttcctcccatatctgtgtcatcttggctctttatatcccagcccttttttctttcctcacctaccgctttggccatgatgtgccccgagttgtacacatcctgtttgctaatctctatctactgatacctcccatgctcaaccccatcatttatggagttagaaccaaacagatcggggacagggttatccaaggatgttgtggaaacatcccctga

SEQ ID NO: 161890 - DNA, 948 bp, Homo sapiens; identical to SEQ ID NO: 161889
  Payload ID: 11605
  Gene Symbol:
  Gene Name: Olfactory receptor 52R1 [Source:UniProtKB/Swiss-Prot
  Acc:Q8NGF1]
  Uniprot ID: Q8NGF1
  ENST ID: ENST00000624198
  CDS Start-End: 1-948

SEQ ID NO: 161891 - DNA, 1026 bp, Homo sapiens
  Payload ID: 11606
  Gene Symbol:
  Gene Name: Olfactory receptor 5AR1 [Source:UniProtKB/Swiss-Prot
  Acc:Q8NGP9]
  Uniprot ID: Q8NGP9
  ENST ID: ENST00000302969
  CDS Start-End: 25-957
ccaggcacacatacacttgaagcaatggataaagaaaacagctcaatggtgactgagtttatcttcatgggcatcacccaggaccctcagatggagatcatcttcttcgtggtcttcctcatagtttacctggttaatgtagtggggaatattggtatgattatcctgattacaacagacactcagcttcacacacccatgtattttttcctctgcaacctctcctttgttgacctgggctactcctcagccattgcccccaggatgctggctgacttcctaacaaatcacaaagttatctccttctccagctgtgccacccagtttgctttttttgtaggttttgtggatgctgagtgctatgtcctggcagccatggcctatggtcgttttgtggccatttgtcgacccctccactatagcaccttcatgtccaagcaggtctgcttggctctcatgctgggctcttacctggctggtctagtgagtttagtagcccacactaccctcaccttcagcctgagttactgtggttccaatatcatcaatcatttcttctgcgaaatcccaccactcttggccctctcttgctcagacacctacatcagtgagatcttgctcttcagtctgtgtggcttcattgaattcagcaccatcctcatcatcttcatctcctatacctttatccttgttgcaatcatcagaatgcgttcagctgaaggccgccttaaggctttctccacctgcgggtctcaccttactggcatcaccctcttctatggcacagtcatgtttatgtacctgaggccaacatccagctactccctggaccaagacaagtgggcctctgtgttctacacggttatcatccccatgttaaatcccttgatctacagtttgcggaacaaggatgtgaaagctgctttcaaaaagctaattggaaaaaaatctcaataataacacaaaatgaaaatctgtttctgtcataggtaaatgacagtagtagaagggcatagaaaatgcaaa

SEQ ID NO: 161892 - DNA, 1026 bp, Homo sapiens; identical to SEQ ID NO: 161891
  Payload ID: 11606
  Gene Symbol:
  Gene Name: Olfactory receptor 5AR1 [Source:UniProtKB/Swiss-Prot
  Acc:Q8NGP9]
  Uniprot ID: Q8NGP9
  ENST ID: ENST00000624596
  CDS Start-End: 25-957

SEQ ID NO: 161893 - DNA, 936 bp, Homo sapiens
  Payload ID: 11607
  Gene Symbol:
  Gene Name: Olfactory receptor 5L1 [Source:UniProtKB/Swiss-Prot
  Acc:Q8NGL2]
  Uniprot ID: Q8NGL2
  ENST ID: ENST00000625203
  CDS Start-End: 1-936
atgggcaaggaaaactgcaccactgtggctgagttcattctccttggactatcagatgtccctgagttgagagtctgcctcttcctgctgttccttctcatctatggagtcacgttgttagccaacctgggcatgattgcactgattcaggtcagctctcggctccacacccccatgtactttttcctcagccacttgtcctctgtagatttctgctactcctcaataattgtgccaaaaatgttggctaatatctttaacaaggacaaagccatctccttcctagggtgcatggtgcaattctacttgttttgcacttgtgtggtcactgaggtcttcctgctggccgtgatggcctatgaccgctttgtggccatctgtaaccctttgctatacacagtcaccatgtcttggaaggtgcgtgtggagctggcttcttgctgctacttctgtgggacggtgtgttctctgattcatttgtgcttagctcttaggatccccttctatagatctaatgtgattaaccactttttctgtgatctacctcctgtcttaagtcttgcttgctctgatatcactgtgaatgagacactgctgttcctggtggccactttgaatgagagtgttaccatcatgatcatcctcacctcctacctgctaattctcaccaccatcctgaagatgggctctgcagagggcaggcacaaagccttctccacctgtgcttcccacctcacagctatcactgtcttccatggaacagtcctttccatttattgcaggcccagttcaggcaatagtggagatgctgacaaagtggccaccgtgttctacacagtcgtgattcctatgctgaactctgtgatctacagcctgagaaataaagatgtgaaagaagctctcagaaaagtgatgggctccaaaattcactcctag

SEQ ID NO: 161894 - DNA, 1110 bp, Homo sapiens
  Payload ID: 11607
  Gene Symbol:
  Gene Name: Olfactory receptor 5L1 [Source:UniProtKB/Swiss-Prot
  Acc:Q8NGL2]
  Uniprot ID: Q8NGL2
  ENST ID: ENST00000623450
  CDS Start-End: 101-1036
ggtgtctttttacaggatacagccaaaactaaaatttagactatataatggagaataatttttaagtttcttttcctccaatctcatataaattggagacatgggcaaggaaaactgcaccactgtggctgagttcattctccttggactatcagatgtccctgagttgagagtctgcctcttcctgctgttccttctcatctatggagtcacgttgttagccaacctgggcatgattgcactgattcaggtcagctctcggctccacacccccatgtactttttcctcagccacttgtcctctgtagatttctgctactcctcaataattgtgccaaaaatgttggctaatatctttaacaaggacaaagccatctccttcctagggtgcatggtgcaattctacttgttttgcacttgtgtggtcactgaggtcttcctgctggccgtgatggcctatgaccgctttgtggccatctgtaaccctttgctatacacagtcaccatgtcttggaaggtgcgtgtggagctggcttcttgctgctacttctgtgggacggtgtgttctctgattcatttgtgcttagctcttaggatccccttctatagatctaatgtgattaaccactttttctgtgatctacctcctgtcttaagtcttgcttgctctgatatcactgtgaatgagacactgctgttcctggtggccactttgaatgagagtgttaccatcatgatcatcctcacctcctacctgctaattctcaccaccatcctgaagatgggctctgcagagggcaggcacaaagccttctccacctgtgcttcccacctcacagctatcactgtcttccatggaacagtcctttccatttattgcaggcccagttcaggcaatagtggagatgctgacaaagtggccaccgtgttctacacagtcgtgattcctatgctgaactctgtgatctacagcctgagaaataaagatgtgaaagaagctctcagaaaagtgatgggctccaaaattcactcctagggaagattttattagcacaattcaggattcccaagtagtggcaggcgggggttcacgggagaggcacagtgttg

SEQ ID NO: 161895 - DNA, 975 bp, Homo sapiens
  Payload ID: 11608
  Gene Symbol:
  Gene Name: Olfactory receptor 5R1 [Source:UniProtKB/Swiss-Prot
  Acc:Q8NH85]
  Uniprot ID: Q8NH85
  ENST ID: ENST00000623216
  CDS Start-End: 1-975
atggctgaagttaatatcatttatgtcactgtattcattctgaaaggaattaccaaccggccagagcttcaggccccgtgctttggggtgtttttagttatctatctggtcacagtgctgggcaatcttgggttgattactttaatcaagattgatactcgactccacacacctatgtactatttcctcagccacctggcctttgttgacctttgttactcctctgctattacaccgaagatgatggtgaattttgttgtggaacgcaacaccattcctttccatgcttgtgcaacccaactgggttgttttctcaccttcatgatcactgagtgtttccttctagcctccatggcctacgattgctatgtcgccatctgtagtcccctgcattattcaacactgatgtcaagaagagtctgcattcaactggtggcagttccatatatatacagcttcctggttgccctcttccacaccgttatcactttccgtctgacttactgtggcccaaacttaattaaccatttctattgtgatgacctccccttcttagctctgtcctgctcagacacacacatgaaggaaattctgatatttgcctttgctggctttgatatgatctcttcctcttccattgtcctcacctcctacatctttattattgccgctatcctaaggatccgctctactcaggggcaacacaaagccatttccacctgtggctcccatatggtgactgtcactattttctatggcacactgatctttatgtacctacagcccaaatcaaatcactccttggacacagacaagatggcttctgtattttacacagtggtgatccccatgttaaaccccctaatctatagtctaaggaacaaagaagtgaaagatgcctcaaagaaagccttggataaaggttgtgaaaacttacagatattaacatttttaaaaataagaaaactttattaa

SEQ ID NO: 161896 - DNA, 975 bp, Homo sapiens; identical to SEQ ID NO: 161895
  Payload ID: 11608
  Gene Symbol:
  Gene Name: Olfactory receptor 5R1 [Source:UniProtKB/Swiss-Prot
  Acc:Q8NH85]
  Uniprot ID: Q8NH85
  ENST ID: ENST00000623286
  CDS Start-End: 1-975

SEQ ID NO: 161897 - DNA, 1002 bp, Homo sapiens
  Payload ID: 11609
  Gene Symbol:
  Gene Name: Olfactory receptor 6Q1 [Source:UniProtKB/Swiss-Prot
  Acc:Q8NGQ2]
  Uniprot ID: Q8NGQ2
  ENST ID: ENST00000302622
  CDS Start-End: 24-977
ttgctgagctctcactgccacatatgcaaccatataccaaaaactggacccaggtaactgaatttgtcatgatgggctttgctggcatccatgaagcacacctcctcttcttcatactcttcctcaccatgtacctgttcaccttggtggagaatttggccatcattttagtggtgggtttggaccaccgactacggagacccatgtatttcttcctgacacacttgtcctgccttgaaatctggtacacttctgttacagtgcccaagatgctggctggttttattggggtggatggtggcaagaatatctcttatgctgattgcctatcccagctcttcatcttcacctttcttggggcaactgagtgtttcctactggctgccatggcctatgatcgttatgtggccatttgtatgcctctccactatggggcttttgtgtcctggggcacctgcatccgtctggcagctgcctgttggctggtaggtttcctcacacccatcttgccaatctacctcttgtctcagctaacattttatggcccaaatgtcattgaccatttctcctgtgatgcctcacccttgctagccttgtcgtgctcagatgtcacttggaaggagactgtggatttcctggtgtctctggctgtgctactggcctcctctatggtcattgctgtgtcctatggcaacatcgtctggacactgctgcacatccgctcagctgctgagcgctggaaggccttctctacctgtgcagctcacctgactgtggtgagcctcttctatggcactcttttctttatgtatgtccagaccaaggtgacctcctccatcaacttcaacaaggtggtatctgtcttctactctgttgtcacgcccatgctcaatcctctcatctacagtcttaggaacaaggaagtgaagggagctctgggtcgagtcttttctctcaacttttggaagggacagtgaggaggcaggtgggaacccagtttcc

SEQ ID NO: 161898 - DNA, 1002 bp, Homo sapiens; identical to SEQ ID NO: 161897
  Payload ID: 11609
  Gene Symbol:
  Gene Name: Olfactory receptor 6Q1 [Source:UniProtKB/Swiss-Prot
  Acc:Q8NGQ2]
  Uniprot ID: Q8NGQ2
  ENST ID: ENST00000623396
  CDS Start-End: 24-977

SEQ ID NO: 161899 - DNA, 983 bp, Homo sapiens
  Payload ID: 11610
  Gene Symbol:
  Gene Name: Olfactory receptor 8B4 [Source:UniProtKB/Swiss-Prot
  Acc:Q96RC9]
  Uniprot ID: Q96RC9
  ENST ID: ENST00000356130
  CDS Start-End: 23-952
ccagacagctcgccaagagagaatgactctgagaaacagctcctcagtgactgagtttatccttgtgggattatcagaacagccagagctccagctccctcttttccttctattcttagggatctatgtgttcactgtggtgggcaacttgggcttgatcaccttaattgggataaatcctagccttcacacccccatgtactttttcctcttcaacttgtcctttatagatctctgttattcctgtgtgtttacccccaaaatgctgaatgactttgtttcagaaagtatcatctcttatgtgggatgtatgactcagctatttttcttctgtttctttgtcaattctgagtgctatgtgttggtatcaatggcctatgatcgctatgtggccatctgcaaccccctgctctacatggtcaccatgtccccaagggtctgctttctgctgatgtttggttcctatgtggtagggtttgctggggccatggcccacactggaagcatgctgcgactgaccttctgtgattccaacgtcattgaccattatctgtgtgacgttctccccctcttgcagctctcctgcaccagcacccatgtcagtgagctggtatttttcattgttgttggagtaatcaccatgctatccagcataagcatcgtcatctcttacgctttgatactctccaacatcctctgtattccttctgcagagggcagatccaaagcctttagcacatggggctcccacataattgctgttgctctgttttttgggtcagggacattcacctacttaacaacatcttttcctggctctatgaaccatggcagatttgcctcagtcttttacaccaatgtggttcccatgcttaacccttcgatctacagtttgaggaataaggatgataaacttgccctgggcaaaaccctgaagagagtgctcttctaatgggtctcttcatatcactggcaaccgattc

SEQ ID NO: 161900 - DNA, 990 bp, Homo sapiens
  Payload ID: 11610
  Gene Symbol:
  Gene Name: Olfactory receptor 8B4 [Source:UniProtKB/Swiss-Prot
  Acc:Q96RC9]
  Uniprot ID: Q96RC9
  ENST ID: ENST00000624217
  CDS Start-End: 23-952
ccagacagctcgccaagagagaatgactctgagaaacagctcctcagtgactgagtttatccttgtgggattatcagaacagccagagctccagctccctcttttccttctattcttagggatctatgtgttcactgtggtgggcaacttgggcttgatcaccttaattgggataaatcctagccttcacacccccatgtactttttcctcttcaacttgtcctttatagatctctgttattcctgtgtgtttacccccaaaatgctgaatgactttgtttcagaaagtatcatctcttatgtgggatgtatgactcagctatttttcttctgtttctttgtcaattctgagtgctatgtgttggtatcaatggcctatgatcgctatgtggccatctgcaaccccctgctctacatggtcaccatgtccccaagggtctgctttctgctgatgtttggttcctatgtggtagggtttgctggggccatggcccacactggaagcatgctgcgactgaccttctgtgattccaacgtcattgaccattatctgtgtgacgttctccccctcttgcagctctcctgcaccagcacccatgtcagtgagctggtatttttcattgttgttggagtaatcaccatgctatccagcataagcatcgtcatctcttacgctttgatactctccaacatcctctgtattccttctgcagagggcagatccaaagcctttagcacatggggctcccacataattgctgttgctctgttttttgggtcagggacattcacctacttaacaacatcttttcctggctctatgaaccatggcagatttgcctcagtcttttacaccaatgtggttcccatgcttaacccttcgatctacagtttgaggaataaggatgataaacttgccctgggcaaaaccctgaagagagtgctcttctaatgggtctcttcatatcactggcaaccgattctcggtaa

SEQ ID NO: 161901 - DNA, 930 bp, Homo sapiens
  Payload ID: 11611
  Gene Symbol: OR1A1
  Gene Name: olfactory receptor, family 1, subfamily A, member 1
  Uniprot ID: Q9P1Q5
  ENST ID: ENST00000304094
  CDS Start-End: 1-930
atgagggaaaataaccagtcctctacactggaattcatcctcctgggagttactggtcagcaggaacaggaagatttcttctacatcctcttcttgttcatttaccccatcacattgattggaaacctgctcatcgtcctagccatttgctctgatgttcgccttcacaaccccatgtattttctccttgccaacctctccttggttgacatcttcttctcatcggtaaccatccctaagatgctggccaaccatctcttgggcagcaaatccatctcttttgggggatgcctaacgcagatgtatttcatgatagccttgggtaacacagacagctatattttggctgcaatggcatatgatcgagctgtggccatcagccgcccacttcactacacaacaattatgagtccacggtcttgtatctggcttattgctgggtcttgggtgattggaaatgccaatgccctcccccacactctgctcacagctagtctgtccttctgtggcaaccaggaagtggccaacttctactgtgacattacccccttgctgaagttatcctgttctgacatccactttcatgtgaagatgatgtacctaggggttggcattttctctgtgccattactatgcatcattgtctcctatattcgagtcttctccacagtcttccaggttccttccaccaagggcgtgctcaaggccttctccacctgtggttcccacctcacggttgtctctttgtattatggtacagtcatgggcacgtatttccgccctttgaccaattatagcctaaaagacgcagtgatcactgtaatgtacacggcagtgaccccaatgttaaatcctttcatctacagtctgagaaatcgggacatgaaggctgccctgcggaaactcttcaacaagagaatctcctcgtaa

SEQ ID NO: 161902 - DNA, 930 bp, Homo sapiens
  Payload ID: 11612
  Gene Symbol: OR1A2
  Gene Name: olfactory receptor, family 1, subfamily A, member 2
  Uniprot ID: Q9Y585
  ENST ID: ENST00000381951
  CDS Start-End: 1-930
atgaagaaagaaaatcaatcctttaacctggattttattctcctgggagttactagtcagcaagaacagaataatgtcttctttgtgatttttttgtgcatttaccccatcacactgactggaaatctgctcatcatcttggccatctgtgctgacattcgccttcacaaccccatgtattttctccttgccaacctctccttggttgacatcatcttctcatccgtaaccatccctaaggtgctggccaaccatctcttggggagcaagttcatctcctttgggggatgcctaatgcagatgtatttcatgatagccttggccaaggcagacagctataccttggctgcaatggcatacgatcgagctgtggccatcagctgcccacttcattacacaacaattatgagtccacggtcttgtatcctgcttattgctgggtcttgggtgattggaaacaccagtgctctcccccacactctgctcacagctagtttgtccttctgtggcaaccaggaagtagccaatttctactgtgacattatgcctttgctgaagttgtcctgttctgacgtccactttaatgtgaagatgatgtacctaggggtcggcgttttctctttgccattactatgcatcattgtctcctatgttcaggtcttttccacagtcttccaagttccatctaccaagagtctattcaaagccttctgcacctgtggctcccacctcacagttgtttttttatattatggtacaacgatgggcatgtatttccgccctctgaccagttacagccccaaagatgcagtgataactgtgatgtatgtggcagtgaccccagcattaaatcctttcatctatagtctgagaaattgggatatgaaggcagccctacagaaactcttcagcaagagaatctcctcatag

SEQ ID NO: 161903 - DNA, 957 bp, Homo sapiens
  Payload ID: 11613
  Gene Symbol: OR1B1
  Gene Name: olfactory receptor, family 1, subfamily B, member 1 (gene/pseudogene)
  Uniprot ID: Q8NGR6
  ENST ID: ENST00000304833
  CDS Start-End: 1-957
atgatgagctttgcccctaatgcttcacactctccggtttttttgctccttgggttctcgagagctaacatctcctacactctcctcttcttcctgttcctggctatttacctgaccaccatactggggaatgtgacactggtgctgctcatctcctgggactccagactgcactcacccatgtattatctgcttcgtggcctctctgtgatagacatggggctatccacagttacactgccccagttgctggcccatttggtctctcattacccaaccattcctgctgcccgctgcttggctcagttctttttcttctatgcatttggggttacagatacacttgtcattgctgtcatggctctggatcgctatgtggccatctgtgaccccctgcactatgctttggtaatgaatcaccaacggtgtgcctgcttactagccttgagctgggtggtgtccatactgcacaccatgttgcgtgtgggactcgtcctgcctctttgctggactggggatgctgggggcaacgttaaccttcctcacttcttttgtgaccaccggccacttctgcgagcctcttgttctgacatacattctaatgagctggccatattctttgagggtggcttccttatgctgggcccctgtgccctcattgtactctcttatgtccgaattggggccgctattctacgtttgccttcagctgctggtcgccgccgagcagtctccacctgtggatcccacctcaccatggttggtttcctctacggcaccatcatttgtgtctacttccagcctcccttccagaactctcagtatcaggacatggtggcttcagtaatgtatactgccattacacctttggccaacccatttgtgtatagcctccacaataaggatgtcaagggtgcactctgcaggctgcttgaatgggtgaaggtagacccctga

SEQ ID NO: 161904 - DNA, 945 bp, Homo sapiens
  Payload ID: 11614
  Gene Symbol: OR1C1
  Gene Name: olfactory receptor, family 1, subfamily C, member 1
  Uniprot ID: Q15619
  ENST ID: ENST00000408896
  CDS Start-End: 1-945
atggaaaaaagaaatctaacagttgtcagggaattcgtccttctgggacttcctagctcagcagagcagcagcacctcctgtctgtgctctttctctgtatgtatttagccaccaccttggggaacatgctcatcattgcgacgattggctttgactctcacctccattcccctatgtacttcttccttagtaacttggcctttgttgacatctgctttacgtcgactacagtcccccaaatggtagtgaatatcttgactggcaccaagactatctcttttgcaggctgcctcacccagctcttcttcttcgtttcttttgtgaatatggacagcctccttctgtgtgtgatggcgtatgatagatatgtggcgatttgccaccccttacattacaccgccagaatgaacctgtgcctttgtgtccagctagtggctggactgtggcttgttacttacctccacgccctcctgcatactgtcctaatagcacagctgtccttctgtgcctccaatatcatccatcatttcttctgtgatctcaatcctctcctgcagctctcttgctctgacgtctccttcaatgtaatgatcatttttgcagtaggaggtctattggctctcacgccccttgtctgtatcctcgtatcttatggacttatcttctccactgttctgaagatcacctctactcagggcaagcagagagctgtttccacctgcagctgccacctgtcagtggtggtgttgttttacggcacagccatcgccgtctatttcagcccttcatccccccatatgcctgagagcgacactctgtcaaccatcatgtattcaatggtggctccgatgctgaatcctttcatctataccctaaggaacagggatatgaagaggggacttcagaaaatgcttctcaagtgcacagtctttcagcagcaataa

SEQ ID NO: 161905 - DNA, 939 bp, Homo sapiens
  Payload ID: 11615
  Gene Symbol: OR1D2
  Gene Name: olfactory receptor, family 1, subfamily D, member 2
  Uniprot ID: P34982
  ENST ID: ENST00000331459
  CDS Start-End: 1-939
atggatggaggcaaccagagtgaaggttcagagttccttctcctggggatgtcagagagtcctgagcagcagcggatcctgttttggatgttcctgtccatgtacctggtcacggtggtgggaaatgtgctcatcatcctggccatcagctctgattcccgcctgcacacccccgtgtacttcttcctggccaacctctccttcactgacctcttctttgtcaccaacacaatccccaagatgctggtgaacctccagtcccataacaaagccatctcctatgcagggtgtctgacacagctctacttcctggtctccttggtggccctggacaacctcatcctggctgtgatggcatatgaccgctatgtggccatctgctgccccctccactacaccacagccatgagccctaagctctgtatcttactcctttccttgtgttgggtcctatccgtcctctatggcctcatacacaccctcctcatgaccagagtgaccttctgtgggtcacgaaaaatccactacatcttctgtgagatgtatgtattgctgaggatggcatgttccaacattcagattaatcacacagtgctgattgccacaggctgcttcatcttcctcattccctttggattcgtgatcatttcctatgtgctgattatcagagccatcctcagaataccctcagtctctaagaaatacaaagccttctccacctgtgcctcccatttgggtgcagtctccctcttctatgggacactttgtatggtatacctaaagcccctccatacctactctgtgaaggactcagtagccacagtgatgtatgctgtggtgacacccatgatgaatcccttcatctacagcctgaggaacaaggacatgcatggggctctgggaagactcctagataaacactttaagaggctgacatga

SEQ ID NO: 161906 - DNA, 939 bp, Homo sapiens
  Payload ID: 11616
  Gene Symbol: OR1D5
  Gene Name: olfactory receptor, family 1, subfamily D, member 5
  Uniprot ID: P58170
  ENST ID: ENST00000575751
  CDS Start-End: 1-939
atggatggagataaccagagtgagaactcacagttccttctcctggggatctcagagagtcctgagcagcagcggatcctgttttggatgttcctgtccatgtacctggtcacggtgctgggaaatgtgctcatcatcctggccatcagctctgattcccacctgcacacccccatgtacttcttcctggccaacctctccttcactgacctcttctttgtcaccaacacaatccccaagatgctggtgaacttccagtcccagaacaaagccatctcctatgcagggtgtctgacacagctctacttcctggtctccttggtgaccctggacaacctcatcctggccgtgatggcgtatgatcgctatgtggccacctgctgccccctccactatgtcacagccatgagccctgggctctgtgtcttgctcctctccttgtgttgggggctgtctgttctctatggcctcctcctcaccttcctcctgaccagggtgaccttctgtgggcctcgagagatccactacctcttctgtgacatgtacatcctgctgtggctggcatgttccaacacccacatcattcacacagcgttgattgccactggctgcttcatcttcctcacccccttagggttcatgaccacatcctatgtacgtattgtcagaaccatccttcaaatgccctcggcctctaagaaatacaaaaccttctctacctgtgcctcccatttgggtgtggtctccctcttttatgggacgcttgctatggtgtacctgcagcccctccatacctactccatgaaggactcagtagccacagtgatgtatgctgtgctgacacctatgatgaaccctttcatctacaggctgaggaacaaagacatgcatggggctccgggaagagtcctatggagaccctttcagaggcctaaatga

SEQ ID NO: 161907 - DNA, 1307 bp, Homo sapiens
  Payload ID: 11617
  Gene Symbol: OR1E1
  Gene Name: olfactory receptor, family 1, subfamily E, member 1
  Uniprot ID: P30953
  ENST ID: ENST00000322608
  CDS Start-End: 1-945
atgatgggacaaaatcaaaccagcatctcagacttcctgctcctgggcctgcccatccaaccagagcagcaaaacctgtgctatgccctgttcttggccatgtatcttaccaccctcctggggaacctcctcatcattgtcctcattcgactggactcccatctccacacgcctatgtatttgtttctcagcaacttgtccttctctgacctctgcttctcttccgtgaccattcccaagttgttacagaacatgcagaaccaggacccatccatcccctatgcggactgcctgacccaaatgtacttcttcctgttatttggagacctggagagcttcctccttgtggccatggcctatgaccgctatgtggccatctgcttccccctgcactacaccgccatcatgagccccatgctctgtctcgccctggtggcgctgtcctgggtgctgaccaccttccatgccatgttacacactttactcatggccaggttgtgtttttgtgcagacaatgtgatcccccactttttctgtgatatgtctgctctgctgaagctggccttctctgacactcgagttaatgaatgggtgatatttatcatgggagggctcattcttgtcatcccattcctactcatccttgggtcctatgcaagaattgtctcctccatcctcaaggtcccttcttctaagggtatctgcaaggccttctctacttgtggctcccacctgtctgtggtgtcactgttctatggaaccgttattggtctctacttatgctcatcagctaatagttctactctaaaggacactgtcatggctatgatgtacactgtggtgacccccatgctgaaccccttcatctacagcctgaggaacagagacatgaagggagccctgagcagagtcattcatcagaagaaaactttcttctctctctgatgataacacttggagctattacatagtttatccagtaaaatattgatattaatattggaatattattctaaattatttcctcaccatccttttgttgaaatggcatcgtacataatttttcaatatgtagtggagatgaagcatagctgagtagttgaactagggaagagggtcttggtgacctggctaagacttcctgtttgtcttcccaaggtgatcttggaaaaatgtagtttaagaacaactgttttaaatggtcttcatgccccacattcttaaattatcacaggattttgttatgttactcagaattttgctttgattgtagaatcatttttgtttaattaaaaaaatttttaaat

SEQ ID NO: 161908 - DNA, 972 bp, Homo sapiens
  Payload ID: 11618
  Gene Symbol: OR1E2
  Gene Name: olfactory receptor, family 1, subfamily E, member 2
  Uniprot ID: P47887
  ENST ID: ENST00000248384
  CDS Start-End: 1-972
atgatgggacaaaatcaaaccagcatctcagacttcctgctcctgggcctgcccatccaaccagagcagcaaaacctgtgctatgccctgttcttggccatgtatcttaccaccctcctggggaacctcctcatcattgtcctcattcgactggactcccatctccacacgcctgtgtatttgtttctcagcaacttgtccttctctgacctctgcttttcctcagtcacaatgcccaaattgctgcagaacatgcagaaccaagacccatccatcccctatgcagactgcctgacccaaatgtacttcttcttgtatttttcggatctagagagcttcctccttgtggccatggcctatgaccgctatgtggccatctgcttccccatgcactacaccgccatctgcttcctcctgcactacaccgccatcatgagccccatgctctgtctctccgtggtggcgctgtcctgggtgctgaccaccttccatgccatgttacacactttactcatggccaggttgtgtttttgtgcagacaatgtgatcccccactttttctgtgatatgtctgctctgctgaagctggcctgctctgacactcgagttaatgaatgggtgatatttatcatgggagggctcattcttgtcatcccattcctactcatccttgggtcctatgcaagaattgtctcctccatcctcaaggtcccttcttctaagggtatctgcaaggccttctctacttgtggctcccacctctctgtggtgtcactgttctatgggaccgttattggtctctacttatgcccatcagctaatagttctactctaaaggacactgtcatggctatgatgtacactgtggtgacccctatgctgacccccttcatctacagcctgaggaacagagacatgaagggagccctggaaagggtcatttgtaaaaggaaaaatcccttccttctatga

SEQ ID NO: 161909 - DNA, 942 bp, Homo sapiens
  Payload ID: 11619
  Gene Symbol: OR1F1
  Gene Name: olfactory receptor, family 1, subfamily F, member 1
  Uniprot ID: O43749
  ENST ID: ENST00000304646
  CDS Start-End: 1-939
atgagcgggacaaaccagtcgagtgtctccgagttcctcctcctgggactctccaggcagccccagcagcagcatctcctctttgtgttcttcctcagcatgtacctggccactgtcctggggaacctgctcatcatcctgtccgtaagcatagactcctgcctgcacacccccatgtacttcttcctcagcaacctgtcttttgtggacatctgcttctccttcaccaccgtccccaagatgctggccaatcacatactcgagactcagaccatctccttctgtggctgtctcacacagatgtatttcgttttcatgttcgtggacatggacaatttcctcctagctgtgatggcctatgaccactttgtcgccgtgtgccaccccttacattacacagcaaagatgacccatcagctctgtgccctgctggttgctggattatgggtggttgccaacctgaatgtccttctgcacaccctgctgatggctccactctcattctgtgcagacaatgccatcactcacttcttctgcgatgtgactcccctactgaaactctcctgctcagacacacacctcaatgaggtcataatccttagtgagggtgccctggtcatgatcaccccatttctttgcatcctggcttcttatatgcacatcacctgcactgtcctgaaggtcccatccacaaagggaaggtggaaagccttctccacctgtggttctcacctggctgtggttctcctcttctacagcaccatcattgctgtgtattttaaccctctgtcctcccactcagctgagaaagacactatggctactgtgttgtatacagtagtgactcccatgctaaaccctttcatctacagcctgaggaacaggtacttgaaaggggctctgaaaaaagtagttggcagggtggtgttttctgtctgatga

SEQ ID NO: 161910 - DNA, 998 bp, Homo sapiens
  Payload ID: 11620
  Gene Symbol: OR1G1
  Gene Name: olfactory receptor, family 1, subfamily G, member 1
  Uniprot ID: P47890
  ENST ID: ENST00000328890
  CDS Start-End: 31-972
caattaacccaactttcttcctacagacaaatggaggggaaaaatctgaccagcatctcagaatgtttcctcctggggttctctgagcagctggaggagcagaagcccctctttgggtccttcctgttcatgtacttggtcacggtggcaggcaacctcctcatcattctagtcatcattactgacactcaactccatacccccatgtacttctttctagccaacctctcccttgcagatgcctgctttgtgtccaccacagtccctaagatgctggcaaacatacagatccagagtcaggccatctcctactcagggtgtctactacagttgtattttttcatgttatttgtgatgctggaggcattcctcttggcggtcatggcctatgactgctacgtggccatatgccacccacttcattacattctgatcatgagccctgggctctgcatcttcctcgtgtctgcatcctggatcatgaatgccctccactcccttctacacacacttctgatgaacagcctgtccttctgcgcaaaccatgagatcccacacttcttctgtgacatcaatcccctcctgagtctgtcctgcacagaccccttcaccaatgagctggtgatcttcatcactgggggtctcacaggactcatttgtgtgctttgcctgattatctcttacacgaacgttttctcgaccatcctgaagatcccatcagctcaggggaagcggaaagccttttccacctgcagctctcatctctccgtggtctctctcttctttgggacttctttttgtgttgatttcagttctccctcaacccactcggcccagaaggacacagttgcatcagtgatgtacacagtggtaactccaatgttgaatccctttatctacagtttgaggaaccaagaaataaagtcttccctgagaaagttaatctgggttcggaaaattcattccccttagtggtagtgacttgacatccaatatgg

SEQ ID NO: 161911 - DNA, 1242 bp, Homo sapiens
  Payload ID: 11621
  Gene Symbol: OR1I1
  Gene Name: olfactory receptor, family 1, subfamily I, member 1
  Uniprot ID: O60431
  ENST ID: ENST00000209540
  CDS Start-End: 87-1154
gggaagctgggaccagaatggcatctctgacacctggctctgtgtggtttttctccctttttgttcccactagtcacagaccatacatggaaccagaaaagcaaaccgaaatctcagaattcttcctccagggactctcagaaaagccagagcatcagaccctcctcttcacaatgttcctctccacatacctggtcaccatcattggaaatgccctcattatcctggccatcatcacggactctcacctccacacacccatgtacttctttctcttcaacctctcactcgttgacaccctattatcctccaccaccgtccccaagatgctagcgaacatccaggctcagagcagagccatcccctttgtgggctgcctcacccagatgtatgccttccacctgttcgggaccatggacagctttctcctggcagtaatggccatcgaccgcttcgtggccattgtccacccacagcgttacttggttctcatgtgctcccctgtctgtgggctgctgctgggagcatcatggatgatcaccaacctccagtctctcatacacacctgcctcatggctcaactgaccttctgcgccggctctgaaatctcccacttcttctgtgacctcatgcccctgctgaagctctccggctcagacacgcacaccaacgagctggtgatctttgcttttggcattgtcgtgggcaccagcccattctcctgcatccttctctcgtacatccgcattttctggacagtctttaagatcccttctactcggggcaagtggaaagccttctccacctgtggcttacacctcactgtggtgtcactgtcctatgggaccatctttgctgtgtacttacagcccacatcccccagctcctcccagaaggacaaggcagccgccctaatgtgtggggtgttcatccccatgctcaacccctttatctacagcatacggaacaaggatatgaaggcagccctggggaagctcatcggcaaagtggccgtcccctgtcctaggccagaacagttattggatgtttatcatgttccaggatcactgttggctgctagggacacagagatgcatcccatcccctaccctggaggagttcagagtctagctgggaacagagacatggaataaatccttccagtacaacgtgataaatgtgtcataaagagatgaacaaagtgtatgagcacccaaaggaaaggtgtgcattttccccagg

SEQ ID NO: 161912 - DNA, 969 bp, Homo sapiens
  Payload ID: 11622
  Gene Symbol: OR1J1
  Gene Name: olfactory receptor, family 1, subfamily J, member 1
  Uniprot ID: Q8NGS3
  ENST ID: ENST00000259357
  CDS Start-End: 1-969
atgagccctgagaaccagagcagcgtgtccgagttcctcctcctgggcctccccatccggccagagcagcaggccgtgttcttcgccctgttcctgggcatgtacctgaccacggtgctggggaacctgctcatcatgctgctcatccagctagactctcaccttcacacccccatgtacttcttccttagccacttggccctcactgacatctccttttcatctgtcactgtccctaagatgctgatgaacatgcagactcagcacctagccgtcttttacaagggatgcatttcacagacatattttttcatattttttgctgacttagacagtttccttatcacttcaatggcatatgacaggtatgtggccatctgtcatcctctacattatgccaccatcatgactcagagccagtgtgtcatgctggtggctgggtcctgggtcatcgcttgtgcgtgtgctcttttgcataccctcctcctggcccagctttccttctgtgctgaccacatcatccctcactacttctgtgaccttggtgccctgctcaagttgtcctgctcagacacctccctcaatcagttagcaatctttacagcagcattgacagccattatgcttccattcctgtgcatcctggtttcttatggtcacattggggtcaccatcctccagattccctctaccaagggcatatgcaaagccttgtccacttgtggatcccacctctcagtggtgactatctattatcggacaattattggtctctattttcttcccccatccagcaacaccaatgacaagaacataattgcttcagtgatatacacagcagtcactcccatgttgaacccattcatttacagtctgagaaataaagacattaagggagccctaagaaaactcttgagtaggtcaggcgcagtggctcatgcctgtaatctcaacactttgggaggctga

SEQ ID NO: 161913 - DNA, 942 bp, Homo sapiens
  Payload ID: 11623
  Gene Symbol: OR1J2
  Gene Name: olfactory receptor, family 1, subfamily J, member 2
  Uniprot ID: Q8NGS2
  ENST ID: ENST00000335302
  CDS Start-End: 1-942
atgagccctgagaaccagagcagcgtgtccgagttcctccttctgggcctccccatccggccagagcagcaggctgtgttcttcaccctgttcctgggcatgtacctgaccacggtgctggggaacctgctcatcatgctgctcatccagctggactctcaccttcacacccccatgtacttcttcctcagccacttggctctcactgacatctccttttcatctgtcactgtccctaagatgctgatggacatgcggactaagtacaaatcgatcctctatgaggaatgcatttctcagatgtatttttttatattttttactgacctggacagcttccttattacatcaatggcatatgaccgatatgttgccatatgtcaccctctccactacactgtcatcatgagggaagagctctgtgtcttcttagtggctgtatcttggattctgtcttgtgccagctccctctctcacacccttctcctgacccggctgtctttctgtgctgcgaacaccatcccccatgtcttctgtgaccttgctgccctgctcaagctgtcctgctcagatatcttcctcaatgagctggtcatgttcacagtaggggtggtggtcattaccctgccattcatgtgtatcctggtatcatatggctacattggggccaccatcctgagggtcccttcaaccaaagggatccacaaagcattgtccacatgtggctcccatctctctgtggtgtctctctattatgggtcaatatttggccagtaccttttcccgactgtaagcagttctattgacaaggatgtcattgtggctctcatgtacacggtggtcacacccatgttgaacccctttatctacagccttaggaacagggacatgaaagaggcccttgggaaactcttcagtagagcaacatttttctcttggtga

SEQ ID NO: 161914 - DNA, 942 bp, Homo sapiens
  Payload ID: 11624
  Gene Symbol: OR1J4
  Gene Name: olfactory receptor, family 1, subfamily J, member 4
  Uniprot ID: Q8NGS1
  ENST ID: ENST00000340750
  CDS Start-End: 1-942
atgaagagggagaatcagagcagtgtgtctgagttcctcctcctggacctccccatctggccagagcagcaggctgtgttcttcaccctgttcttgggcatgtacctgatcacggtgctggggaacctgctcatcatcctgctcatccggctggactctcaccttcacacccccatgttcttcttcctcagccacttggctctcactgacatctccctttcatctgtcactgtcccaaagatgttattaagcatgcaaactcaggatcaatccattctttatgcagggtgtgtaactcagatgtattttttcatatttttcactgatctagacaatttccttctcacttcaatggcatacgatcggtatgtggccatctgtcaccccctccgctacaccactatcatgaaagagggactgtgtaacttactagtcactgtgtcctggatcctctcctgtaccaatgccctgtctcacactctcctcctggcccagctgtccttttgtgctgacaacaccatcccccatttcttctgtgatcttgttgccctactcaagctctcatgctcagacatctccctcaatgagctggtcattttcacagtgggacaggcagtcattactctaccactaatatgcatcttgatctcttatggccacattggggtcaccatcctcaaggctccatctactaagggcatcttcaaagctttgtccacctgtggctctcacctctctgtggtgtctctgtattatggcacaattattggactgtattttctcccctcatccagtgcctccagtgacaaggacgtaattgcctctgtgatgtacacggtgatcaccccattgctgaatcccttcatttatagcctaaggaacagggacataaagggagccctggagagactcttcaacagggcaacagtcttatctcaatga

SEQ ID NO: 161915 - DNA, 951 bp, Homo sapiens
  Payload ID: 11625
  Gene Symbol: OR1K1
  Gene Name: olfactory receptor, family 1, subfamily K, member 1
  Uniprot ID: Q8NGR3
  ENST ID: ENST00000277309
  CDS Start-End: 1-951
atggaggctgccaatgagtcttcagagggaatctcattcgttttattgggactgacaacaagtcctggacagcagcggcctctctttgtgctgttcttgctcttgtatgtggccagcctcctgggtaatggactcattgtggctgccatccaggccagtccagcccttcatgcacccatgtacttcctgctggcccacctgtcctttgctgacctctgcttcgcctccgtcactgtgcccaagatgttggccaacttgttggcccatgaccactccatctcgctggctggctgcctgacccaaatgtacttcttctttgccctgggggtaactgatagctgtcttctggcggccatggcctatgactgctacgtggccatccggcaccccctcccctatgccacgaggatgtcccgggccatgtgcgcagccctggtgggaatggcatggctggtgtcccacgtccactccctcctgtatatcctgctcatggctcgcttgtccttctgtgcttcccaccaagtgccccacttcttctgtgaccaccagcctctcttaaggctctcgtgctctgacacccaccacatccagctgctcatcttcaccgagggcgccgcagtggtggtcactcccttcctgctcatcctcgcctcctatggggccatcgcagctgccgtgctccagctgccctcagcctctgggaggctccgggctgtgtccacctgtggctcccacctggctgtggtgagcctcttctatgggacagtcattgcagtctacttccaggccacatcccgacgcgaggcagagtggggccgtgtggccactgtcatgtacactgtagtcacccccatgctgaaccccatcatctacagcctctggaatcgcgatgtacagggggcactccgagcccttctcattgggcgaaggatctcagctagtgactcctga

SEQ ID NO: 161916 - DNA, 933 bp, Homo sapiens
  Payload ID: 11626
  Gene Symbol: OR1L1
  Gene Name: olfactory receptor, family 1, subfamily L, member 1
  ENST ID: ENST00000309623
  CDS Start-End: 1-933
atgggaagaaataacctaacaagaccctctgaattcatcctccttggactctcctctcgacctgaggatcagaagccgctctttgctgtgttcctccccatctaccttatcacagtgataggaaacctgcttatcatcctggccatccgctcagacactcgtctccagacgcccatgtacttctttctaagcatcctgtcttttgttgacatttgctatgtgacagtcattatccctaagatgctggtgaacttcttatcagagacaaagaccatctcttacagtgagtgtctgacccagatgtactttttcttagcctttggaaacacagacagttacctgctagcagccatggccattgaccgctatgtggccatatgtaatcccttccactacatcaccattatgagtcacagatgctgtgtcctgcttctggttctctccttctgcattccacattttcactccctcctgcacattcttctgactaatcagctcatcttctgtgcctcaaatgtcatccatcactttttctgcgatgatcaaccagtgctaaaattgtcctgttcctcccattttgtcaaagaaatcacagtaatgacagaaggcttggctgtcataatgaccccgttttcatgcatcatcatctcttatttaagaatcctcatcactgttctgaagattccttcagctgctggaaagcgtaaagcattttctacctgtggctctcatctcacagtggtgaccctgttttatggaagcattagctatctctattttcagcccctgtccaactatactgtcaaggatcaaatagcaacaattatctacaccgtactgactcctatgctaaatccatttatctatagtctgaggaacaaagacatgaagcagggtttggcaaagttgatgcacaggatgaaatgtcagtaa

SEQ ID NO: 161917 - DNA, 1083 bp, Homo sapiens
  Payload ID: 11626
  Gene Symbol: OR1L1
  Gene Name: olfactory receptor, family 1, subfamily L, member 1
  Uniprot ID: Q8NH94
  ENST ID: ENST00000373686
  CDS Start-End: 1-1083
atggaaagaaaccacaatccagataattgtaatgttttaaattttttctttgctgataagaagaataaaaggagaaattttggacagattgtatcagatgttggaagaatctgttacagtgttagtttatctttaggtgaacccacaactatgggaagaaataacctaacaagaccctctgaattcatcctccttggactctcctctcgacctgaggatcagaagccgctctttgctgtgttcctccccatctaccttatcacagtgataggaaacctgcttatcatcctggccatccgctcagacactcgtctccagacgcccatgtacttctttctaagcatcctgtcttttgttgacatttgctatgtgacagtcattatccctaagatgctggtgaacttcttatcagagacaaagaccatctcttacagtgagtgtctgacccagatgtactttttcttagcctttggaaacacagacagttacctgctagcagccatggccattgaccgctatgtggccatatgtaatcccttccactacatcaccattatgagtcacagatgctgtgtcctgcttctggttctctccttctgcattccacattttcactccctcctgcacattcttctgactaatcagctcatcttctgtgcctcaaatgtcatccatcactttttctgcgatgatcaaccagtgctaaaattgtcctgttcctcccattttgtcaaagaaatcacagtaatgacagaaggcttggctgtcataatgaccccgttttcatgcatcatcatctcttatttaagaatcctcatcactgttctgaagattccttcagctgctggaaagcgtaaagcattttctacctgtggctctcatctcacagtggtgaccctgttttatggaagcattagctatctctattttcagcccctgtccaactatactgtcaaggatcaaatagcaacaattatctacaccgtactgactcctatgctaaatccatttatctatagtctgaggaacaaagacatgaagcagggtttggcaaagttgatgcacaggatgaaatgtcagtaa

SEQ ID NO: 161918 - DNA, 975 bp, Homo sapiens
  Payload ID: 11627
  Gene Symbol: OR1L3
  Gene Name: olfactory receptor, family 1, subfamily L, member 3
  Uniprot ID: Q8NH93
  ENST ID: ENST00000304820
  CDS Start-End: 1-975
atgggaatgtccaacctgacaagactctctgaatttattctcttgggactctcctctcggtctgaagaccagaggccactctttgccctctttcttatcatatacctggtcactttgatgggaaatctgctcatcatcttggctatccactctgatcctcgacttcaaaaccctatgtattttttcctaagcatcttgtcctttgctgatatttgctacacaacagtcatagtcccaaagatgctcgtgaacttcttatcagagaaaaagaccatttcctatgctgaatgtctggcacagatgtatttcttcctggtttttggaaacatagatagttatctcctggcggctatggccatcaaccgctgtgtagccatttgtaacccattccattatgtcactgttatgaaccgcagatgctgtgtgttgctactagcattccccatcactttctcctatttccactctctcctacatgtcctcctggtgaatcggctcaccttttgtacatcaaatgttatccatcattttttttgtgatgtcaaccctgtgctgaaactgtcctgctcctccacctttgtcaatgaaattgtggccatgacagaagggctggcctctgtgatggctccatttgtctgtatcatcatctcttatctaagaattctcatcgctgttctcaagattccctcagcagctggaaaacacaaagccttctccacctgcagctcccatctcactgtggtgattctgttttatgggagtattagctatgtctatttgcagcctttgtccagctatactgtcaaggaccgaatagcaacaatcaactacactgtgttgacatcagtgttgaacccatttatctacagtttaagaaacaaagacatgaaacggggcttacagaaattgataaacaagattaagtctcaaatgagtaggttctctacaaagaccaataaaatctgtggaccctga

SEQ ID NO: 161919 - DNA, 936 bp, Homo sapiens
  Payload ID: 11628
  Gene Symbol: OR1L4
  Gene Name: olfactory receptor, family 1, subfamily L, member 4
  Uniprot ID: Q8NGR5
  ENST ID: ENST00000259466
  CDS Start-End: 1-936
atggagacaaagaattatagcagcagcacctcaggcttcatcctcctgggcctctcttccaaccctaagctgcagaaacctctctttgccatcttcctcatcatgtacctactcactgcggtggggaatgtgctcatcatcctggccatctactctgaccccaggctccacacccctatgtacttttttctcagcaacttgtctttcatggatatctgcttcacaacagtcatagtgcctaagatgctggtgaattttctatcagagacaaagattatctcttatgtgggctgcctgatccagatgtacttcttcatggcatttgggaacactgacagctacctgctggcctctatggccatcgaccggctggtggccatctgcaaccccttacactatgatgtggttatgaaaccatggcattgcctactcatgctattgggttcttgcagcatctcccacctacattccctgttccgcgtgctacttatgtctcgcttgtctttctgtgcctctcacatcattaagcactttttctgtgacacccagcctgtgctaaagctctcctgctctgacacatcctccagccagatggtggtgatgactgagaccttagctgtcattgtgacccccttcctgtgtaccatcttctcctacctgcaaatcatcgtcactgtgctcagaatcccctctgcagccgggaagtggaaggccttctctacctgtggctcccacctcactgtagtggtcctgttctatgggagtgtcatctatgtctattttaggcctctgtccatgtactcagtgatgaagggccgggtagccacagttatgtacacagtagtgacacccatgctgaaccctttcatctacagcctgaggaacaaagatatgaaaaggggtttgaagaaattaagacacagaatttactcatag

SEQ ID NO: 161920 - DNA, 936 bp, Homo sapiens
  Payload ID: 11629
  Gene Symbol: OR1L6
  Gene Name: olfactory receptor, family 1, subfamily L, member 6
  ENST ID: ENST00000304720
  CDS Start-End: 1-936
atggagataaagaactacagcagcagcacctcaggcttcatcctcctgggcctctcttccaaccctcagctgcagaaacctctctttgccatcttcctcatcatgtacctgctcgctgcggtggggaatgtgctcatcatcccggccatctactctgaccccaggctccacacccctatgtacttttttctcagcaacttgtctttcatggatatctgcttcacaacagtcatagtgcctaagatgctggtgaattttctatcagagacaaaggttatctcctatgtgggctgcctggcccagatgtacttctttatggcatttgggaacactgacagctacctgctggcctctatggccatcgaccggctggtggccatctgcaaccccttacactatgatgtggttatgaaaccacggcattgcctgctcatgctattgggttcttgcagcatctcccacctacattccctgttccgcgtgctacttatgtctcgcttgtctttctgtgcctctcacatcattaagcactttttctgtgacacccagcctgtgctaaagctctcctgctctgacacatcctccagccagatggtggtgatgactgagaccttagctgtcattgtgacccccttcctgtgtatcatcttctcctacctgcgaatcatggtcactgtgctcagaatcccctctgcagccgggaagtggaaggccttctctacctgtggctcccacctcactgcagtagcccttttctatgggagtattatttatgtctattttaggcccctgtccatgtactcagtggttagggaccgggtagccacagttatgtacacagtagtgacacccatgctgaaccctttcatctacagcctgaggaacaaagatatgaagaggggtttgaagaaattacaggacagaatttaccggtaa

SEQ ID NO: 161921 - DNA, 1044 bp, Homo sapiens
  Payload ID: 11629
  Gene Symbol: OR1L6
  Gene Name: olfactory receptor, family 1, subfamily L, member 6
  Uniprot ID: Q8NGR2
  ENST ID: ENST00000373684
  CDS Start-End: 1-1044
atgagctatttttacaggcttaagcttatgaaagaagctgtcttggtcaaactgccctttacatctctcccactgcttctccaaaccctatccaggaagtccagagacatggagataaagaactacagcagcagcacctcaggcttcatcctcctgggcctctcttccaaccctcagctgcagaaacctctctttgccatcttcctcatcatgtacctgctcgctgcggtggggaatgtgctcatcatcccggccatctactctgaccccaggctccacacccctatgtacttttttctcagcaacttgtctttcatggatatctgcttcacaacagtcatagtgcctaagatgctggtgaattttctatcagagacaaaggttatctcctatgtgggctgcctggcccagatgtacttctttatggcatttgggaacactgacagctacctgctggcctctatggccatcgaccggctggtggccatctgcaaccccttacactatgatgtggttatgaaaccacggcattgcctgctcatgctattgggttcttgcagcatctcccacctacattccctgttccgcgtgctacttatgtctcgcttgtctttctgtgcctctcacatcattaagcactttttctgtgacacccagcctgtgctaaagctctcctgctctgacacatcctccagccagatggtggtgatgactgagaccttagctgtcattgtgacccccttcctgtgtatcatcttctcctacctgcgaatcatggtcactgtgctcagaatcccctctgcagccgggaagtggaaggccttctctacctgtggctcccacctcactgcagtagcccttttctatgggagtattatttatgtctattttaggcccctgtccatgtactcagtggttagggaccgggtagccacagttatgtacacagtagtgacacccatgctgaaccctttcatctacagcctgaggaacaaagatatgaagaggggtttgaagaaattacaggacagaatttaccggtaa

SEQ ID NO: 161922 - DNA, 930 bp, Homo sapiens
  Payload ID: 11630
  Gene Symbol: OR1L8
  Gene Name: olfactory receptor, family 1, subfamily L, member 8
  Uniprot ID: Q8NGR8
  ENST ID: ENST00000304865
  CDS Start-End: 1-930
atggaaagaatcaaccacaccagcagtgtctccgagtttatcctcctgggactctcctcccggcctgaggaccaaaagacactctttgttctcttcctcatcgtgtacctggtcaccataacagggaacctgctcatcatcctggccattcgcttcaacccccatcttcagacccctatgtatttcttcttgagttttctgtctctcactgatatttgctttacaacaagcgttgtccccaagatgctgatgaacttcctgtcagaaaagaagaccatctcctatgctgggtgtctgacacagatgtattttctctatgccttgggcaacagtgacagctgccttctggcagtcatggcctttgaccgctatgtggccgtctgtgaccctttccactatgtcaccaccatgagccaccaccactgtgtcctgctggtggccttctcctgctcatttcctcacctccactcactcctgcacacacttctgctgaatcgtctcaccttctgtgactccaatgttatccaccactttctctgtgacctcagccctgtgctgaaattgtcctgctcttccatatttgtcaatgaaattgtgcagatgacagaagcacctattgttttggtgactcgttttctctgcattgctttctcttatatacgaatcctcactacagttctcaagattccctctacttctgggaaacgcaaagccttctccacctgtggtttttacctcaccgtggtgacgctcttttatggaagcatcttctgtgtctatttacagcccccatccacctacgctgtcaaggaccacgtggcaacaattgtttacacagttttgtcatccatgctcaatccttttatctacagcctgagaaacaaagacctgaaacagggcctgaggaagcttatgagcaagagatcctag

SEQ ID NO: 161923 - DNA, 1035 bp, Homo sapiens
  Payload ID: 11631
  Gene Symbol: OR1M1
  Gene Name: olfactory receptor, family 1, subfamily M, member 1
  Uniprot ID: Q8NGA1
  ENST ID: ENST00000429566
  CDS Start-End: 67-1008
ttccaaaaccatctccctgtcattcctataacctcccctttccatacttccagaggaatcacacccatggaaccaagaaaccaaaccagtgcatctcaattcatcctcctgggactctcagaaaagccagagcaggagacgcttctcttttccctgttcttctgcatgtacctggtcatggtcgtggggaacctgctcatcatcctggccatcagcatagactcccacctccacacccccatgtacttcttcctggccaacctgtccctggttgatttctgtctggccaccaacaccatccctaagatgctggtgagccttcaaaccgggagcaaggccatctcttatccctgctgcctgatccagatgtacttcttccatttctttggcatcgtggacagcgtcataatcgccatgatggcttatgaccggttcgtggccatctgccacccattgcactacgccaagatcatgagcctacgcctctgtcgcctgctggtcggcgccctctgggcgttttcctgcttcatctcactcactcacatcctcctgatggcccgtctcgttttctgcggcagccatgaggtgcctcactacttctgcgacctcactcccatcctccgactttcgtgcacggacacctctgtgaataggatcttcatcctcattgtggcagggatggtgatagccacgccctttgtctgcatcctggcctcctatgctcgcatccttgtggccatcatgaaggtcccctctgcaggcggcaggaagaaagccttctccacctgcagctcccacctgtctgtggttgctctcttctatgggaccaccattggcgtctatctgtgtccctcctcggtcctcaccactgtgaaggagaaagcttctgcggtgatgtacacagcagtcacccccatgctgaatcccttcatctacagcttgaggaacagagacctgaaaggggctctcaggaagctggtcaacagaaagatcacctcatcttcctgaccaccaggactcaggaacttctggggg

SEQ ID NO: 161924 - DNA, 936 bp, Homo sapiens
  Payload ID: 11632
  Gene Symbol: OR1N1
  Gene Name: olfactory receptor, family 1, subfamily N, member 1
  Uniprot ID: Q8NGS0
  ENST ID: ENST00000304880
  CDS Start-End: 1-936
atggaaaaccaatccagcatttctgaatttttcctccgaggaatatcagcgcctccagagcaacagcagtccctcttcggaattttcctgtgtatgtatcttgtcaccttgactgggaacctgctcatcatcctggccattggctctgacctgcacctccacacccccatgtactttttcttggccaacctgtcttttgttgacatgggtttaacgtcctccacagttaccaagatgctggtgaatatacagactcggcatcacaccatctcctatacgggttgcctcacgcaaatgtatttctttctgatgtttggtgatctagacagcttcttcctggctgccatggcgtatgaccgctatgtggccatttgccaccccctctgctactccacagtcatgaggccccaagtctgtgccctaatgcttgcattgtgctgggtcctcaccaatatcgttgccctgactcacacgttcctcatggctcggttgtccttctgtgtgactggggaaattgctcactttttctgtgacatcactcctgtcctgaagctgtcatgttctgacacccacatcaacgagatgatggtttttgtcttgggaggcaccgtactcatcgtcccctttttatgcattgtcacctcctacatccacattgtgccagctatcctgagggtccgaacccgtggtggggtgggcaaggccttttccacctgcagttcccacctctgcgttgtttgtgtgttctatgggaccctcttcagtgcctacctgtgtcctccctccattgcctctgaagagaaggacattgcagcagctgcaatgtacaccatagtgactcccatgttgaacccctttatctatagcctaaggaacaaggacatgaagggggccctaaagaggctcttcagtcacaggagtattgtttcctcttag

SEQ ID NO: 161925 - DNA, 939 bp, Homo sapiens
  Payload ID: 11632
  Gene Symbol: OR1N1
  Gene Name: olfactory receptor, family 1, subfamily N, member 1
  ENST ID: ENST00000619659
  CDS Start-End: 1-939
gtcatggaaaaccaatccagcatttctgaatttttcctccgaggaatatcagcgcctccagagcaacagcagtccctcttcggaattttcctgtgtatgtatcttgtcaccttgactgggaacctgctcatcatcctggccattggctctgacctgcacctccacacccccatgtactttttcttggccaacctgtcttttgttgacatgggtttaacgtcctccacagttaccaagatgctggtgaatatacagactcggcatcacaccatctcctatacgggttgcctcacgcaaatgtatttctttctgatgtttggtgatctagacagcttcttcctggctgccatggcgtatgaccgctatgtggccatttgccaccccctctgctactccacagtcatgaggccccaagtctgtgccctaatgcttgcattgtgctgggtcctcaccaatatcgttgccctgactcacacgttcctcatggctcggttgtccttctgtgtgactggggaaattgctcactttttctgtgacatcactcctgtcctgaagctgtcatgttctgacacccacatcaacgagatgatggtttttgtcttgggaggcaccgtactcatcgtcccctttttatgcattgtcacctcctacatccacattgtgccagctatcctgagggtccgaacccgtggtggggtgggcaaggccttttccacctgcagttcccacctctgcgttgtttgtgtgttctatgggaccctcttcagtgcctacctgtgtcctccctccattgcctctgaagagaaggacattgcagcagctgcaatgtacaccatagtgactcccatgttgaacccctttatctatagcctaaggaacaaggacatgaagggggccctaaagaggctcttcagtcacaggagtattgtttcctcttag

SEQ ID NO: 161926 - DNA, 1103 bp, Homo sapiens
  Payload ID: 11633
  Gene Symbol: OR1N2
  Gene Name: olfactory receptor, family 1, subfamily N, member 2
  Uniprot ID: Q8NGR9
  ENST ID: ENST00000373688
  CDS Start-End: 59-1051
cagttctggccacacagatgcatatctgtaaattgatctaataaataaatactgacacatggaaggtttttatctgcgcagatcacacgaactacaagggatgggaaaaccaggcagagtgaaccaaaccactgtttcagacttcctccttctaggactctctgagtggccagaggagcagcctcttctgtttggcatcttccttggcatgtacctggtcaccatggtggggaacctgctcattatcctggccatcagctctgacccacacctccatactcccatgtacttctttctggccaacctgtcattaactgatgcctgtttcacttctgcctccatccccaaaatgctggccaacattcatacccagagtcagatcatctcgtattctgggtgtcttgcacagctatatttcctccttatgtttggtggccttgacaactgcctgctggctgtgatggcatatgaccgctatgtggccatctgccaaccactccattacagcacatctatgagtccccagctctgtgcactaatgctgggtgtgtgctgggtgctaaccaactgtcctgccctgatgcacacactgttgctgacccgcgtggctttctgtgcccagaaagccatccctcatttctattgtgatcctagtgctctcctgaagcttgcctgctcagatacccatgtaaacgagctgatgatcatcaccatgggcttgctgttcctcactgttcccctcctgctgatcgtcttctcctatgtccgcattttctgggctgtgtttgtcatctcatctcctggagggagatggaaggccttctctacctgtggttctcatctcacggtggttctgctcttctatgggtctcttatgggtgtgtatttacttcctccatcaacttactctacagagagggaaagtagggctgctgttctctatatggtgattattcccacgctaaacccattcatttatagcttgaggaacagagacatgaaggaggctttgggtaaactttttgtcagtggaaaaacattctttttatgattagacatctagacggtgatgtctaatcttgatcaacccctccctgtcttcc

SEQ ID NO: 161927 - DNA, 924 bp, Homo sapiens
  Payload ID: 11633
  Gene Symbol: OR1N2
  Gene Name: olfactory receptor, family 1, subfamily N, member 2
  ENST ID: ENST00000616791
  CDS Start-End: 1-924
ggcagagtgaaccaaaccactgtttcagacttcctccttctaggactctctgagtggccagaggagcagcctcttctgtttggcatcttccttggcatgtacctggtcaccatggtggggaacctgctcattatcctggccatcagctctgacccacacctccatactcccatgtacttctttctggccaacctgtcattaactgatgcctgtttcacttctgcctccatccccaaaatgctggccaacattcatacccagagtcagatcatctcgtattctgggtgtcttgcacagctatatttcctccttatgtttggtggccttgacaactgcctgctggctgtgatggcatatgaccgctatgtggccatctgccaaccactccattacagcacatctatgagtccccagctctgtgcactaatgctgggtgtgtgctgggtgctaaccaactgtcctgccctgatgcacacactgttgctgacccgcgtggctttctgtgcccagaaagccatccctcatttctattgtgatcctagtgctctcctgaagcttgcctgctcagatacccatgtaaacgagctgatgatcatcaccatgggcttgctgttcctcactgttcccctcctgctgatcgtcttctcctatgtccgcattttctgggctgtgtttgtcatctcatctcctggagggagatggaaggccttctctacctgtggttctcatctcacggtggttctgctcttctatgggtctcttatgggtgtgtatttacttcctccatcaacttactctacagagagggaaagtagggctgctgttctctatatggtgattattcccacgctaaacccattcatttatagcttgaggaacagagacatgaaggaggctttgggtaaactttttagaaaaagaagc

SEQ ID NO: 161928 - DNA, 945 bp, Homo sapiens
  Payload ID: 11634
  Gene Symbol: OR1Q1
  Gene Name: olfactory receptor, family 1, subfamily Q, member 1
  Uniprot ID: Q15612
  ENST ID: ENST00000297913
  CDS Start-End: 1-945
atggacaacagcaactggaccagtgtgtcccattttgttctcttgggcatttccacccacccagaagagcaaatcccactcttccttgttttctcactcatgtacgcaatcaatatttctggcaacttggccatcatcacactgattctctctgctccacgcctccacatccccatgtacatcttcctcagtaacttggccttgacagacatctgcttcacctccaccacggtccccaagatgctgcagattattttctcccctacaaaggtaatttcctacacaggctgtttagcccaaacttatttcttcatttgcttcgccgtcatggaaaacttcatcctggctgtgatggcctatgacaggtacattgccatctgccaccctttccactacactatgatcctgactagaatgctgtgtgtgaagatggtggtcatgtgccatgctctctcccaccttcatgccatgctgcatacctttctcataggccaactaatcttctgtgcagataacagaatcccccacttcttctgtgacctctacgctctgatgaagatctcctgcaccagcacctacctcaacacccttatgattcacacagaaggtgctgttgtaatcagtggagctctggccttcattactgcctcctatgcctgcatcatcctggtggtcctccggatcccctcagccaagggcaggtggaaaaccttttctacctgcggctcccacctcactgtggtggccatattctatggcaccctcagttgggtctacttccggcccctttccagctattcagtgaccaagggtcgcattataacagtcgtgtacacagtggtgactcccatgctgaaccccttcatctacagcctgaggaatggggatgtcaagggaggcttcatgaaatggatgagcagaatgcagacttttttctttagataa

SEQ ID NO: 161929 - DNA, 978 bp, Homo sapiens
  Payload ID: 11635
  Gene Symbol: OR1S1
  Gene Name: olfactory receptor, family 1, subfamily S, member 1 (gene/pseudogene)
  Uniprot ID: Q8NH92
  ENST ID: ENST00000309433
  CDS Start-End: 1-978
atgaagacttttagttcctttcttcagatcggcagaaatatgcatcaaggaaaccaaaccaccatcactgaattcattctcctgggatttttcaagcaggatgagcatcaaaacctcctctttgtgcttttcttgggtatgtacctggtcactgtgattgggaacgggctcatcattgtggctatcagcttggatacgtaccttcatacccccatgtatctcttccttgccaatctatcctttgctgatatttcctccatttccaactcagtccccaaaatgctggtgaatattcaaaccaagagtcaatccatctcttatgagagctgcatcacacagatgtacttttctattgtgtttgtcgtcattgacaatttgctcttggggaccatggcctatgaccactttgtggcgatctgccaccctctgaattatacaattctcatgcggcccaggttcggcattttgctcacagtcatctcatggttcctcagtaatattattgctctgacacacacccttctgctcattcaattgctcttctgtaaccacaacactctcccacacttcttctgtgacttggcccctctgctcaaactgtcctgttcagatacattgatcaatgagcttgtgttgtttattgtgggtttatcagttatcatcttcccctttacactcagcttcttttcctatgtctgcatcatcagagctgtcctgagagtatcttccacacagggaaagtggaaagccttctccacttgtggctctcacctgacagttgtattactgttctacggaaccattgtaggcgtgtactttttcccctcctccactcaccctgaggacactgataagattggtgctgtcctattcactgtggtgacacccatgataaaccccttcatctacagcttgaggaataaggatatgaaaggtgccctgagaaagctcatcaatagaaaaatttcttccctttga

SEQ ID NO: 161930 - DNA, 979 bp, Homo sapiens
  Payload ID: 11635
  Gene Symbol: OR1S1
  Gene Name: olfactory receptor, family 1, subfamily S, member 1 (gene/pseudogene)
  Uniprot ID: Q8NH92
  ENST ID: ENST00000624470
  CDS Start-End: 1-978
atgaagacttttagttcctttcttcagatcggcagaaatatgcatcaaggaaaccaaaccaccatcactgaattcattctcctgggatttttcaagcaggatgagcatcaaaacctcctctttgtgcttttcttgggtatgtacctggtcactgtgattgggaacgggctcatcattgtggctatcagcttggatacgtaccttcatacccccatgtatctcttccttgccaatctatcctttgctgatatttcctccatttccaactcagtccccaaaatgctggtgaatattcaaaccaagagtcaatccatctcttatgagagctgcatcacacagatgtacttttctattgtgtttgtcgtcattgacaatttgctcttggggaccatggcctatgaccactttgtggcgatctgccaccctctgaattatacaattctcatgcggcccaggttcggcattttgctcacagtcatctcatggttcctcagtaatattattgctctgacacacacccttctgctcattcaattgctcttctgtaaccacaacactctcccacacttcttctgtgacttggcccctctgctcaaactgtcctgttcagatacattgatcaatgagcttgtgttgtttattgtgggtttatcagttatcatcttcccctttacactcagcttcttttcctatgtctgcatcatcagagctgtcctgagagtatcttccacacagggaaagtggaaagccttctccacttgtggctctcacctgacagttgtattactgttctacggaaccattgtaggcgtgtactttttcccctcctccactcaccctgaggacactgataagattggtgctgtcctattcactgtggtgacacccatgataaaccccttcatctacagcttgaggaataaggatatgaaaggtgccctgagaaagctcatcaatagaaaaatttcttccctttgat

SEQ ID NO: 161931 - DNA, 978 bp, Homo sapiens; identical to SEQ ID NO: 161929
  Payload ID: 11635
  Gene Symbol: OR1S1
  Gene Name: olfactory receptor, family 1, subfamily S, member 1 (gene/pseudogene)
  Uniprot ID: Q8NH92
  ENST ID: ENST00000624482
  CDS Start-End: 1-978

SEQ ID NO: 161932 - DNA, 980 bp, Homo sapiens
  Payload ID: 11636
  Gene Symbol: OR1S2
  Gene Name: olfactory receptor, family 1, subfamily S, member 2
  Uniprot ID: Q8NGQ3
  ENST ID: ENST00000302592
  CDS Start-End: 1-978
atgaagactttgtgttcctttcttcagatcagcagaaatatgcatcaagaaaaccaaaccaccatcactgaattcattctcctgggactctccaaccaggctgaacatcaaaacctcctctttgtgcttttcctgagtatgtatgtggtcactgtggttgggaacgggctcatcattgtggctatcagcttggatatataccttcacacccccatgtatctcttccttgcctacctatcctttgctgatatttcctccatttccaactcagtccccaaaatgctggtgaatattcaaaccaacagccaatccatctcttatgagagctgcatcacacagatgtacttttctattgtgtttgtcgtcactgacaatttgcttttggggaccatggccttcgaccactttgtggcgatctgccaccctctgaactatacaactttcatgcgggccaggttcggcactttgctcacagtcatctcgtggttcctcagtaatattattgctcttacacacacccttctgctcattcaattgctcttctgtgaccacaacactctcccacacttcttctgtgacttggcccctctgctcaaactgtcctgttcagatacaatgatcaatgagcttgtgttgtttattgtgggtttatcagttatcatcttcccctttgtactcatcttcttctcctatgtctgcatcatcagagctgtcctgggagtatcatccacacagggaaagtggaaagccttctccacttgtggctctcacctgacaattgcattactgttctacggaaccactgtaggcgtgtactttttcccctcctccactcaccctgaggacactgataagattggtgctgtcctattcactgtggtgacacccatgatgaaccccttcatctacagcttgaggaataaggatatgaaaggtgccctgagaaagctcatcaatagaaaaatttcttccctttgatg

SEQ ID NO: 161933 - DNA, 1053 bp, Homo sapiens
  Payload ID: 11637
  Gene Symbol: OR10A2
  Gene Name: olfactory receptor, family 10, subfamily A, member 2
  Uniprot ID: Q9H208
  ENST ID: ENST00000307322
  CDS Start-End: 63-974
ggggacttctgcccacacttatagctacaggaaactggacaagaataagtgagtttatcctcatgagcttctcttccctgcctactgaaatacagtcattactctttctgacatttctaaccatctacctggtcaccctgatgggaaactgcctcatcattctggttaccctagctgaccccatgctacacagccccatgtacttcttcctcagaaacttatctttcctggagattggcttcaacctagtcattgtgcccaaaatgctggggaccctgcttgcccaggacacaaccatctccttccttggctgtgccactcagatgtatttcttcttcttctttggagtggctgaatgcttcctcctggctaccatggcatatgaccgctatgtggccatctgcagtcccttgcactacccagtcatcatgaaccaaaggactcgtgccaaactggctgctgcctcctggttcccaggctttcctgtagctactgtgcagaccacatggctcttcagttttccattctgtggcaccaacaaggtgaaccacttcttctgtgacagcccacctgtgctgaggctggtctgtgcagacacagcactctttgagatctacgccatcgtcggaaccattctggtggtcatgatcccctgcttgctgatcttgtgttcctatactcacattgctgctgccatcctcaagatcccatcagctaaagggaagaataaagccttttctacatgttcctcacacctccttgttgtctctcttttctatatatcattaagcctcacctacttccggcctaaatcaaataattcacctgagggcaagaagctgctatcattgtcctacactgttatgactcccatgttgaaccccattatctacagcctgagaaataacgaggtgaagaatgccctcagcaggacggtctctaaggccctagccctcagaaactgtatcccatagaccttaggaagtaaggctacattttactggatgagaaacaatcagtcccagatttgagattcctctctgcatctttcca

SEQ ID NO: 161934 - DNA, 1061 bp, Homo sapiens
  Payload ID: 11638
  Gene Symbol: OR10A3
  Gene Name: olfactory receptor, family 10, subfamily A, member 3
  Uniprot ID: P58181
  ENST ID: ENST00000360759
  CDS Start-End: 75-1019
tcacagctatgggattacgacttcatactcgatataccaggtccataaaaacaatataagtttcaactactgaaatgaaaagacaaaatcaaagctgtgtggttgaattcatcctcctgggcttttctaactttcctgagctccaggtgcagctctttggggttttcctagttatttatgtggtgaccctgatgggaaatgccatcattacagtcatcatctccttaaaccagagcctccacgttcccatgtacctgttcctcctgaacctatctgtggtggaggtgagtttcagtgcagtcattacgcctgaaatgctggtggtgctctctactgagaaaactatgatttcttttgtgggctgttttgcacagatgtatttcatccttctttttggtgggactgaatgttttctcctgggagcgatggcttatgaccgatttgctgcaatttgccatcctctgaactacccagtgattatgaacagaggggtttttatgaaattagtaatattctcatggatctcagggatcatggtggctactgtgcagaccacttgggtatttagttttccattttgtggccccaatgaaattaatcatctcttctgtgagactcccccggtactagagcttgtgtgtgcagacaccttcttatttgaaatctatgccttcacaggcaccattttgattgttatggttcctttcttgttgatcctcttgtcttacattcgagttctgtttgccatcctgaagatgccatcaactactgggagacaaaaggccttttccacctgtgcctctcacctcacatctgtgaccctgttctatggcacagccaatatgacttatttacaacccaaatctggctactcacccgaaaccaagaaactgatctcattggcttacacgttgcttacccctctgctcaatccgctcatctatagcttacgaaacagtgagatgaagaggactttgataaaactatggcgaagaaaagtgattttacacacattctgattgtgttgagaagctgagtaagatttggccactgcctgagtg

SEQ ID NO: 161935 - DNA, 1061 bp, Homo sapiens; identical to SEQ ID NO: 161934
  Payload ID: 11638
  Gene Symbol: OR10A3
  Gene Name: olfactory receptor, family 10, subfamily A, member 3
  Uniprot ID: P58181
  ENST ID: ENST00000612788
  CDS Start-End: 75-1019

SEQ ID NO: 161936 - DNA, 1061 bp, Homo sapiens; identical to SEQ ID NO: 161934
  Payload ID: 11638
  Gene Symbol: OR10A3
  Gene Name: olfactory receptor, family 10, subfamily A, member 3
  Uniprot ID: P58181
  ENST ID: ENST00000626843
  CDS Start-End: 75-1019

SEQ ID NO: 161937 - DNA, 995 bp, Homo sapiens
  Payload ID: 11639
  Gene Symbol: OR10A4
  Gene Name: olfactory receptor, family 10, subfamily A, member 4
  Uniprot ID: Q9H209
  ENST ID: ENST00000379829
  CDS Start-End: 24-971
ccagtgaagtcctgggcagaagaatgatgtgggaaaactggacaattgtcagtgaatttgttctcgtgagcttctcagccctgtccactgagcttcaggctctactgtttctccttttcttgaccatttacttggttactttaatgggcaatgtcctcatcatcctggtcactatagctgactctgcactacaaagtcctatgtacttcttcctcagaaacttgtccttcctggagataggtttcaacttggtcattgtgcccaagatgctggggaccctgatcattcaagacacaaccatctccttccttggatgtgccactcagatgtatttcttcttcttttttggggctgctgagtgctgcctcctggccaccatggcatatgaccgctacgtggccatctgtgaccccttgcactacccagtcatcatgggccacatatcctgtgcccagctggcagctgcctcttggttctcagggttttcagtggccactgtgcaaaccacatggattttcagtttccctttttgtggccccaacagggtgaaccacttcttctgtgacagccctcctgttattgcactggtctgtgctgacacctctgtgtttgaactggaggctctgacagccactgtcctattcattctctttcctttcttgctgatcctgggatcctatgtccgcatcctctccactatcttcaggatgccgtcagctgaggggaaacatcaggcattctccacctgttccgcccacctcttggttgtctctctcttctatagcactgccatcctcacgtatttccgaccccaatccagtgcctcttctgagagcaagaagctgctgtcactctcttccacagtggtgactcccatgttgaaccccatcatctacagctcaaggaataaagaagtgaaggctgcactgaagcggcttatccacaggaccctgggctctcagaaactatgattggcttagatggaaactgaaggg

SEQ ID NO: 161938 - DNA, 1054 bp, Homo sapiens
  Payload ID: 11640
  Gene Symbol: OR10A5
  Gene Name: olfactory receptor, family 10, subfamily A, member 5
  Uniprot ID: Q9H207
  ENST ID: ENST00000299454
  CDS Start-End: 32-985
ggaccacagctggggatttatgcccatacttatggctataggaaactggacagaaataagtgaatttatcctcatgagcttctcttccctacctactgaaatacagtcattgctcttcctgacatttctaactatctatttggttactctgaagggaaacagcctcatcattctggttaccctagctgaccccatgctacacagccccatgtacttcttcctcagaaacttatctttcctggagattggcttcaacctagtcattgtgcccaaaatgctggggaccctgcttgcccaggacacaaccatctccttccttggctgtgccactcagatgtatttcttcttcttctttggggtagctgaatgcttcctcctggctaccatggcatatgaccgctatgtggccatctgcagtcccttgcactacccagtcatcatgaaccaaaggacacgggccaaactggctgctgcttcctggttcccaggctttcctgtagctactgtgcagaccacatggctcttcagttttccattctgtggcaccaacaaggtgaaccacttcttctgtgacagcccgcctgtgctgaagctggtctgtgcagacacagcactgtttgagatctacgccatcgtcggaaccattctggtggtcatgatcccctgcttgctgatcttgtgttcctatactcgcattgctgctgctatcctcaagatcccatcagctaaagggaagcataaagccttctctacgtgctcctcacacctccttgttgtctctcttttctatatatcttctagcctcacctacttctggcctaaatcaaataattctcctgagagcaagaagttgttatcattatcctacactgttgtgactcccatgttgaaccccattatctacagcttgagaaatagcgaggtgaagaatgccctcagcaggaccttccacaaggtcctagccctcagaaactgtatcccatagaccttaggaagtaaggctaaattctattgaatgacaattagtttcatgtttgggacacctctctgcctc

SEQ ID NO: 161939 - DNA, 945 bp, Homo sapiens; identical to SEQ ID NO: 161874
  Payload ID: 11641
  Gene Symbol: OR10A6
  Gene Name: olfactory receptor, family 10, subfamily A, member 6 (gene/pseudogene)
  Uniprot ID: Q8NH74
  ENST ID: ENST00000309838
  CDS Start-End: 1-945

SEQ ID NO: 161940 - DNA, 951 bp, Homo sapiens
  Payload ID: 11642
  Gene Symbol: OR10A7
  Gene Name: olfactory receptor, family 10, subfamily A, member 7
  Uniprot ID: Q8NGE5
  ENST ID: ENST00000326258
  CDS Start-End: 1-951
atgatctgtgaaaatcacaccagagtcactgaatttattcttcttggttttacaaacaaccccgagatgcaagtttccctctttatttttttcctggccatttatacagtcactttgttgggcaactttcttattgtcacagttaccagtgtggatctcgcacttcaaacacccatgtacttctttcttcaaaatctgtcacttcttgaagtatgtttcaccttggttatggtgccaaaaatgcttgtagatctagtgtccccaaggaaaattatctcttttgtgggctgtggtacccagatgtacttcttcttcttctttggcagttctgaatgtttccttctctccatgatggcttatgatcgctttgtggccatctgtaaccctctccattattcagtcataatgaacaggtccctatgcttgtggatggccataggctcttggatgtccggtgttcctgtgtctatgctacagacagcttggatgatggcccttcctttctgtggaccaaatgccgtggaccactttttctgtgatggtcccccagtgttaaaactagtcacagtggatacaaccatgtatgaaatgcaagcacttgcctccacactcctgtttatcatgtttcccttttgtctcattttggtttcctacacccgcattatcataacaattctgaggatgtcctctgccactggccgccagaaggcattttctacttgttcctcacacctcattgtggtgtccctcttctacggaacagccagtctgacctacctgcggcccaaatcaaaccagtcccctgagagcaagaagctagtgtcattgtcctacactgtcatcacacctatgctaaaccccatcatctacggcctgaggaacaatgaagtgaaaggggctgtcaagaggacaatcactcaaaaagtcttacagaagttagatgtgttttga

SEQ ID NO: 161941 - DNA, 979 bp, Homo sapiens
  Payload ID: 11643
  Gene Symbol: OR10AC1
  Gene Name: olfactory receptor, family 10, subfamily AC, member 1 (gene/pseudogene)
  ENST ID: ENST00000439431
  CDS Start-End: 1-979
atggacagtcccagcaatgccaccgtgccctgtggctttctccttcaaggcttctccgaattcccgcacctgagacccgtgctcttccttttgctgctgggggtgcacctggccaccctgggcgggaacctgctcatcctggtggccgtggcctcgatgccaagccggcagcccatgctgctcttcctgtgccagctgtcagccatcgagctgtgctacacgctggtggtggtgccccgctccctggtcgacctgagcacgccggggccaccgcaggggcagccctatctccttcctgagctgcgcctttcagatgcagatgtttgtggctctgggcggggccgagtgcttcctgctggccgccatggcctatgaccgctacgtggccatctgccacccgttgcgctacgcggccgtggtgacccccgggctgtgcgcgcgactggctctggcctgctgcctcaggggactggcggtgtccgtggggctcacggtggccatcttccacctgcctttctgcggctcccgcctgctgctgcacttcttctgcgacatcacggcgctgctgcacctggcctgcacgcggagctacgccgacgagctgcctctgctgggcgcctgcctggtgctgctgctgctgccctcggtgctcatcctggcctcctatggcgccatcgccgccgccctgcgccgcctgcgctgccccaaaggccggggcaaggccgcctccacctgcgccttgcacctggcagtcaccttcctgcactacggctgcgccaccttcatgtacgtgcggcccagggccagctactccccgcgcctggaccgcaccctggcgctggtctacaccaacgtcacgccgctgctgtgcccactcatctacagcctgcgcaaccgcgagatcaccgccgccctgagcagggtgctggggcgccggcggccaggccaagctccaggcggggatctgcgcgagctctga

SEQ ID NO: 161942 - DNA, 1305 bp, Homo sapiens
  Payload ID: 11644
  Gene Symbol: OR10AD1
  Gene Name: olfactory receptor, family 10, subfamily AD, member 1
  Uniprot ID: Q8NGE0
  ENST ID: ENST00000310248
  CDS Start-End: 96-1049
aattgggcttctgggaccaagtgggtaccttctattaccccacagctatacccttgtgcttttcccatcatctttcctcctcaaacaggccccagatgctaaggaatggcagcatagtgacggaatttatcctcgtgggctttcagcagagctccacttccacacgagcattgctctttgccctcttcttggccctctacagcctcaccatggccatgaatggcctcatcatctttatcacctcctggacagaccccaagctcaacagccccatgtacttcttcctcggccatctgtctctcctggatgtctgcttcatcaccactaccatcccacagatgttgatccacctcgtggtcagggaccacattgtctcctttgtatgttgcatgacccagatgtactttgtcttctgtgttggtgtggccgagtgcatcctcttggctttcatggcctatgaccgttatgttgctatctgctacccacttaactatgtcccgatcataagccagaaggtctgtgtcaggcttgtgggaactgcctggttctttgggctgatcaatggcatctttctcgagtatatttcattccgagagcccttccgcagagacaaccacatagaaagcttcttctgtgaggcccccatagtgattggcctctcttgtggggaccctcagtttagtctgtgggcaatctttgccgatgccatcgtggtaattctcagccccatggtgctcactgtcacttcctatgtgcacatcctggccaccatcctcagcaaagcctcctcctcaggtcgggggaagactttctctacttgtgcctctcacctgactgtggtcatctttctctacacttcagctatgttctcttacatgaacccccacagcacacatgggcctgacaaagacaaacctttctccctcctgtacaccatcattacccccatgtgcaaccccatcatttatagtttccgcaacaaggaaattaaggaggccatggtgagggcacttggaagaaccaggctggcccagccacagtctgtctagcaggaaggccctgaaaggaaagctccttcacctggggaatgggagagttaccccatccccagccctggcagatgagtaactctcctatgctgaaaggctccaggaaagagcgttcatggcttccttggcactagaatcagacctgaaagttcctcctgatgtccaatgtcctgatgttatctctctgacttcacttccacattgttttttcttggaccttcctcgggagaatttcggattttccttagtttttttc

SEQ ID NO: 161943 - DNA, 906 bp, Homo sapiens
  Payload ID: 11645
  Gene Symbol: OR10AG1
  Gene Name: olfactory receptor, family 10, subfamily AG, member 1
  Uniprot ID: Q8NH19
  ENST ID: ENST00000312345
  CDS Start-End: 1-906
atggaatttgttcttttggggttttctgatattcccaatctccactggatgctttttagtatatttttacttatgtatttgatgatcctgatgtgcaatggcatcataatactactaataaaaattcaccccgctctccagactcccatgtatttttttcttagcaatttttcccttttggaaatctgttatgtaacaatcattatcccaagaatgctcatggacatttggactcagaaaggaaatatttctttgtttgcttgtgctacacaaatgtgtttttttcttatgcttggaggcacggagtgtctccttctgacagtgatggcctatgaccgctacgtggctatttgtaagcctttgcagtatcctctagtgatgaaccacaaagtctgcattcagctgataatagcttcctggaccatcacaattcctgtagtaattggggaaacatgccaaattttccttttgcccttttgcggaactaacacaattaatcatttcttttgtgacatcccgccaatactcaagcttgcttgtggaaacatatttgtgaatgagataacagtccatgtagtagcggtggtgtttatcacggtgccatttctgttgattgttgtctcttatggcaaaattatctccaacattttgaaattgtcatcagccagaggaaaggctaaagccttctccacctgctcatctcacctaatagttgtaatcttattctttggagcaggtactatcacttatttacagcccaaaccacatcagtttcaaaggatggggaaactgatttctcttttctacaccattctgattccaactttgaatcctattatatataccctgaggaacaaagatatcatggtggcattgagaaaattactagctaagttattaacatga

SEQ ID NO: 161944 - DNA, 1649 bp, Homo sapiens
  Payload ID: 11646
  Gene Symbol: OR10C1
  Gene Name: olfactory receptor, family 10, subfamily C, member 1 (gene/pseudogene)
  Uniprot ID: Q96KK4
  ENST ID: ENST00000377138
  CDS Start-End: 711-1649
cagaaataagcaattaaggaagttcttgtcatcttttgcctgagcatgttttaaaactagagaaatgctcacccctctaaatagttgaactgtttaatgctataggagcttaaaaagagaggatctttctcattttttttctcctccttgaacactgtgaaatttatggtaaaatgacagaaaaagaagaaagactaagtgaatctggtaactaaagaaagagctggaaaaaagaaaactagagggcaagaggtgataagagaggtcacctcttatcagacaggagacaagttgatggagaaaaagatctgctatgagggaaaattctgtctccagccctgcaggaagaattggaaaatcagaaaagagtgaaaagggagctagactgacttaatcttcagcccaggtaaaactggaaagacagtttaacatgttctttagaatgataggcactatcaggaagagatgaagtcagggattcaggctcagagagacaaatactcatccaggatcccaagagtgagcaagggtggaatatggactccaggcaaggctgcctaatttcaaagtccatgatattctaatagaaagggagatctagtgctgcgatcagatgcagagagaggtcatctttgcccatttcacgattccatagttgtgatttttccttgccatttcttttgtcttccagtcaaaggtatgcaggcaggatgagtgcaaacacctccatggtgactgagtttcttcttctcggcttctcccacctggccgacctccagggcttgctcttctctgtctttctcactatctacctgctgaccgtggcaggcaatttcctcattgtggtgctggtctccactgatgctgccctccagtcccctatgtacttcttcctgcgcaccctctcggccttggagattggctatacgtctgtcacggtccccctgctacttcaccacctccttactggccggcgccacatctctcgctctggatgtgctctccagatgttcttcttcctcttctttggcgccacggagtgctgcctcctggcagccatggcctatgaccgctatgcagccatctgtgaacccctccgctacccactgctgctgagccaccgggtgtgtctacagctagctgggtcggcgtgggcctgtggggtgctggtggggctgggccacacccctttcatcttctctttgcccttctgcggccccaataccatcccgcagttcttctgtgagatccagcctgtcctgcagctggtatgtggagacacctcgcttaatgaactgcagattatcctggcaacagccctcctcatcctctgcccctttggcctcatcctgggctcctacgggcgtatcctcgttaccatcttccggatcccatctgttgcgggccgccgcaaggccttctccacctgctcctcccacctgatcatggtctccctcttctatggcaccgcactctttatctatattcgccctaaggccagctacgatccggccactgaccctctggtgtccctcttctatgctgtggtcacccccatcctcaaccccatcatctacagcctgcggaacacagaggtcaaagctgccctaaagagaaccatccagaaaacggtgcctatggagatttga

SEQ ID NO: 161945 - DNA, 1649 bp, Homo sapiens; identical to SEQ ID NO: 161944
  Payload ID: 11646
  Gene Symbol: OR10C1
  Gene Name: olfactory receptor, family 10, subfamily C, member 1 (gene/pseudogene)
  Uniprot ID: Q96KK4
  ENST ID: ENST00000391549
  CDS Start-End: 711-1649

SEQ ID NO: 161946 - DNA, 1649 bp, Homo sapiens
  Payload ID: 11646
  Gene Symbol: OR10C1
  Gene Name: olfactory receptor, family 10, subfamily C, member 1 (gene/pseudogene)
  Uniprot ID: Q96KK4
  ENST ID: ENST00000455234
  CDS Start-End: 711-1649
cagaaataagcaattaaggaagttcttgtcatcttttgcctgagcatgttttaaaactagagaaatgctcacccctctaaatagttgaactgtttaatgctataggagcttaaaaagagaggatctttctcattttttttctcctccttgaacactgtgaaatttatggtaaaatgacagaaaaagaagaaagactaagtgaatctggtaactaaagaaagagctggaaaaaagaaaactagagggcaagaggtgataagagaggtcacctcttatcagacaggagacaagttgatggagaaaaagatctgctatgagggaaaattctgtctccagccctgcaggaagaattggaaaatcagaaaagagtgaaaagggagctagactgacttaatcttcagcccaggtaaaactggaaagacagtttaacatgttctttagaatgataggcactatcaggaagagatgaagtcagggattcaggctcagagagacaaatactcatccaggatcccaagagtgagcaagggtggaatatggactccaggcaaggctgcctaatttcaaagtccatgatattctaatagaaagggagatctagtgctgcgatcagatgcagagagaggtcatctttgcccatttcacgattccatagttgtgatttttccttgccatttcttttgtcttccagtcaaaggtatgcaggcaggatgagtgcaaacacctccatggtgactgagtttcttcttctcggcttctcccacctggccgacctccagggcttgctcttctctgtctttctcactatctacctgctgaccgtggcaggcaatttcctcattgtggtgctggtctccactgatgctgccctccagtcccctatgtacttcttcctgcgcaccctctcggccttggagattggctatacgtctgtcacggtccccctgctacttcaccacctccttactggccggcgccacatctctcgctctggatgtgctctccagatgttcttcttcctcttctttggcgccacggagtgctgcctcctggcagccatggcctatgaccgctatgcagccatctgtgaacccctccgctacccactgctgctgagccaccgggtgtgtctacagctagctgggtcggcgtgggcctgtggggtgctggtggggctgggccacacccctttcatcttctctttgcccttctgcggccccaataccatcccgcagttcttctgtgagatccagcctgtcctgcagctggtatgtggagacacctcgcttaatgaactgcagattatcctggcaacagccctcctcatcctctgcccctttggcctcatcctgggctcctacgggcgtatcctcgttaccatcttccggatcccatctgttgcgggccgccgcaaggccttctccacctgctcctcccacctgatcgtggtctccctcttctatggcaccgcactctttatctatattcgccctaaggccagctacgatccggccactgaccctctggtgtccctcttctatgctgtggtcacccccatcctcaaccccatcatctacagcctgcggaacacagaggtcaaagctgccctaaagagaaccatccagaaaacggtgcctatggagatttga

SEQ ID NO: 161947 - DNA, 1649 bp, Homo sapiens
  Payload ID: 11646
  Gene Symbol: OR10C1
  Gene Name: olfactory receptor, family 10, subfamily C, member 1 (gene/pseudogene)
  ENST ID: ENST00000428644
  CDS Start-End: 711-1649
cagaaataagcaattaaggaagttcttgtcatcttttgcctgagcatgttttaaaactagagaaatgctcacccctctaaatagttgaactgtttaatgctataggagcttaaaaagagaggatctttctcattttttttctcctccttgaacactgtgaaatttatggtaaaatgacagaaaaagaagaaagactaagtgaatctggtaactaaagaaagagctggaaaaaagaaaactagagggcaagaggtgataagagaggtcacctcttatcagacaggagacaagttgatggagaaaaagatctgctatgagggaaaattctgtctccagccctgcaggaagaattggaaaatcagaaaagagtgaaaagggagctagactgacttaatcttcagcccaggtaaaactggaaagacagtttaacatgttctttagaatgataggcactatcaggaagagatgaagtcagggattcaggctcagagagacaaatactcatccaggatcccaagagtgagcaagggtggaatatggactccaggcaaggctgcctaatttcaaagtccatgatattctaatagaaagggagatctagtgctgcgatcagatgcagagagaggtcatctttgcccatttcacgattccatagttgtgatttttccttgccatttcttttgtcttccagtcaaaggtatgcaggcaggatgagtgcaaacacctccatggtgactgagtttcttcttctcggcttctcccacctggccgacctccagggcttgctcttctctgtctttctcactatctacctgctgaccgtggcaggcaatttcctcattgtggtgctggtctccactgatgctgccctccagtcccctatgtacctcttcctgcgcaccctctcggccttggagattggctatacgtctgtcacggtccccctgctacttcaccacctccttactggccggcgccacatctctcgctctggatgtgctctccagatgttcttcttcctcttctttggcgccacggagtgctgcctcctggcagccatggcctatgaccgctatgcagccatctgtgaacccctccgctacccactgctgctgagccaccgggtgtgtctacagctagctgggtcggcgtgggcctgtggggtgctggtggggctgggccacacccctttcatcttctctttgcccttctgcggccccaataccatccagcagttcttctgtgagatccagcctgtcctgcagctggtatgtggagacacctcgcttaatgaactgcagattatcctggcaacagccctcctcatcctctgcccctttggcctcatcctgggctcctacgggcgtatcctcgttaccatcttccggatcccatctgttgcgggccgccgcaaggccttctccacctgctcctcccacctgatcgtggtctccctcttctatggcaccgcactctttatctatattcgccctaaggccagctacgatccggccactgaccctctggtgtccctcttctatgctgtggtcacccccatcctcaaccccatcatctacagcctgcggaacacagaggtcaaagctgccctaaagagaaccatccagaaaacggtgcctatggagatttga

SEQ ID NO: 161948 - DNA, 1649 bp, Homo sapiens; identical to SEQ ID NO: 161946
  Payload ID: 11646
  Gene Symbol: OR10C1
  Gene Name: olfactory receptor, family 10, subfamily C, member 1 (gene/pseudogene)
  Uniprot ID: Q96KK4
  ENST ID: ENST00000437403
  CDS Start-End: 711-1649

SEQ ID NO: 161949 - DNA, 1649 bp, Homo sapiens; identical to SEQ ID NO: 161946
  Payload ID: 11646
  Gene Symbol: OR10C1
  Gene Name: olfactory receptor, family 10, subfamily C, member 1 (gene/pseudogene)
  Uniprot ID: Q96KK4
  ENST ID: ENST00000457403
  CDS Start-End: 711-1649

SEQ ID NO: 161950 - DNA, 1649 bp, Homo sapiens; identical to SEQ ID NO: 161944
  Payload ID: 11646
  Gene Symbol: OR10C1
  Gene Name: olfactory receptor, family 10, subfamily C, member 1 (gene/pseudogene)
  Uniprot ID: Q96KK4
  ENST ID: ENST00000444197
  CDS Start-End: 711-1649

SEQ ID NO: 161951 - DNA, 1649 bp, Homo sapiens; identical to SEQ ID NO: 161946
  Payload ID: 11646
  Gene Symbol: OR10C1
  Gene Name: olfactory receptor, family 10, subfamily C, member 1 (gene/pseudogene)
  ENST ID: ENST00000503212
  CDS Start-End: 711-1649

SEQ ID NO: 161952 - DNA, 1039 bp, Homo sapiens
  Payload ID: 11646
  Gene Symbol: OR10C1
  Gene Name: olfactory receptor, family 10, subfamily C, member 1 (gene/pseudogene)
  ENST ID: ENST00000552057
  CDS Start-End: 72-1016
tgcccatttcacgattccatagttgtgatttttccttgccatttcttttgtcttccagtcaaaggtatgcaggcaggatgagtgcaaacacctccatggtgactgagtttcttcttctcggcttctcccacctggccgacctccagggcttgctcttctctgtctttctcactatctacctgctgaccgtggcaggcaatttcctcattgtggtgctggtctccactgatgctgccctccagtcccctatgtacttcttcctgcgcaccctctcggccttggagattggctatacgtctgtcacggtccccctgctacttcaccacctccttactggccggcgccacatctctcgctctggatgtgctctccagatgttcttcttcctcttctttggcgccacggagtgctgcctcctggcagccatggcctatgaccgctatgcagccatctgtgaacccctccgctacccactgctgctgagccaccgggtgtgtctacagctagctgggtcggcgtgggcctgtggggtgctggtggggctgggccacacccctttcatcttctctttgcccttctgcggccccaataccatcccgcagttcttctgtgagatccagcctgtcctgcagctggtatgtggagacacctcgcttaatgaactgcagattatcctggcaacagccctcctcatcctctgcccctttggcctcatcctgggctcctacgggcgtatcctcgttaccatcttccggatcccatctgttgcgggccgccgcaaggccttctccacctgctcctcccacctgatcgtggtctccctcttctatggcaccgcactctttatctatattcgccctaaggccagctacgatccggccactgaccctctggtgtccctcttctatgctgtggtcacccccatcctcaaccccatcatctacagcctgcggaacacagaggtcaaagctgccctaaagagaaccatccagaaaacggtgcctatggagatttgaaaagggggcgatagtgacttctg

SEQ ID NO: 161953 - DNA, 1039 bp, Homo sapiens; identical to SEQ ID NO: 161952
  Payload ID: 11646
  Gene Symbol: OR10C1
  Gene Name: olfactory receptor, family 10, subfamily C, member 1 (gene/pseudogene)
  ENST ID: ENST00000552404
  CDS Start-End: 72-1016

SEQ ID NO: 161954 - DNA, 1039 bp, Homo sapiens; identical to SEQ ID NO: 161952
  Payload ID: 11646
  Gene Symbol: OR10C1
  Gene Name: olfactory receptor, family 10, subfamily C, member 1 (gene/pseudogene)
  ENST ID: ENST00000551349
  CDS Start-End: 72-1016

SEQ ID NO: 161955 - DNA, 1039 bp, Homo sapiens; identical to SEQ ID NO: 161952
  Payload ID: 11646
  Gene Symbol: OR10C1
  Gene Name: olfactory receptor, family 10, subfamily C, member 1 (gene/pseudogene)
  ENST ID: ENST00000552782
  CDS Start-End: 72-1016

SEQ ID NO: 161956 - DNA, 1039 bp, Homo sapiens
  Payload ID: 11646
  Gene Symbol: OR10C1
  Gene Name: olfactory receptor, family 10, subfamily C, member 1 (gene/pseudogene)
  ENST ID: ENST00000546473
  CDS Start-End: 72-1016
tgcccatttcacgattccatagttgtgatttttccttgccatttcttttgtcttccagtcaaaggtatgcaggcaggatgagtgcaaacacctccatggtgactgagtttcttcttctcggcttctcccacctggccgacctccagggcttgctcttctctgtctttctcactatctacctgctgaccgtggcaggcaatttcctcattgtggtgctggtctccactgatgctgccctccagtcccctatgtacttcttcctgcgcaccctctcggccttggagattggctatacgtctgtcacggtccccctgctacttcaccacctccttactggccggcgccacatctctcgctctggatgtgctctccagatgttcttcttcctcttctttggcgccacggagtgctgcctcctggcagccatggcctatgaccgctatgcagccatctgtgaacccctccgctacccactgctgctgagccaccgggtgtgtctacagctagctgggtcggcgtgggcctgtggggtgctggtggggctgggccacacccctttcatcttctctttgcccttctgcggccccaataccatcccgcagttcttctgtgagatccagcctgtcctgcagctggtatgtggagacacctcgcttaatgaactgcagattatcctggcaacagccctcctcatcctctgcccctttggcctcatcctgggctcctacgggcgtatcctcgttaccatcttccggatcccatctgttgcgggccgccgcaaggccttctccacctgctcctcccacctgatcatggtctccctcttctatggcaccgcactctttatctatattcgccctaaggccagctacgatccggccactgaccctctggtgtccctcttctatgctgtggtcacccccatcctcaaccccatcatctacagcctgcggaacacagaggtcaaagctgccctaaagagaaccatccagaaaacggtgcctatggagatttgaaaagggggcgatagtgacttctg

SEQ ID NO: 161957 - DNA, 1039 bp, Homo sapiens
  Payload ID: 11646
  Gene Symbol: OR10C1
  Gene Name: olfactory receptor, family 10, subfamily C, member 1 (gene/pseudogene)
  ENST ID: ENST00000550132
  CDS Start-End: 72-1016
tgcccatttcacgattccatagttgtgatttttccttgccatttcttttgtcttccagtcaaaggtatgcaggcaggatgagtgcaaacacctccatggtgactgagtttcttcttctcggcttctcccacctggccgacctccagggcttgctcttctctgtctttctcactatctacctgctgaccgtggcaggcaatttcctcattgtggtgctggtctccactgatgctgccctccagtcccctatgtacctcttcctgcgcaccctctcggccttggagattggctatacgtctgtcacggtccccctgctacttcaccacctccttactggccggcgccacatctctcgctctggatgtgctctccagatgttcttcttcctcttctttggcgccacggagtgctgcctcctggcagccatggcctatgaccgctatgcagccatctgtgaacccctccgctacccactgctgctgagccaccgggtgtgtctacagctagctgggtcggcgtgggcctgtggggtgctggtggggctgggccacacccctttcatcttctctttgcccttctgcggccccaataccatccagcagttcttctgtgagatccagcctgtcctgcagctggtatgtggagacacctcgcttaatgaactgcagattatcctggcaacagccctcctcatcctctgcccctttggcctcatcctgggctcctacgggcgtatcctcgttaccatcttccggatcccatctgttgcgggccgccgcaaggccttctccacctgctcctcccacctgatcgtggtctccctcttctatggcaccgcactctttatctatattcgccctaaggccagctacgatccggccactgaccctctggtgtccctcttctatgctgtggtcacccccatcctcaaccccatcatctacagcctgcggaacacagaggtcaaagctgccctaaagagaaccatccagaaaacggtgcctatggagatttgaaaagggggcgatagtgacttctg

SEQ ID NO: 161958 - DNA, 1039 bp, Homo sapiens; identical to SEQ ID NO: 161956
  Payload ID: 11646
  Gene Symbol: OR10C1
  Gene Name: olfactory receptor, family 10, subfamily C, member 1 (gene/pseudogene)
  ENST ID: ENST00000550017
  CDS Start-End: 72-1016

SEQ ID NO: 161959 - DNA, 1039 bp, Homo sapiens; identical to SEQ ID NO: 161956
  Payload ID: 11646
  Gene Symbol: OR10C1
  Gene Name: olfactory receptor, family 10, subfamily C, member 1 (gene/pseudogene)
  ENST ID: ENST00000622521
  CDS Start-End: 72-1016

SEQ ID NO: 161960 - DNA, 939 bp, Homo sapiens
  Payload ID: 11646
  Gene Symbol: OR10C1
  Gene Name: olfactory receptor, family 10, subfamily C, member 1 (gene/pseudogene)
  ENST ID: ENST00000623086
  CDS Start-End: 1-939
atgagtgcaaacacctccatggtgactgagtttcttcttctcggcttctcccacctggccgacctccagggcttgctcttctctgtctttctcactatctacctgctgaccgtggcaggcaatttcctcattgtggtgctggtctccactgatgctgccctccagtcccctatgtacttcttcctgcgcaccctctcggccttggagattggctatacgtctgtcacggtccccctgctacttcaccacctccttactggccggcgccacatctctcgctctggatgtgctctccagatgttcttcttcctcttctttggcgccacggagtgctgcctcctggcagccatggcctatgaccgctatgcagccatctgtgaacccctccgctacccactgctgctgagccaccgggtgtgtctacagctagctgggtcggcgtgggcctgtggggtgctggtggggctgggccacacccctttcatcttctctttgcccttctgcggccccaataccatcccgcagttcttctgtgagatccagcctgtcctgcagctggtatgtggagacacctcgcttaatgaactgcagattatcctggcaacagccctcctcatcctctgcccctttggcctcatcctgggctcctacgggcgtatcctcgttaccatcttccggatcccatctgttgcgggccgccgcaaggccttctccacctgctcctcccacctgatcatggtctccctcttctatggcaccgcactctttatctatattcgccctaaggccagctacgatccggccactgaccctctggtgtccctcttctatgctgtggtcacccccatcctcaaccccatcatctacagcctgcggaacacagaggtcaaagctgccctaaagagaaccatccagaaaacggtgcctatggagatttga

SEQ ID NO: 161961 - DNA, 1030 bp, Homo sapiens
  Payload ID: 11647
  Gene Symbol: OR10D3
  Gene Name: olfactory receptor, family 10, subfamily D, member 3 (non-functional)
  Uniprot ID: Q8NH80
  ENST ID: ENST00000318666
  CDS Start-End: 55-993
caaggcattcttccatgtcctcagcctcctctttccttcctaggactggcttccatggaggtgaagaactgctgcatggtgacagagttcatccttttgggaatcccacacacagaggggctggagatgacactttttgtcttattcttgcccttctatgcctgcactctactgggaaatgtgtctatccttgttgctgttatgtcttctgctcgccttcacacacctatgtatttcttcctgggaaacttgtctgtgtttgacatgggtttctcctcagtgacttgtcccaaaatgctgctctaccttatggggctgagccgactcatctcctacaaagactgtgtctgccagcttttcttcttccatttcctcgggagcattgagtgcttcttgtttacggtgatggcctatgaccgcttcactgccatctgttatcctctgcgatacacagtcatcatgaacccaaggatctgtgtggccctggctgtgggcacatggctgttagggtgcattcattccagtatcttgacctccctcaccttcaccttgccatactgtggtcccaatgaagtggatcacttcttctgtgacattccagcactgttgcccttggcctgtgctgacacatccttagcccagagggtgagcttcaccaacgttggcctcatatctcttgtctgctttctgctaattcttttatcctacactagaatcacaatatctatcttaagcattcgtacaactgagggccgtcgccgtgccttctccacctgcagtgctcacctcattgccatcctctgtgcctatgggcccatcatcactgtctacctgcagcccacacccaaccccatgctgggaaccgtggtacaaattctcatgaatctggtaggaccaatgctgaaccctttgatctataccttgaggaataaggaagtaaaaacagccctgaaaacaatattgcacaggacaggccatgttcctgagagttagtaagagcagataaatgggtgcatggctctggaattcc

SEQ ID NO: 161962 - DNA, 1105 bp, Homo sapiens
  Payload ID: 11648
  Gene Symbol: OR10G2
  Gene Name: olfactory receptor, family 10, subfamily G, member 2
  Uniprot ID: Q8NGC3
  ENST ID: ENST00000542433
  CDS Start-End: 99-1031
ggcatcaatcatccgacaaaagcattcacttacaacatcattgtgctgtgtttctcttgtcaaacgtcaccattcatcttagcagactacaaaaagacatgggaaagaccaaaaacacatcgctggatgccgtggtgacagatttcattcttctgggtttgtctcaccccccaaatctaagaagcctcctcttcctggtcttcttcatcatttacatcctcactcagctggggaacctgctcattctgctcaccatgtgggctgacccgaagctctgtgctcgccccatgtacattcttctgggagtgctctcattcctggacatgtggctctcctcagtcaccgttcctctgcttattttggattttactccttccatcaaggctatcccgtttggtggctgtgtggctcaactgtatttctttcacttcctgggcagcacccagtgcttcctctacaccttgatggcctatgacaggtacctggcaatatgtcagcccctgcgctacccagtgctcatgaatgggaggttatgcacagtccttgtggctggagcttgggtcgccggctccatgcatgggtctatccaggccaccttgaccttccgcctgccctactgtgggcccaatcaggtggattactttatctgtgacatccccgcagtattgagactggcctgtgctgacacaactgtcaatgagcttgtgacctttgtggacgtcggggtagtggccgccagttgcttcatgttaattctgctctcgtatgccaacatagtaaatgccatcctgaagatacgcaccactgatgggaggcgccgggccttctccacctgtggctcccacctaatcgtggtcacagtctactatgtcccctgtattttcatctaccttagggctggctccaaagaccccctggatggggcagcggctgtgttttacactgttgtcactccattactgaaccccctcatctatacactgaggaaccaggaagtgaagtctgccctgaagaggataacagcaggttgaaggactgaatgaaaataagtaactacatctgcatcattatcactgccactctcttcagctactgctgcatgtga

SEQ ID NO: 161963 - DNA, 942 bp, Homo sapiens
  Payload ID: 11649
  Gene Symbol: OR10G3
  Gene Name: olfactory receptor, family 10, subfamily G, member 3
  Uniprot ID: Q8NGC4
  ENST ID: ENST00000303532
  CDS Start-End: 1-942
atggaaagaatcaacagcacactgttgactgcgtttatcctgacaggaattccgtatccactcaggctaaggacactcttttttgtgttcttttttctaatctacatcctgactcagctgggaaacctgcttattttaatcactgtctgggcagacccaaggctccatgcccgccccatgtacatctttcttggtgttctctcagtcattgatatgagcatctcctccatcattgtccctcgcctcatgatgaacttcactttaggtgtcaaacccatcccatttggtggctgtgttgctcaactctatttctatcacttcctgggcagcacccagtgcttcctctacaccctaatggcctatgacaggtacctggcaatatgtcagcccctgcgctaccctgtgctcatgactgctaagctgagcgccttgcttgtggctggagcctggatggcaggatccatccatggggctctccaggccatcctaaccttccgcctgccctactgtgggcccaatcaggtggattacttcttctgtgacatccctgcagtgttgagactggcctgtgctgacacaacagtcaacgagctggtgacgtttgtagacattggggtggtggttgccagttgcttctccctgatcctcctctcctacatacagatcattcaggccatcctgagaatccacacagctgatgggcggcgccgggctttttcaacttgtggagcccatgtaaccgtggtcaccgtgtactatgtgccctgtgccttcatctacctgaggcctgaaaccaacagccccctggatggggcagctgccctagtccccacggccatcactcctttcctcaacccccttatctacactctgcggaaccaagaggtgaagctggccctgaaaagaatgctcagaagcccaagaactccgagtgaggtttga

SEQ ID NO: 161964 - DNA, 936 bp, Homo sapiens
  Payload ID: 11650
  Gene Symbol: OR10G4
  Gene Name: olfactory receptor, family 10, subfamily G, member 4
  Uniprot ID: Q8NGN3
  ENST ID: ENST00000320891
  CDS Start-End: 1-936
atgtccaacgccagcctcgtgacagcattcatcctcacaggccttccccatgccccagggctggacgccctcctctttggaatcttcctggtggtttacgtgctcactgtgctggggaacctcctcatcctgctggtgatcagggtggattctcacctccacacccccatgtactacttcctcaccaacctgtccttcattgacatgtggttctccactgtcacggtgcccaaaatgctgatgaccttggtgtccccaagcggcagggctatctccttccacagctgcgtggctcagctctattttttccacttcctggggagcaccgagtgtttcctctacacagtcatgtcctatgatcgctacttggccatcagttacccgctcaggtacaccagcatgatgagtgggagcaggtgtgccctcctggccaccggcacttggctcagtggctctctgcactctgctgtccagaccatattgactttccatttgccctactgtggacccaaccagatccagcactacttctgtgacgcaccgcccatcctgaaactggcctgtgcagacacctcagccaacgtgatggtcatctttgtggacattgggatagtggcctcaggctgctttgtcctgatagtgctgtcctatgtgtccatcgtctgttccatcctgcggatccgcacctcagatgggaggcgcagagcctttcagacctgtgcctcccactgtattgtggtcctttgcttctttgttccctgtgttgtcatttatctgaggccaggctccatggatgccatggatggagttgtggccattttctacactgtgctgacgccccttctcaaccctgttgtgtacaccctgagaaacaaggaggtgaagaaagctgtgttgaaacttagagacaaagtagcacatcctcagaggaaataa

SEQ ID NO: 161965 - DNA, 999 bp, Homo sapiens
  Payload ID: 11651
  Gene Symbol: OR10G6
  Gene Name: olfactory receptor, family 10, subfamily G, member 6
  Uniprot ID: Q8NH81
  ENST ID: ENST00000307002
  CDS Start-End: 1-999
atgttagagggtgttgagcatctccttctgctacttcttttgacagatgtgaacagcaaggaactgcaaagtggaaaccagacttctgtgtctcacttcattttggtgggcctgcaccacccaccacagctgggagcgccactcttcttagctttccttgtcatctatctcctcactgtttctggaaatgggctcatcatcctcactgtcttagtggacatccggctccatcgtcccatgtgcttgttcctgtgtcacctctccttcttggacatgaccatttcttgtgctattgtccccaagatgctggctggctttctcttgggtagtaggattatctcctttgggggctgtgtaatccaactattttctttccatttcctgggctgtactgagtgcttcctttacacactcatggcttatgaccgtttccttgccatttgtaagcccttacactatgctaccatcatgacccacagagtctgtaactccctggctttaggcacctggctgggagggactatccattcacttttccaaacaagttttgtattccggctgcccttctgtggccccaatcgggtcgactacatcttctgtgacattcctgccatgctgcgtctagcctgcgccgatacggccatcaacgagctggtcacctttgcagacattggcttcctggccctcacctgcttcatgctcatcctcacttcctatggctatattgtagctgccatcctgcgaattccgtcagcagatgggcgccgcaatgccttctccacttgtgctgcccacctcactgttgtcattgtttactatgtgccctgcaccttcatttacctgcggccttgttcacaggagcccctggatggggtggtagctgtcttttacactgtcatcactcccttgcttaactccatcatctacacactgtgcaacaaagaaatgaaggcagcattacagaggctagggggccacaaggaagtgcagcctcactga

SEQ ID NO: 161966 - DNA, 945 bp, Homo sapiens
  Payload ID: 11652
  Gene Symbol: OR10G7
  Gene Name: olfactory receptor, family 10, subfamily G, member 7
  Uniprot ID: Q8NGN6
  ENST ID: ENST00000330487
  CDS Start-End: 10-945
tgagaagaaatgtccaacgccaccctactgacagcgttcatcctcacgggccttccccatgccccagggctggacgcccccctctttggaatcttcctggtggtttacgtgctcactgtgctggggaacctcctcatcctgctggtgatcagggtggattctcacctccacacccccatgtactacttcctcaccaacctgtccttcattgacatgtggttctccactgtcacggtgcccaaaatgctgatgaccttggtgtccccaagcggcaggactatctccttccacagctgcgtggctcagctctattttttccacttcctggggagcaccgagtgtttcctctacacagtcatgtcctatgatcgctacctggccatcagttacccgctcaggtacaccaacatgatgactgggcgctcgtgtgccctcctggccaccggcacttggctcagtggctctctgcactctgctgtccagaccatattgactttccatttgccctactgtggacccaaccagatccagcactacttctgtgacgcaccgcccatcctgaaactggcctgtgcagacacctcagccaacgagatggtcatctttgtgaatattgggctagtggcctcgggctgctttgtcctgatagtgctgtcctatgtgtccatcgtctgttccatcctgcggatccgcacctcagaggggaggcacagagcctttcagacctgtgcctcccactgtatcgtggtcctttgcttctttggccctggtcttttcatttacctgaggccaggctccagggacgccttgcatggggttgtggccgttttctacaccacgctgactcctcttttcaaccctgttgtgtacaccctgagaaacaaggaggtaaagaaagctctgttgaagctgaaaaatgggtcagtatttgctcagggtgaatag

SEQ ID NO: 161967 - DNA, 1045 bp, Homo sapiens
  Payload ID: 11653
  Gene Symbol: OR10G8
  Gene Name: olfactory receptor, family 10, subfamily G, member 8
  Uniprot ID: Q8NGN5
  ENST ID: ENST00000431524
  CDS Start-End: 34-969
tcccagagggagagagaccaagggtgagaagaaatgtccaacgccagcctactgacagcgttcatcctcatgggccttccccatgccccagcgctggacgcccccctctttggagtcttcctggtggtttacgtgctcactgtgctggggaacctcctcatcctgctggtgatcagggtggattctcacctccacaccaccatgtactacttcctcaccaacctgtcgttcattgacatgtggttctccactgtcacggtgcccaaattgctgatgactttggtgttcccaagtggcagggctatctccttccacagctgcatggctcagctctatttctttcacttcctagggggcaccgagtgtttcctctacagggtcatgtcctgtgatcgctacctggccatcagttacccgctcaggtacaccagcatgatgactgggcgctcgtgtactcttctggccaccagcacttggctcagtggctctctgcactctgctgtccaggccatattgactttccatttgccctactgtggacccaactggatccagcactatttgtgtgatgcaccgcccatcctgaaactggcctgtgcagacacctcagccatagagactgtcatttttgtgactgttggaatagtggcctcgggctgctttgtcctgatagtgctgtcctatgtgtccatcgtctgttccatcctgcggatccgcacctcagaggggaagcacagagcctttcagacctgtgcctcccactgtatcgtggtcctttgcttctttggccctggtcttttcatttacctgaggccaggctccaggaaagctgtggatggagttgtggccgttttctacactgtgctgacgccccttctcaaccctgttgtgtacaccctgaggaacaaggaggtgaagaaagctctgttgaagctgaaagacaaagtagcacattctcagagcaaatagacactagggaagattacatatcttagctcttgtgaatagtgctgtgaaaaacatacaggggcaggtatcttttgga

SEQ ID NO: 161968 - DNA, 936 bp, Homo sapiens
  Payload ID: 11654
  Gene Symbol: OR10G9
  Gene Name: olfactory receptor, family 10, subfamily G, member 9
  Uniprot ID: Q8NGN4
  ENST ID: ENST00000375024
  CDS Start-End: 1-936
atgtccaagaccagcctcgtgacagcgttcatcctcacgggccttccccatgccccagggctggacgccccactctttggaatcttcctggtggtttacgtgctcactgtgctggggaacctcctcatcctgctggtgatcagggtggattctcacctccacacccccatgtactacttcctcaccaacctgtccttcattgacatgtggttctccactgtcacggtgcccaaaatgctgatgaccttggtgtccccaagcggcagggctatctccttccacagctgcgtggctcagctctattttttccacttcctggggagcaccgagtgtttcctctacacagtcatgtcctatgatcgctacttggccatcagttacccgctcaggtacaccagcatgatgagtgggagcagatgtgccctcctggccaccagcacttggctcagtggctctctgcactctgctgtccagaccatattgactttccatttgccctactgtggacccaaccagatccagcactatttgtgtgatgcaccgcccatcctgaaactggcctgtgcagacacctcagccaacgagatggtcatctttgtggacattgggctagtggcctcgggctgctttctcctgatagtgctgtcttatgtgtccatcgtctgttccatcctgcggatccacacctcagaggggaggcacagagcctttcagacctgtgcctcccactgcatcgtggtcctttgcttttttgttccctgtgttttcatttacctgagaccaggctccagggacgtcgtggatggagttgtggccattttctacactgtgctgacaccccttctcaaccctgttgtgtacaccctgagaaacaaggaggtgaagaaagctgtgttgaaactgagagacaaagtagcacattctcagggagaataa

SEQ ID NO: 161969 - DNA, 1124 bp, Homo sapiens
  Payload ID: 11655
  Gene Symbol: OR10H1
  Gene Name: olfactory receptor, family 10, subfamily H, member 1
  Uniprot ID: Q9Y4A9
  ENST ID: ENST00000334920
  CDS Start-End: 90-1046
ggcaaatccaggtatggggaaggctgagaacttttcttcatgcagtaactgacatctccctgtcacatctcaccccaggcacagcctccatgcagagagccaatcactccacagtgacccaattcatcctcgtcggcttctctgtcttcccccacctccagctgatgctcttcctgctgttcctgctgatgtacctgttcacgctgctgggcaacctgctcatcatggccaccgtctggagcgagcgcagcctccacacgcccatgtacctcttcctgtgcgccctctccgtctccgagatcctctacaccgtggccatcatcccgcgcatgctggccgacctgctgtccacccagcgctccatcgccttcctggcctgtgccagtcagatgttcttctccttcagcttcggcttcacccactccttcctgctcaccgtcatgggctacgaccgctacgtggccatctgccaccccctgcgctacaacgtgctcatgagcccgcggggctgcgcctgcctggtgggctgctcctgggctggtggcttggtcatggggatggtggtgacctcggccattttccacctcgccttctgtggacacaaggagatccaccattttgcttgccatgtgccacctctgttgaagttggcctgtggagacgatgtgctggtggtggccaaaggcgtgggcttggtgtgtatcacggccctgctgggctgttttctcctcatcctcctctcctatgccttcatcgtggccgccatcttgaagatcccttctgctgaaggtcggaacaaggccttctccacctgtgcctctcacctcactgtggtggtcgtgcactatggctttgcctccgtcatttacctgaagcccaaaagtccccagtctctggaaggagacaccttgatgggcatcacctacacggtcctcacacccttcctcagccccatcatcttcagcctcaggaacaaggagctgaaggtcgccatgaagaagaccttcttcagtaaactctacccagaaaaaaatgtaatgatgtaggagaaattcactgggaacaactaaattggattaccgaaggctattgttaaaaattacgttccgtggtgactcatgcct

SEQ ID NO: 161970 - DNA, 1041 bp, Homo sapiens
  Payload ID: 11656
  Gene Symbol: OR10H2
  Gene Name: olfactory receptor, family 10, subfamily H, member 2
  Uniprot ID: O60403
  ENST ID: ENST00000305899
  CDS Start-End: 25-972
cttccccaactaggggtggccgtcatgctggggctaaaccacacctccatgtctgaattcatcctcgtcggcttctctgccttcccccacctccaactgatgctcttcctgctgttcctgctgatgtacctgttcacgctgctgggcaacctgctcatcatggccaccgtctggagcgagcgcagcctccacacgcccatgtacctcttcctgtgcgtcctctcagtctccgagatcctctacaccgtggccatcatcccgcgcatgctggccgacctgctgtccacccagcgctccatcgccttcctggcctgtgccagtcagatgttcttctccttcagcttcggcttcacccactccttcctgctcaccgtcatgggctacgaccgctacgtggccatctgccaccccctgcgctacaacgtgctcatgagcccacggggctgcgcctgcctggtgggctgctcctgggctggtggctcggtcatggggatggtggtgacctcggccattttccaactgactttctgtggatcccatgagatccagcattttttatgtcatgtgccacctctgttgaagttggcctgtggaaataatgtaccagctgtggccctgggcgtgggcttggtatgtatcatggcactgctgggctgttttctcctcatcctcctctcctatgccttcatcgtggccgacatcttgaagatcccttctgctgaaggtcggaacaaggccttctccacctgtgcctctcaccttattgtggtcattgtgcactatggctttgcctctgtcatctacctcaagcccaaaggtccccactctcaggagggtgacaccctgatggccaccacctacgcagtcctcacgcccttcctcagccccatcatcttcagcctcaggaacaaagaactgaaggttgccatgaagaggaccttcctcagcacactctattcctcaggcacctgagtagctggtgtggaagtgctgatagaatatgataggaggatgaccatcaccttgtctgcacagtgtggc

SEQ ID NO: 161971 - DNA, 951 bp, Homo sapiens
  Payload ID: 11657
  Gene Symbol: OR10H3
  Gene Name: olfactory receptor, family 10, subfamily H, member 3
  Uniprot ID: O60404
  ENST ID: ENST00000305892
  CDS Start-End: 1-951
atgcctggtcagaactacagaaccatatctgaatttatcctctctggcttctcagccttcccccagcagctcctgcctgtcttgttcctgctgtacctcctgatgttcctgttcacattgcttggcaaccttcttatcatggccacagtttggattgaacgcagactccacacacccatgtacctcttcttgtgtgccctctccatctctgagattctgttcactgttgccatcacccctcgcatgctggctgatctgctcttcacccatcgttccatcacctttgtggcttgtgccattcagatgttcttctccttcatgtttggcttcactcactccttccttctcatggtcatgggctatgatcactacgtgaccatctgccacccactgcattacaacatgctaatgagtccccgtggctgtgcccatcttgtggcctggacctgggctggtggctcggtcatggggatgatggtgacaatgatggtttttcacctcactttctgtgggtctaatgtgatccaccattttctctgtcatgtgctttccctcttgaagttggcctgtgggagcaagacatcatctgtcatcatgggtgtgatgctggtgtgtgtcacagccctgataggctgtttgttcctcatcatcctctcctttgtcttcattgtggctgccatcttgaggattccttctgctgagggccggcacaagactttctccacttgtgtatcccacctcactgtggtggtcatgcactatagttttgcctcccttatctacctcaaacccaagggcctccattctatgtacagtgatgccttgatggccaccacctatactgtcttcacccccttcctcagcccaatcattttcagtctaaggaacaaggagctgaagaatgccataaataaaaacttttgcagaaggttctgccctctaagctcctaa

SEQ ID NO: 161972 - DNA, 951 bp, Homo sapiens
  Payload ID: 11658
  Gene Symbol: OR10H4
  Gene Name: olfactory receptor, family 10, subfamily H, member 4
  Uniprot ID: Q8NGA5
  ENST ID: ENST00000322107
  CDS Start-End: 1-951
atgcctagtcagaactatagcatcatatctgaatttaacctctttggcttctcagccttcccccagcacctcctgcccatcttgttcctgctgtacctcctgatgttcctgttcacattgctgggcaaccttctcatcatggccacaatctggattgaacacagactccacacacccatgtacctcttcttgtgcaccctctccgtctctgagattctgttcactgttgccatcacccctcgcatgctggctgatctgctttccacccatcattccatcacctttgtggcttgtgccaaccagatgttcttctccttcatgtttggcttcactcactccttccttctcctggtcatgggctatgatcgctatgtggccatctgccacccactgcgttacaatgtgctcatgagcccccgtgactgtgcccatcttgtggcctgtacctgggctggtggctcagtcatggggatgatggtgacaacgatagttttccacctcactttctgtgggtctaatgtgatccaccattttttctgtcatgtgctttccctcttgaagttggcctgtgaaaacaagacatcatctgtcatcatgggtgtgatgctggtgtgtgtcacagccctgataggctgtttattcctcatcatcctctcctatgtcttcattgtggctgccatcttgaggattccctctgccgaaggccggcacaagacattttctacgtgtgtatcccacctcactgtggtggtcacgcactatagttttgcctcctttatctacctcaagcccaagggcctccattctatgtacagtgacgccttgatggccaccacctatactgtcttcacccccttccttagcccaatcattttcagcctaaggaacaaggagctgaagaatgccataaataaaaacttttacagaaaattctgtcctccaagttcctga

SEQ ID NO: 161973 - DNA, 1132 bp, Homo sapiens
  Payload ID: 11659
  Gene Symbol: OR10H5
  Gene Name: olfactory receptor, family 10, subfamily H, member 5
  Uniprot ID: Q8NGA6
  ENST ID: ENST00000308940
  CDS Start-End: 99-1046
cgctctcagatgtcctcccaggtgggagtcactagacacccctgtgctcctaaccactgggtcttctttcctctctccaccaactaggggtggccgccatgcaggggctaaaccacacctccgtgtctgaattcatcctcgttggcttctctgccttcccccacctccagctgatgctcttcctgctgttcctgctgatgtacctgttcacgctgctgggcaacctgctcatcatggccactgtctggagcgagcgcagcctccacatgcccatgtacctcttcctgtgtgccctctccatcaccgagatcctctacaccgtggccatcatcccgcgcatgctggccgacctgctgtccacccagcgctccatcgccttcctggcctgtgccagtcagatgttcttctccttcagcttcggcttcacccactccttcctgctcactgtcatgggctacgaccgctacgtggccatctgccaccccctgcgttacaacgtgctcatgagcctgcggggctgcacctgccgggtgggctgctcctgggctggtggcttggtcatggggatggtggtgacctcggccattttccacctcgccttctgtggacacaaggagatccaccatttcttctgccacgtgccacctctgttgaagttggcctgtggagatgatgtgctggtggtggccaaaggcgtgggcttggtgtgtatcacggccctgctgggctgttttctcctcatcctcctctcctatgccttcatcgtggccgccatcttgaagatcccttctgctgaaggtcggaacaaggccttctccacctgtgcctctcacctcactgtggtggtcgtgcactatggctttgcctccgtcatttacctgaagcccaaaggtccccagtctccggaaggagacaccttgatgggcatcacctacacggtcctcacacccttcctcagccccatcatcttcagcctcaggaacaaggagctgaaggtcgccatgaagaagacttgcttcaccaaactctttccacagaactgctgaaatggctgactttctctcaagagatgtagcgaatgggaacactttagtcttcctcctttatttcttttcctttcctccctccctcc

SEQ ID NO: 161974 - DNA, 1090 bp, Homo sapiens
  Payload ID: 11660
  Gene Symbol: OR10J1
  Gene Name: olfactory receptor, family 10, subfamily J, member 1
  Uniprot ID: P30954
  ENST ID: ENST00000423932
  CDS Start-End: 38-1000
tgtgcttctactgctttactgggactatgtgacttttatgcttttatgtttcagatttgggaaccaatccatgaaaagagagaactttactctcatcactgactttgttttccaaggtttctctagcttccatgagcagcagatcaccctttttggcgtgttccttgcactatacatcttaaccttagcaggcaatatcatcattgtgaccatcatccgaatggatcttcatcttcacacacccatgtacttcttcctgagcatgctgtccacttcagagactgtatatacattggtcattctcccaagaatgctctccagcctcgtaggtatgagccagcccatatcattggcagggtgtgccacacagatgttcttttttgtaacctttggcatcactaactgcttcctgctcacagcaatgggatatgaccgctatgtggccatctgcaaccccctgagatacatggttattatgaacaagaggctgcgtatccaacttgtcctgggggcctgcagcattgggctgattgtagcaataacgcaagtgacatctgtattcaggttacccttctgtgctagaaaggtgccccacttcttctgtgacatccgccctgtgatgaagctctcctgcattgacaccactgtcaatgaaatcctgactttgattatcagtgtgctggtgcttgttgtacctatgggtctggttttcatttcttatgttctcattatctctacaatcctcaagattgcttcagttgagggccggaagaaggcttttgccacctgtgcatcccacctcactgtggtcattgtccactacagctgtgcctccattgcctacctcaagcccaagtcagagaacaccagagaacatgaccagctgatctcggtgacctacactgtcatcactcccctactgaaccctgtggtatacaccctgagaaataaagaggtcaaagatgctctgtgcagggctgttggtgggaagttttcctgaccatgtaggaagagttctcctgaggctgtcaacatccacactaggcaggaatatgaggtgtaaactcacaaacacttggctcctagagac

SEQ ID NO: 161975 - DNA, 990 bp, Homo sapiens
  Payload ID: 11661
  Gene Symbol: OR10J3
  Gene Name: olfactory receptor, family 10, subfamily J, member 3
  Uniprot ID: Q5JRS4
  ENST ID: ENST00000332217
  CDS Start-End: 1-990
atgccaaagctaaattccacttttgtgactgagttcctctttgaaggtttctccagcttcaggcggcagcacaaacttgtcttctttgttgtcttcctaactttgtacctgctgactctctctggcaatgtgattatcatgaccattattcgcctggaccatcatcttcacacccccatgtacttcttcctgtgcatgctatccatctctgagacctgctacactgtggccatcattccccatatgctttctggtctcttgaatcctcatcagcccattgccacccaaagctgtgccactcagctcttcttctatctcacctttggcatcaacaactgcttcctgctcacagtcatgggatatgaccgctatgtggccatctgcaaccccctaaggtattcagtcatcatgggtaagagggcctgtatccaactggcctctggatcactggggattggccttggcatggccattgtccaagtaacatctgtgtttggcctgccattctgtgatgcctttgtcatctcccacttcttctgtgatgtgagacacctgctgaagctggcctgcacagacaccactgtcaatgagataatcaactttgttgtcagcgtctgtgtccttgttctacctatgggcctggtctttatctcctatgtcctcatcatctccaccattcttaagattgcctcagctgaaggtcagaagaaggcctttgccacctgcgcctcccacctcacagtggtcatcatccactatggctgtgcctccatcatctacctgaagcctaagtcccagagttccctgggacaggacagactcatctcagtgacctacactcatcactcccctactgaaccctgttgtgtacagcctgaagaacaaggaggtcaaagatgctctgcacagagccgtggggcaaaaaactctgtctccttaatgaagagaggttgtgaaggcttttcctttgcgtttataaatatgtactaa

SEQ ID NO: 161976 - DNA, 935 bp, Homo sapiens
  Payload ID: 11662
  Gene Symbol: OR10J4
  Gene Name: olfactory receptor, family 10, subfamily J, member 4 (gene/pseudogene)
  ENST ID: ENST00000504970
  CDS Start-End: 1-935
atgccaaggcccaatttcatggctgtgacagagtttacatttgagggtttctccatttttgagtggcatcacagactcatcctctttgtgatctttttggtcttgtacgttttgacccttgccagcaatgctatcatcttgatagttatccgccttaaccatcaacttcacacgcccatgtatttcttcctgagtgtgctgtctatttctgagacctattataccgtggccatcaacccccaaatgctgtccggtctcctcagtcctcaacaaaccatctccatcccaggctgtgccgctcagctctttttctatctcacttttggtgtcaataaatgcttcctgctcacagccatggggtatgaccactatgtggccatctgcaaccctctacagtattcagtcatcatgggcaaaaaggcttgtatacaactggtcagtggatcctggaacattggcctgagcacagctatcattcaggtgtcttctgtattcagccttcccttctgtgatgctaatctcatctcccacttcttttgtgatatccggcccataatgaagcttgcctgtgcagacactactatcaaggagttattactttgctcatcagtctctgtgtccttgttctgcccatggtattgatcttcatctcctatgtcctaattgtcaccaccatcctcaagattgcatcagctgagggcaggagaaaggcctttgctacttgtgcctcacacctcacagtggtcattgtccactatggccgtacttctttcatctacctaaaacccaaatcccaaaattccctgcaggacagacttatctctgtgacatacactgttattactcctctgctgaaccctgttgtatacagcctgaggaacaaagaggtcaaggatgccttgctcagagctttgggcagaaagcctctctcttag

SEQ ID NO: 161977 - DNA, 930 bp, Homo sapiens
  Payload ID: 11663
  Gene Symbol: OR10J5
  Gene Name: olfactory receptor, family 10, subfamily J, member 5
  Uniprot ID: Q8NHC4
  ENST ID: ENST00000334857
  CDS Start-End: 1-930
atgaagagaaagaacttcacagaagtgtcagaattcattttcttgggattttctagctttggaaagcatcagataaccctctttgtggttttcctaactgtctacattttaactctggttgctaacatcatcattgtgactatcatctgcattgaccatcatctccacactcccatgtatttcttcctaagcatgctggctagttcagagacggtgtacacactggtcattgtgccacgaatgcttttgagcctcatttttcataaccaacctatctccttggcaggctgtgctacacaaatgttcttttttgttatcttggccactaataattgcttcctgcttactgcaatggggtatgaccgctatgtggccatctgcagacccctgagatacactgtcatcatgagcaagggactatgtgcccagctggtgtgtgggtcctttggcattggtctgactatggcagttctccatgtgacagccatgttcaatttgccgttctgtggcacagtggtagaccacttcttttgtgacatttacccagtcatgaaactttcttgcattgataccactatcaatgagataataaattatggtgtaagttcatttgtgatttttgtgcccataggcctgatatttatctcctatgtccttgtcatctcttccatccttcaaattgcctcagctgagggccggaagaagacctttgccacctgtgtctcccacctcactgtggttattgtccactgtggctgtgcctccattgcctacctcaagccgaagtcagaaagttcaatagaaaaagaccttgttctctcagtgacgtacaccatcatcactcccttgctgaaccctgttgtttacagtctgagaaacaaggaggtaaaggatgccctatgcagagttgtgggcagaaatatttcttaa

SEQ ID NO: 161978 - DNA, 942 bp, Homo sapiens
  Payload ID: 11664
  Gene Symbol: OR10K1
  Gene Name: olfactory receptor, family 10, subfamily K, member 1
  Uniprot ID: Q8NGX5
  ENST ID: ENST00000289451
  CDS Start-End: 1-942
atggagcaagtcaataagactgtggtgagagagttcgtcgtcctcggcttctcatccctggccaggctgcagcagctgctctttgttatcttcctgctcctctacctgttcactctgggcaccaatgcaatcatcatttccaccattgtgctggacagagcccttcatactcccatgtacttcttccttgccatcctttcttgctctgagatttgctatacctttgtcattgtacccaagatgctggttgacctgctgtcccagaagaagaccatttctttcctgggctgtgccatccaaatgttttccttcctcttctttggctcctctcactccttcctgctggcagccatgggctatgatcgctatatggccatctgtaacccactgcgctactcagtgctcatgggacatggggtgtgtatgggactaatggctgctgcctgtgcctgtggcttcactgtctccctggtcaccacctccctagtatttcatctgcccttccactcctccaaccagctccatcacttcttctgtgacatctcccctgtccttaaactggcatctcagcactccggcttcagtcagctggtcatattcatgcttggtgtatttgccttggtcattcctctgctacttatcctagtctcctacatccgcatcatctctgccattctaaaaatcccttcctccgttggaagatacaagaccttctccacctgtgcctcccatctcattgtggtaactgttcactacagttgtgcctctttcatctacttaaggcccaagactaattacacttcaagccaagacaccctaatatctgtgtcatacaccatccttaccccattgttcaatccaatgatttatagtctgagaaataaggaattcaaatcagccctacgaagaacaatcggccaaactttctatcctcttagttaa

SEQ ID NO: 161979 - DNA, 939 bp, Homo sapiens
  Payload ID: 11665
  Gene Symbol: OR10K2
  Gene Name: olfactory receptor, family 10, subfamily K, member 2
  Uniprot ID: Q6IF99
  ENST ID: ENST00000314902
  CDS Start-End: 1-939
atggagcgggtcaatgagactgtggtgagagaggtcatcttcctcggcttctcatccctggccaggctgcagcagctgctctttgttatcttcctgctcctctacctgttcactctgggcaccaatgcaatcatcatttccaccattgtcctggacagggcccttcatatccccatgtacttcttccttgccatcctctcttgctctgagatttgctacaccttcatcattgtacccaagatgctggttgacctgctgtcccagaagaagaccatttctttcctgggctgtgccatccaaatgttttccttcctcttccttggctgctctcactcctttctgctggcagtcatgggttatgatcgttacatagccatctgtaacccactgcgctactcagtgctaatgggacatggggtgtgtatgggactagtggctgctgcctgtgcctgtggcttcactgttgcacagatcatcacatccttggtatttcacctgcctttttattcctccaatcaactacatcacttcttctgtgacattgctcctgtcctcaagctggcatctcaccataaccactttagtcagattgtcatcttcatgctctgtacattggtcctggctatccccttattgttgatcttggtgtcctatgttcacatcctctctgccatacttcagtttccttccacactgggtaggtgcaaagctttttctacctgtgtatctcacctcattattgtcactgtccactatggctgtgcctcctttatctacttaaggcctcagtccaactactcctcaagccaggatgctctaatatcagtatcctacactattataactccattgttcaacccaatgatttatagcttgagaaataaagagttcaaatcagctctttgtaaaattgtgagaagaacaatttccctgttgtaa

SEQ ID NO: 161980 - DNA, 995 bp, Homo sapiens
  Payload ID: 11666
  Gene Symbol: OR10P1
  Gene Name: olfactory receptor, family 10, subfamily P, member 1
  Uniprot ID: Q8NGE3
  ENST ID: ENST00000309675
  CDS Start-End: 33-974
cttggctgtgcctcagcttctggcctggagtgatggctggggaaaaccatactacactgcctgaattcctccttctgggattctctgacctcaaggccctgcagggccccctgttctgggtggtgcttctggtctacctggtcaccttgctgggtaactccctgatcatcctcctcacacaggtcagccctgccctgcactcccccatgtacttcttcctgcgccaactctcagtggtggagctcttctacaccactgacatcgtgcccaggaccctggccaatctgggctccccgcatccccaggccatctctttccagggctgtgcagcccagatgtacgtcttcattgtcctgggcatctcggagtgctgcctgctcacggccatggcctatgaccgatatgttgccatctgccagcccctacgctattccaccctcttgagcccacgggcctgcatggccatggtgggtacctcctggctcacaggcatcatcacggccaccacccatgcctccctcatcttctctctaccttttcgcagccacccgatcatcccgcactttctctgtgacatcctgccagtactgaggctggcaagtgctgggaagcacaggagcgagatctccgtgatgacagccaccatagtcttcattatgatccccttctctctgattgtcacctcttacatccgcatcctgggtgccatcctagcaatggcctccacccagagccgccgcaaggtcttctccacctgctcctcccatctgctcgtggtctctctcttctttggaacagccagcatcacctacatccggccgcaggcaggctcctctgttaccacagaccgcgtcctcagtctcttctacacagtcatcacacccatgctcaaccccatcatctacacccttcggaacaaggacgtgaggagggccctgcgacacttggtgaagaggcagcgcccctcaccctgaagggactcggatgtctgctca

SEQ ID NO: 161981 - DNA, 1037 bp, Homo sapiens
  Payload ID: 11667
  Gene Symbol: OR10Q1
  Gene Name: olfactory receptor, family 10, subfamily Q, member 1
  Uniprot ID: Q8NGQ4
  ENST ID: ENST00000316770
  CDS Start-End: 44-1003
cagccaagaagagctcagcgcgtcctattcttttgcataagacatgcctgtggggaaacttgtcttcaaccagtctgagcccactgagtttgtgttccgtgcgttcaccacagccactgaattccaggttcttctcttccttctcttcctcctcctctacttgatgatcctctgtggcaacacagccatcatctgggtggtgtgcacacacagcaccctccgcaccccgatgtatttcttcctgtccaacctgtctttcctggaactctgctacaccaccgtggtagtacccttgatgctttccaacattttgggggcccagaagcccatttcgttggctggatgtggggcccaaatgttcttctttgtcaccctcggcagcacggactgtttcctcttggcgatcatggcctatgaccgctatgtggctatctgccacccgctgcactacaccctcatcatgacccgcgagctgtgcacgcagatgctgggtggggccctgggcctggccctcttcccctccctgcagctcaccgccttaatcttcaccctgcccttttgcggccaccaccaggaaatcaaccacttcctctgcgatgtgcctcccgtcctgcgcctggcctgcgctgacatccgcgtgcaccaggctgtcctctatgtcgtgagcatcctcgtgctgaccatccccttcctgctcatctgcgtctcctacgtgttcatcacctgtgccatcctgagcatccgttctgccgagggccgccgccgggccttctccacctgctccttccacctcaccgtggtcctgctgcagtatggctgctgcagcctcgtgtacctgcgtcctcggtccagcacctcagaggatgaggacagccaaatcgcgttggtctacacctttgtcacccccttactcaaccctttgctttacagccttaggaacaaggatgtcaaaggtgctctgaggagtgccattatccgtaaagcagcctctgacgccaactgaaggcttaggggcactgggctgggtgtctgtctgt

SEQ ID NO: 161982 - DNA, 1008 bp, Homo sapiens
  Payload ID: 11668
  Gene Symbol: OR10R2
  Gene Name: olfactory receptor, family 10, subfamily R, member 2
  Uniprot ID: Q8NGX6
  ENST ID: ENST00000368152
  CDS Start-End: 1-1008
atgccccaaattcttatattcacatacctgaatatgttttacttctttccccctttgcagatcttggcagaaaacctcaccatggtcaccgaattcctgttgctgggtttttccagccttggtgaaattcagctggccctctttgtagtttttctttttctgtatctagtcattcttagtggcaatgtcaccattatcagtgtcatccacctggataaaagcctccacacaccaatgtacttcttccttggcattctctcaacatctgagaccttctacacctttgtcattctacccaagatgctcatcaatctactttctgtggccaggacaatctccttcaactgttgtgctcttcaaatgttcttcttccttggttttgccattaccaactgcctgctattgggtgtgatgggttatgatcgctatgctgccatttgtcaccctctgcattaccccactcttatgagctggcaggtgtgtggaaaactggcagctgcctgtgcaattggtggcttcttggcctctcttacagtagtaaatttagttttcagcctccctttttgtagcgccaacaaagtcaatcattacttctgtgacatctcagcagtcattcttctggcttgtaccaacacagatgttaacgaatttgtgatattcatttgtggagttcttgtacttgtggttccctttctgtttatctgtgtttcttatctctgcattctgaggactatcctgaagattccctcagctgagggcagacggaaagcgttttccacctgcgcctctcacctcagtgttgttattgttcattatggctgtgcttccttcatctacctgaggcctacagcaaactatgtgtccaacaaagacaggctggtgacggtgacatacacgattgtcactccattactaaaccccatggtttatagcctcagaaacaaggatgtccaacttgctatcagaaaagtgttgggcaagaaaggttctctaaaactatataattga

SEQ ID NO: 161983 - DNA, 1121 bp, Homo sapiens
  Payload ID: 11669
  Gene Symbol: OR10S1
  Gene Name: olfactory receptor, family 10, subfamily S, member 1
  Uniprot ID: Q8NGN2
  ENST ID: ENST00000531945
  CDS Start-End: 91-1086
gaccaaggtggtgtggcttgatggataatgacatctcaggaaagggatacagctatttattccattaatgtcagttttgttgcaaaggggatgactagccgctctgtgtgtgagaagatgaccatgacaacggagaaccccaaccagactgtggtgagccacttcttcctggagggtttgaggtacaccgctaaacattctagcctcttcttcctcctcttcctcctcatctacagcatcactgtggctgggaatctcctcatcctcctaactgtgggctctgactctcacctcagcttacccatgtaccacttcctggggcacctctccttcctggatgcctgtttgtctacagtgacagtgcccaaggtcatggcaggcctgctgactctggatgggaaggtgatctcctttgagggctgtgccgtacagctttattgcttccactttctggccagcactgagtgcttcctgtacacagtcatggcctatgaccgctatctggctatctgtcaacccctgcactacccagtggccatgaacagaaggatgtgtgcagaaatggctggaatcacctgggccataggtgccacgcacgctgcaatccacacctccctcaccttccgcctgctctactgtgggccttgccacattgcctacttcttctgcgacataccccctgtcctaaagctcgcctgtacagacaccaccattaatgagctagtcatgcttgccagcattggcatcgtggctgcaggctgcctcatcctcatcgttatttcctacatcttcatcgtggcagctgtgttgcgcatccgcacagcccagggccggcagcgggccttctccccctgcactgcccagctcactggggtgctcctgtactacgtgccacctgtctgtatctacctgcagcctcgctccagtgaggcaggagctggggcccctgctgtcttctacacaatcgtaactccaatgctcaacccattcatttacactttgcggaacaaggaggtgaagcatgctctgcaaaggcttttgtgcagcagcttccgagagtctacagcaggcagcccacccccatagtctgtgctatcaaaactcacaatttgcctgccagg

SEQ ID NO: 161984 - DNA, 945 bp, Homo sapiens
  Payload ID: 11670
  Gene Symbol: OR10T2
  Gene Name: olfactory receptor, family 10, subfamily T, member 2
  Uniprot ID: Q8NGX3
  ENST ID: ENST00000334438
  CDS Start-End: 1-945
atgcgaggtttcaacaaaaccactgtggttacacagttcatcctggtgggtttctccagcctgggggagctccagctgctgctttttgtcatctttcttctcctatacttgacaatcctggtggccaatgtgaccatcatggccgttattcgcttcagctggactctccacactcccatgtatggctttctattcatcctttcattttctgagtcctgctacacttttgtcatcatccctcagctgctggtccacctgctctcagacaccaagaccatctccttcatggcctgtgccacccagctgttctttttccttggctttgcttgcaccaactgcctcctcattgctgtgatgggatatgatcgctatgtagcaatttgtcaccctctgaggtacacactcatcataaacaaaaggctggggttggagttgatttctctctcaggagccacaggtttctttattgctttggtggccaccaacctcatttgtgacatgcgtttttgtggccccaacagggttaaccactatttctgtgacatggcacctgttatcaagttagcctgcactgacacccatgtgaaagagctggctttatttagcctcagcatcctggtaattatggtgccttttctgttaattctcatatcctatggcttcatagttaacaccatcctgaagatcccctcagctgagggcaagaaggcctttgtcacctgtgcctcacatctcactgtggtctttgtccactatggctgtgcctctatcatctatctgcggcccaagtccaagtctgcctcagacaaggatcagttggtggcagtgacctacacagtggttactcccttacttaatcctcttgtctacagtctgaggaacaaagaggtaaaaactgcattgaaaagagttcttggaatgcctgtggcaaccaagatgagctaa

SEQ ID NO: 161985 - DNA, 1042 bp, Homo sapiens
  Payload ID: 11671
  Gene Symbol: OR10V1
  Gene Name: olfactory receptor, family 10, subfamily V, member 1
  Uniprot ID: Q8NGI7
  ENST ID: ENST00000307552
  CDS Start-End: 20-949
taggtccaatactctactcatggaaggaataaataaaactgcaaagatgcagtttttctttcgtccattctcacctgaccctgaggtccagatgctgatttttgtggtcttcctgatgatgtatctgaccagcctcggtggaaatgctacaattgcagtcattgttcagatcaatcattccctccacacccccatgtactttttcctggctaatctggcagttctagaaatcttctatacatcttccatcaccccattggccttggcaaacctcctttcaatgggcaaaactcctgtttccatcacgggatgtggcacccagatgtttttctttgtcttcttgggtggggctgattgtgtcctgctggtagtcatggcttatgaccagtttatagcgatctgtcaccctctgcgatacaggctcatcatgagctggtccttgtgtgtggagctgctggtaggctccttggtgctggggttcctgttgtcactgccactcaccattttaatcttccatctcccattctgccacaatgatgagatctaccacttctactgtgacatgcctgcagtcatgcgcctggcttgtgcagacacacgcgttcacaagactgctctgtatatcatcagcttcatcgtccttagcatccccctctcattgatctccatctcctatgtcttcatcgtggtagccattttacggatccggtcagcagaagggcgccagcaagcctactctacctgctcttctcacatcttagtggtcctcctgcagtatggctgcaccagctttatatacttgtcccccagttccagctactctcctgagatgggccgggtggtatctgtggcctacacatttatcactcccattttaaaccccttgatctatagtttgaggaacaaggaactgaaagatgccctaaggaaagcattgagaaaattctaggtaggatgatcctatgatttacttaaattgggacacttctgagagtgaaatgggatgctactaataattttgctgaaaggacatgcataggtg

SEQ ID NO: 161986 - DNA, 1469 bp, Homo sapiens
  Payload ID: 11672
  Gene Symbol: OR10W1
  Gene Name: olfactory receptor, family 10, subfamily W, member 1
  Uniprot ID: Q8NGF6
  ENST ID: ENST00000395079
  CDS Start-End: 403-1320
tcccttaccttaatgatttctagccccaagaattccttgacactttcttgtgaatttgctgaaagaattgaattttcattccactctttctgaaaatagctcctgaatcccacccacttcctctgccatttttcttcaatagtatcttacatagtttggcccaactcttggcaggtagaaattgaggtgtagatattaatgtggagaaacttggtaaaagtggagaaaagaaaaagaactagtcttgatccttccagtttctaactccagtgctgattacattagattcatggctcagagtgtaacttaatttatcttcagtctgattcttccttctgtacttgtagctctccacagagaaatactgttagctcaattacctgggaaaatcactcagtgttgatggaatttgtgttcctggcctatccctcctgcccagaactgcatattctgtccttccttggggtcagcctggtttatggtttgatcatcactgggaacattctcattgtggtgtccattcacacagaaacctgtctatgcacatccatgtactatttcctgggcagcctttctgggattgaaatatgctacactgcagtggtggtgccccatatcctggccaacaccctacagtcagagaagaccatcactctcctgggctgtgccacccagatggctttcttcattgcactgggcagtgctgattgcttcctcttggctgccatggcctatgaccgctatgtggccatttgccacccgttgcagtaccctctcctcatgacattgactctttgtgtccacttggttgtggcatcagtcatcagtggtctgttcctgtccttacaactggtggccttcatcttctctctgccattctgccaggctcagggcattgagcacttcttttgtgatgtgccaccagtcatgcatgttgtttgtgctcagagtcacattcatgagcagtcagtgctggtggcagccatactagccattgctgtgcctttcttcctcatcaccacctcctacaccttcatagtggctgctctgctcaagatccactcggctgctggccgccaccgggccttctccacctgctcttcccacctcactgtggtgctgctgcagtatggctgctgtgccttcatgtacctgtgccccagctccagctacaaccccaagcaagatcggttcatctcactggtgtacacattgggaaccccactgctcaacccacttatctatgccctgaggaacagtgagatgaaaggggccgtagggagagttcttaccaggaactgcctttcccagaacagctaggaaagacgaggggacagcctatcaggcaagtatttggttccagcccaccaaatctgtatgaaactgagatttctatcatttggtgttaaaactcatctaaaagatggtataaattatatggatactgtttatgtgtgccaaagattttt

SEQ ID NO: 161987 - DNA, 981 bp, Homo sapiens; identical to SEQ ID NO: 161878
  Payload ID: 11673
  Gene Symbol: OR10X1
  Gene Name: olfactory receptor, family 10, subfamily X, member 1 (gene/pseudogene)
  Uniprot ID: Q8NGY0
  ENST ID: ENST00000368150
  CDS Start-End: 1-981

SEQ ID NO: 161988 - DNA, 942 bp, Homo sapiens
  Payload ID: 11674
  Gene Symbol: OR10Z1
  Gene Name: olfactory receptor, family 10, subfamily Z, member 1
  Uniprot ID: Q8NGY1
  ENST ID: ENST00000361284
  CDS Start-End: 1-942
atggggcagaccaacgtaacctcctggagggattttgtcttcctgggcttctccagttctggggagttgcagctccttctctttgccttgttcctctctctgtatctagtcactctgaccagcaatgtcttcattatcatagccatcaggctggatagccatctgcacacccccatgtacctcttcctttccttcctatccttctctgagacctgctacactttgggcatcatccctagaatgctctctggcctggctgggggggaccaggctatctcctatgtgggctgtgctgcccagatgttcttttctgcctcatgggcctgtactaactgcttccttctggctgccatgggctttgacagatatgtggccatctgtgctccactccactatgccagccacatgaatcctaccctctgtgcccagctggtcattacttccttcctgactggatacctctttggactgggaatgacactagttattttccacctctcattctgcagctcccatgaaatccagcactttttttgtgacacgccacctgtgctgagcctagcctgtggagatacaggcccgagtgagctgaggatctttatcctcagtcttttggtcctcttggtctccttcttcttcatcaccatctcctacgcctacatcttggcagcaatactgaggatcccctctgctgaggggcagaagaaggccttctccacttgtgcctcgcaccttacagtggtcattattcattatggctgtgcttccttcgtgtacctgaggcccaaagccagctactctcttgagagagatcagcttattgccatgacctatactgtagtgacccccctccttaatcccattgtttatagtctaaggaatagggctatacagacagctctgaggaatgctttcagagggagattgctgggtaaaggatga

SEQ ID NO: 161989 - DNA, 2229 bp, Homo sapiens
  Payload ID: 11675
  Gene Symbol: OR11A1
  Gene Name: olfactory receptor, family 11, subfamily A, member 1
  Uniprot ID: Q9GZK7
  ENST ID: ENST00000377147
  CDS Start-End: 92-1039
ctctaataacgttaggcttggtatagaagatgcagagacatgctaaaatttctcccccaattattgccaagcagaaacttggacgatcgacatggaaattgtctccacaggaaacgaaactattactgaatttgtcctccttggcttctatgacatccctgaactgcatttcttgttttttattgtattcactgctgtctatgtcttcatcatcatagggaatatgctgattattgtagcagtggttagctcccagaggctccacaaacccatgtatattttcttggcgaatctgtccttcctggatattctctacacctccgcagtgatgccaaaaatgctggagggcttcctgcaagaagcaactatctctgtggctggttgcttgctccagttctttatcttcggctctctagccacagctgaatgcttactgctggctgtcatggcatatgaccgctacctggcaatttgctacccactccactacccactcctgatggggcccagacggtacatggggctggtggtcacaacctggctctctggatttgtggtagatggactggttgtggccctggtggcccagctgaggttctgtggccccaaccacattgaccagttttactgtgactttatgcttttcgtgggcctggcttgctcggatcccagagtggctcaggtgacaactctcattctgtctgtgttctgcctcactattccttttggactgattctgacatcttatgccagaattgtggtggcagtgctgagagttcctgctggggcaagcaggagaagggctttctccacatgctcctcccacctagctgtagtgaccacattctatggaacgctcatgatcttttatgttgcaccctctgctgtccattcccagctcctctccaaggtcttctccctgctctacactgtggtcacccctctcttcaatcctgtgatctataccatgaggaacaaggaggtgcatcaggcacttcggaagattctctgtatcaaacaaactgaaacacttgattgaaggagagtaatgaagatgttattttggacttcggacacctccactggggactcttccaggatgggttggagaggagtaactttgtcttattcgaccattctctttgaactcttctgcagttatactaaaaatgaaaatgatagggcaacaattttttaacttttattttaagttcaagggtacatgtgcaggtttgttacataggtaaacttgtgtcatgggggtttactgtacagattatttcatcacccaggtattaagcctagtactcattaatcatttttcctgatcttctccctcctcccaacctccaccctcaagtaggattcagtgtgttgttcccctctatgtatccatatgttttcataatttagctcccacttatgagtgaagacatacggtatttgattttctgttcctgtgttagtttgcgaaggatagtagcctccaattccatccatgtcaaataatcaaaattatttaaactttgattagttctttattaaatatgtcataaatatttaaaaataatacagcaataccaaaataaacctagaaatattgttttttatattattgttgtatgacatttaaaaatttctttctatgtgtatttatatttatacatacaagttggatcatggagtttgtaatctggttttccactgaacactgtgtcacgaacaactttttctattaacaagcatctatttctttattcttctgggcttcatcgtatggctaaacatgatttgttattctattttgggaatttttagttgtattctattcttttactgtacattgtttacatctggattttcctgtaataaacttttagcacctaaattgcaagatctaaggatatgtgtttttaaaaatctaaagctgaattccttttcttttaaacttcttttcttgtagaacatttcaaacatacataaaagagaagagcacagtgaacccccatgtactccatgtagccaccatccagcttcaacatcaacattttgctaatcttattttaattagctacagctccttgtttgttagttttcatggaaaattttagggcaaattccagatgttgtataactattatgttgtgtaagttatgtatgtacatattccacatatgtatttagtataatctgtgactaataaagacattttaaaaaaccatgcccaca

SEQ ID NO: 161990 - DNA, 2482 bp, Homo sapiens
  Payload ID: 11675
  Gene Symbol: OR11A1
  Gene Name: olfactory receptor, family 11, subfamily A, member 1
  Uniprot ID: Q9GZK7
  ENST ID: ENST00000377148
  CDS Start-End: 345-1292
caactcttaattggccctcaaaacttagcctacttgcttctatcttcagaaagccttccccgaccttgatcccacaccttctgccccacaaccccaggctgggtttggtccttctctgctcccatggcacctacttccttccctattaccatttaccacattttcactaccaactcctgaatgacttgatgaaactactatttaaggaaggcaataagtgaagaatatataagaattatccgaggaacagttgctctaataacgttaggcttggtatagaagatgcagagacatgctaaaatttctcccccaattattgccaagcagaaacttggacgatcgacatggaaattgtctccacaggaaacgaaactattactgaatttgtcctccttggcttctatgacatccctgaactgcatttcttgttttttattgtattcactgctgtctatgtcttcatcatcatagggaatatgctgattattgtagcagtggttagctcccagaggctccacaaacccatgtatattttcttggcgaatctgtccttcctggatattctctacacctccgcagtgatgccaaaaatgctggagggcttcctgcaagaagcaactatctctgtggctggttgcttgctccagttctttatcttcggctctctagccacagctgaatgcttactgctggctgtcatggcatatgaccgctacctggcaatttgctacccactccactacccactcctgatggggcccagacggtacatggggctggtggtcacaacctggctctctggatttgtggtagatggactggttgtggccctggtggcccagctgaggttctgtggccccaaccacattgaccagttttactgtgactttatgcttttcgtgggcctggcttgctcggatcccagagtggctcaggtgacaactctcattctgtctgtgttctgcctcactattccttttggactgattctgacatcttatgccagaattgtggtggcagtgctgagagttcctgctggggcaagcaggagaagggctttctccacatgctcctcccacctagctgtagtgaccacattctatggaacgctcatgatcttttatgttgcaccctctgctgtccattcccagctcctctccaaggtcttctccctgctctacactgtggtcacccctctcttcaatcctgtgatctataccatgaggaacaaggaggtgcatcaggcacttcggaagattctctgtatcaaacaaactgaaacacttgattgaaggagagtaatgaagatgttattttggacttcggacacctccactggggactcttccaggatgggttggagaggagtaactttgtcttattcgaccattctctttgaactcttctgcagttatactaaaaatgaaaatgatagggcaacaattttttaacttttattttaagttcaagggtacatgtgcaggtttgttacataggtaaacttgtgtcatgggggtttactgtacagattatttcatcacccaggtattaagcctagtactcattaatcatttttcctgatcttctccctcctcccaacctccaccctcaagtaggattcagtgtgttgttcccctctatgtatccatatgttttcataatttagctcccacttatgagtgaagacatacggtatttgattttctgttcctgtgttagtttgcgaaggatagtagcctccaattccatccatgtcaaataatcaaaattatttaaactttgattagttctttattaaatatgtcataaatatttaaaaataatacagcaataccaaaataaacctagaaatattgttttttatattattgttgtatgacatttaaaaatttctttctatgtgtatttatatttatacatacaagttggatcatggagtttgtaatctggttttccactgaacactgtgtcacgaacaactttttctattaacaagcatctatttctttattcttctgggcttcatcgtatggctaaacatgatttgttattctattttgggaatttttagttgtattctattcttttactgtacattgtttacatctggattttcctgtaataaacttttagcacctaaattgcaagatctaaggatatgtgtttttaaaaatctaaagctgaattccttttcttttaaacttcttttcttgtagaacatttcaaacatacataaaagagaagagcacagtgaacccccatgtactccatgtagccaccatccagcttcaacatcaacattttgctaatcttattttaattagctacagctccttgtttgttagttttcatggaaaattttagggcaaattccagatgttgtataactattatgttgtgtaagttatgtatgtacatattccacatatgtatttagtataatctgtgactaataaagacattttaaaaaaccatgcccaca

SEQ ID NO: 161991 - DNA, 2611 bp, Homo sapiens
  Payload ID: 11675
  Gene Symbol: OR11A1
  Gene Name: olfactory receptor, family 11, subfamily A, member 1
  Uniprot ID: Q9GZK7
  ENST ID: ENST00000377149
  CDS Start-End: 474-1421
catcctagcagtgaatggaaacacacatatggggagaaactaaggctccctactaaaaacgtgcaacatgtgactgggacatcttgttgagctcaagcagggagggagctgaaggtaggaaattccaacattctgaagtcttcagcaaatcttagcagatcatctcctcctcacagtcctgtctttagagaacagggtcgatatttcgggaatcctatagaaagactccaagcctcagaatgagtttggaccagataaaataatctagagttaaagatggcccacatagggagtgccagattcactcacaaggaaatgcagatgggatcaaaggttaataaacacatattgctttgaatagcatatgaaaaccttccagcagctctaataacgttaggcttggtatagaagatgcagagacatgctaaaatttctcccccaattattgccaagcagaaacttggacgatcgacatggaaattgtctccacaggaaacgaaactattactgaatttgtcctccttggcttctatgacatccctgaactgcatttcttgttttttattgtattcactgctgtctatgtcttcatcatcatagggaatatgctgattattgtagcagtggttagctcccagaggctccacaaacccatgtatattttcttggcgaatctgtccttcctggatattctctacacctccgcagtgatgccaaaaatgctggagggcttcctgcaagaagcaactatctctgtggctggttgcttgctccagttctttatcttcggctctctagccacagctgaatgcttactgctggctgtcatggcatatgaccgctacctggcaatttgctacccactccactacccactcctgatggggcccagacggtacatggggctggtggtcacaacctggctctctggatttgtggtagatggactggttgtggccctggtggcccagctgaggttctgtggccccaaccacattgaccagttttactgtgactttatgcttttcgtgggcctggcttgctcggatcccagagtggctcaggtgacaactctcattctgtctgtgttctgcctcactattccttttggactgattctgacatcttatgccagaattgtggtggcagtgctgagagttcctgctggggcaagcaggagaagggctttctccacatgctcctcccacctagctgtagtgaccacattctatggaacgctcatgatcttttatgttgcaccctctgctgtccattcccagctcctctccaaggtcttctccctgctctacactgtggtcacccctctcttcaatcctgtgatctataccatgaggaacaaggaggtgcatcaggcacttcggaagattctctgtatcaaacaaactgaaacacttgattgaaggagagtaatgaagatgttattttggacttcggacacctccactggggactcttccaggatgggttggagaggagtaactttgtcttattcgaccattctctttgaactcttctgcagttatactaaaaatgaaaatgatagggcaacaattttttaacttttattttaagttcaagggtacatgtgcaggtttgttacataggtaaacttgtgtcatgggggtttactgtacagattatttcatcacccaggtattaagcctagtactcattaatcatttttcctgatcttctccctcctcccaacctccaccctcaagtaggattcagtgtgttgttcccctctatgtatccatatgttttcataatttagctcccacttatgagtgaagacatacggtatttgattttctgttcctgtgttagtttgcgaaggatagtagcctccaattccatccatgtcaaataatcaaaattatttaaactttgattagttctttattaaatatgtcataaatatttaaaaataatacagcaataccaaaataaacctagaaatattgttttttatattattgttgtatgacatttaaaaatttctttctatgtgtatttatatttatacatacaagttggatcatggagtttgtaatctggttttccactgaacactgtgtcacgaacaactttttctattaacaagcatctatttctttattcttctgggcttcatcgtatggctaaacatgatttgttattctattttgggaatttttagttgtattctattcttttactgtacattgtttacatctggattttcctgtaataaacttttagcacctaaattgcaagatctaaggatatgtgtttttaaaaatctaaagctgaattccttttcttttaaacttcttttcttgtagaacatttcaaacatacataaaagagaagagcacagtgaacccccatgtactccatgtagccaccatccagcttcaacatcaacattttgctaatcttattttaattagctacagctccttgtttgttagttttcatggaaaattttagggcaaattccagatgttgtataactattatgttgtgtaagttatgtatgtacatattccacatatgtatttagtataatctgtgactaataaagacattttaaaaaaccatgcccaca

SEQ ID NO: 161992 - DNA, 2482 bp, Homo sapiens; identical to SEQ ID NO: 161990
  Payload ID: 11675
  Gene Symbol: OR11A1
  Gene Name: olfactory receptor, family 11, subfamily A, member 1
  Uniprot ID: Q9GZK7
  ENST ID: ENST00000383551
  CDS Start-End: 345-1292

SEQ ID NO: 161993 - DNA, 2482 bp, Homo sapiens
  Payload ID: 11675
  Gene Symbol: OR11A1
  Gene Name: olfactory receptor, family 11, subfamily A, member 1
  Uniprot ID: Q9GZK7
  ENST ID: ENST00000383645
  CDS Start-End: 345-1292
caactcttaattggccctcaaaacttagcctacttgcttctatcttcagaaagccttccccgaccttgatcccacaccttctgccccacaaccccaggctgggtttggtccttctctgctcccatggcacctacttccttccctattaccatttaccacattttcactaccaactcctgaatgacttgatgaaactactatttaaggaaggcaataagtgaagaatatataagaattatccgaggaacagttgctctaataacgttaggcttggtatagaagatgcagagacatgctaaaatttctcccccaattattgccaagcagaaacttggacgatcgacatggaaattgtctccacaggaaacgaaactattactgaatttgtcctccttggcttctatgacatccctgaactgcatttcttgttttttattgtattcactgctgtctatgtcttcatcatcatagggaatatgctgattattgtagcagtggttagctcccagaggctccacaaacccatgtatattttcttggcgaatctgtccttcctggatattctctacacctccgcagtgatgccaaaaatgctggagggcttcctgcaagaagcaactatctctgtggctggttgcttgctccagttctttatcttcggctctctagccacagctgaatgcttactgctggctgtcatggcatatgaccgctacctggcaatttgctacccactccactacccactcctgatggggcccagacggtacatggggctggtggtcacaacctggctctctggatttgtggtagatggactggttgtggccctggtggcccagctgaggttctgtggccccaaccacattgaccagttttactgtgactttatgcttttcgtgggcctggcttgctcggatcccagagtggctcaggtgacaactctcattctgtctgtgttctgcctcactattccttttggactgattctgacatcttatgccagaattgtggtggcagtgctgagagttcctgctggggcaagcaggagaagggctttctccacatgctcctcccacctagctgtagtgaccacattctatggaacgctcatgatcttttatgttgcaccctctgctgtccattcccagctcctctccaaggtcttctccctgctctacactgtggtcacccctctcttcaatcctgtgatctataccatgaggaacaaggaggtgcatcaggcacttcggaagattctctgtatcaaacaaactgaaacacttgattgaaggagagtaatgaagatgttattttggacttcggacacctccattggggactcttccaggatgggttggagaggagtaactttgtcttattcgaccattctctttgaactcttctgcagttatactaaaaatgaaaatgatagggcaacaattttttaacttttattttaagttcaagggtacatgtgcaggtttgttacataggtaaacttgtgtcatgggggtttactgtacagattatttcatcacccaggtattaagcctagtactcattaatcatttttcctgatcttctccctcctcccaacctccaccctcaagtaggattcagtgtgttgttcccctctatgtatccatatgttttcataatttagctcccacttatgagtgaagacatacggtatttgattttctgttcctgtgttagtttgcgaaggatagtagcctccaattccatccatgtcaaataatcaaaattatttaaactttgattagttctttattaaatatgtcataaatatttaaaaataatacagcaataccaaaataaacctagaaatattgttttttatattattgttgtatgacatttaaaaatttctttctatgtgtatttatatttatacatacaagttggatcatggagtttgtaatctggttttccactgaacactgtgtcacgaacaactttttctattaacaagcatctatttctttattcttctgggcttcatcgtatggctaaacatgatttgttattctattttgggaatttttagttgtattctattcttttactgtacattgtttacatctggattttcctgtaataaacttttagcacctaaattgcaagatctaaggatatgtgtttttaaaaatctaaagctgaattccttttcttttaaacttcttttcttgtagaacatttcaaacatacataaaagagaagagcacagtgaacccccatgtactccatgtagccaccatccagcttcaacatcaacattttgctaatcttattttaattagctacagctccttgtttgttagttttcatggaaaattttagggcaaattccagatgttgtataactattatgttgtgtaagttatgtatgtacatattccacatatgtatttagtataatctgtgactaataaagacattttaaaaaaccatgcccaca

SEQ ID NO: 161994 - DNA, 2611 bp, Homo sapiens; identical to SEQ ID NO: 161991
  Payload ID: 11675
  Gene Symbol: OR11A1
  Gene Name: olfactory receptor, family 11, subfamily A, member 1
  Uniprot ID: Q9GZK7
  ENST ID: ENST00000400696
  CDS Start-End: 474-1421

SEQ ID NO: 161995 - DNA, 2611 bp, Homo sapiens
  Payload ID: 11675
  Gene Symbol: OR11A1
  Gene Name: olfactory receptor, family 11, subfamily A, member 1
  Uniprot ID: Q9GZK7
  ENST ID: ENST00000400715
  CDS Start-End: 474-1421
catcctagcagtgaatggaaacacacatatggggagaaactaaggctccctactaaaaacgtgcaacatgtgactgggacatcttgttgagctcaagcagggagggagctgaaggtaggaaattccaacattctgaagtcttcagcaaatcttagcagatcatctcctcctcacagtcctgtctttagagaacagggtcgatatttcgggaatcctatagaaagactccaagcctcagaatgagtttggaccagataaaataatctagagttaaagatggcccacatagggagtgccagattcactcacaaggaaatgcagatgggatcaaaggttaataaacacatattgctttgaatagcatatgaaaaccttccagcagctctaataacgttaggcttggtatagaagatgcagagacatgctaaaatttctcccccaattattgccaagcagaaacttggacgatcgacatggaaattgtctccacaggaaacgaaactattactgaatttgtcctccttggcttctatgacatccctgaactgcatttcttgttttttattgtattcactgctgtctatgtcttcatcatcatagggaatatgctgattattgtagcagtggttagctcccagaggctccacaaacccatgtatattttcttggcgaatctgtccttcctggatattctctacacctccgcagtgatgccaaaaatgctggagggcttcctgcaagaagcaactatctctgtggctggttgcttgctccagttctttatcttcggctctctagccacagctgaatgcttactgctggctgtcatggcatatgaccgctacctggcaatttgctacccactccactacccactcctgatggggcccagacggtacatggggctggtggtcacaacctggctctctggatttgtggtagatggactggttgtggccctggtggcccagctgaggttctgtggccccaaccacattgaccagttttactgtgactttatgcttttcgtgggcctggcttgctcggatcccagagtggctcaggtgacaactctcattctgtctgtgttctgcctcactattccttttggactgattctgacatcttatgccagaattgtggtggcagtgctgagagttcctgctggggcaagcaggagaagggctttctccacatgctcctcccacctagctgtagtgaccacattctatggaacgctcatgatcttttatgttgcaccctctgctgtccattcccagctcctctccaaggtcttctccctgctctacactgtggtcacccctctcttcaatcctgtgatctataccatgaggaacaaggaggtgcatcaggcacttcggaagattctctgtatcaaacaaactgaaacacttgattgaaggagagtaatgaagatgttattttggacttcggacacctccattggggactcttccaggatgggttggagaggagtaactttgtcttattcgaccattctctttgaactcttctgcagttatactaaaaatgaaaatgatagggcaacaattttttaacttttattttaagttcaagggtacatgtgcaggtttgttacataggtaaacttgtgtcatgggggtttactgtacagattatttcatcacccaggtattaagcctagtactcattaatcatttttcctgatcttctccctcctcccaacctccaccctcaagtaggattcagtgtgttgttcccctctatgtatccatatgttttcataatttagctcccacttatgagtgaagacatacggtatttgattttctgttcctgtgttagtttgcgaaggatagtagcctccaattccatccatgtcaaataatcaaaattatttaaactttgattagttctttattaaatatgtcataaatatttaaaaataatacagcaataccaaaataaacctagaaatattgttttttatattattgttgtatgacatttaaaaatttctttctatgtgtatttatatttatacatacaagttggatcatggagtttgtaatctggttttccactgaacactgtgtcacgaacaactttttctattaacaagcatctatttctttattcttctgggcttcatcgtatggctaaacatgatttgttattctattttgggaatttttagttgtattctattcttttactgtacattgtttacatctggattttcctgtaataaacttttagcacctaaattgcaagatctaaggatatgtgtttttaaaaatctaaagctgaattccttttcttttaaacttcttttcttgtagaacatttcaaacatacataaaagagaagagcacagtgaacccccatgtactccatgtagccaccatccagcttcaacatcaacattttgctaatcttattttaattagctacagctccttgtttgttagttttcatggaaaattttagggcaaattccagatgttgtataactattatgttgtgtaagttatgtatgtacatattccacatatgtatttagtataatctgtgactaataaagacattttaaaaaaccatgcccaca

SEQ ID NO: 161996 - DNA, 2482 bp, Homo sapiens; identical to SEQ ID NO: 161993
  Payload ID: 11675
  Gene Symbol: OR11A1
  Gene Name: olfactory receptor, family 11, subfamily A, member 1
  Uniprot ID: Q9GZK7
  ENST ID: ENST00000440485
  CDS Start-End: 345-1292

SEQ ID NO: 161997 - DNA, 2611 bp, Homo sapiens; identical to SEQ ID NO: 161995
  Payload ID: 11675
  Gene Symbol: OR11A1
  Gene Name: olfactory receptor, family 11, subfamily A, member 1
  Uniprot ID: Q9GZK7
  ENST ID: ENST00000435232
  CDS Start-End: 474-1421

SEQ ID NO: 161998 - DNA, 2611 bp, Homo sapiens; identical to SEQ ID NO: 161995
  Payload ID: 11675
  Gene Symbol: OR11A1
  Gene Name: olfactory receptor, family 11, subfamily A, member 1
  Uniprot ID: Q9GZK7
  ENST ID: ENST00000419773
  CDS Start-End: 474-1421

SEQ ID NO: 161999 - DNA, 2611 bp, Homo sapiens; identical to SEQ ID NO: 161995
  Payload ID: 11675
  Gene Symbol: OR11A1
  Gene Name: olfactory receptor, family 11, subfamily A, member 1
  Uniprot ID: Q9GZK7
  ENST ID: ENST00000428144
  CDS Start-End: 474-1421

SEQ ID NO: 162000 - DNA, 2482 bp, Homo sapiens; identical to SEQ ID NO: 161993
  Payload ID: 11675
  Gene Symbol: OR11A1
  Gene Name: olfactory receptor, family 11, subfamily A, member 1
  Uniprot ID: Q9GZK7
  ENST ID: ENST00000421634
  CDS Start-End: 345-1292

SEQ ID NO: 162001 - DNA, 2482 bp, Homo sapiens
  Payload ID: 11675
  Gene Symbol: OR11A1
  Gene Name: olfactory receptor, family 11, subfamily A, member 1
  Uniprot ID: Q9GZK7
  ENST ID: ENST00000418485
  CDS Start-End: 345-1292
caactcttaattggccctcaaaacttagcctacttgcttctatcttcagaaagccttccccgaccttgatcccacaccttctgccccacaaccccaggctgggtttggtccttctctgctcccatggcacctacttccttcgctattaccatttaccacattttcactaccaactcctgaatgacttgatgaaactactatttaaggaaggcaataagtgaagaatatataagaattatccgaggaacagttgctctaataacgttaggcttggtatagaagatgcagagacatgctaaaatttctcccccaattattgccaagcagaaacttggacgatcgacatggaaattgtctccacaggaaacgaaactattactgaatttgtcctccttggcttctatgacatccctgaactgcatttcttgttttttattgtattcactgctgtctatgtcttcatcatcatagggaatatgctgattattgtagcagtggttagctcccagaggctccacaaacccatgtatattttcttggcgaatctgtccttcctggatattctctacacctccgcagtgatgccaaaaatgctggagggcttcctgcaagaagcaactatctctgtggctggttgcttgctccagttctttatcttcggctctctagccacagctgaatgcttactgctggctgtcatggcatatgaccgctacctggcaatttgctacccactccactacccactcctgatggggcccagacggtacatggggctggtggtcacaacctggctctctggatttgtggtagatggactggttgtggccctggtggcccagctgaggttctgtggccccaaccacattgaccagttttactgtgactttatgcttttcgtgggcctggcttgctcggatcccagagtggctcaggtgacaactctcattctgtctgtgttctgcctcactattccttttggactgattctgacatcttatgccagaattgtggtggcagtgctgagagttcctgctggggcaagcaggagaagggctttctccacatgctcctcccacctagctgtagtgaccacattctatggaacgctcatgatcttttatgttgcaccctctgctgtccattcccagctcctctccaaggtcttctccctgctctacactgtggtcacccctctcttcaatcctgtgatctataccatgaggaacaaggaggtgcatcaggcacttcggaagattctctgtatcaaacaaactgaaacacttgattgaaggagagtaatgaagatgttattttggacttcggacacctccattggggactcttccaggatgggttggagaggagtaactttgtcttattcgaccattctctttgaactcttctgcagttatactaaaaatgaaaatgatagggcaacaattttttaacttttattttaagttcaagggtacatgtgcaggtttgttacataggtaaacttgtgtcatgggggtttactgtacagattatttcatcacccaggtattaagcctagtactcattaatcatttttcctgatcttctccctcctcccaacctccaccctcaagtaggattcagtgtgttgttcccctctatgtatccatatgttttcataatttagctcccacttatgagtgaagacatacggtatttgattttctgttcctgtgttagtttgcgaaggatagtagcctccaattccatccatgtcaaataatcaaaattatttaaactttgattagttctttattaaatatgtcataaatatttaaaaataatacagcaataccaaaataaacctagaaatattgttttttatattattgttgtatgacatttaaaaatttctttctatgtgtatttatatttatacatacaagttggatcatggagtttgtaatctggttttccactgaacactgtgtcacgaacaactttttctattaacaagcatctatttctttattcttctgggcttcatcgtatggctaaacatgatttgttattctattttgggaatttttagttgtattctattcttttactgtacattgtttacatctggattttcctgtaataaacttttagcacctaaattgcaagatctaaggatatgtgtttttaaaaatctaaagctgaattccttttcttttaaacttcttttcttgtagaacatttcaaacatacataaaagagaagagcacagtgaacccccatgtactccatgtagccaccatccagcttcaacatcaacattttgctaatcttattttaattagctacagctccttgtttgttagttttcatggaaaattttagggcaaattccagatgttgtataactattatgttgtgtaagttatgtatgtacatattccacatatgtatttagtataatctgtgactaataaagacattttaaaaaaccatgcccaca

SEQ ID NO: 162002 - DNA, 2482 bp, Homo sapiens; identical to SEQ ID NO: 161993
  Payload ID: 11675
  Gene Symbol: OR11A1
  Gene Name: olfactory receptor, family 11, subfamily A, member 1
  Uniprot ID: Q9GZK7
  ENST ID: ENST00000427264
  CDS Start-End: 345-1292

SEQ ID NO: 162003 - DNA, 2611 bp, Homo sapiens
  Payload ID: 11675
  Gene Symbol: OR11A1
  Gene Name: olfactory receptor, family 11, subfamily A, member 1
  Uniprot ID: Q9GZK7
  ENST ID: ENST00000418560
  CDS Start-End: 474-1421
catcctagcagtgaatggaaacacacatatggggagaaactaaggctccctactaaaaacgtgcaacatgtgactgggacatcttgttgagctcaagcagggagggagctgaaggtaggaaattccaacattctgaagtcttcagcaaatcttagcagatcatctcctcctcacagtcctgtctttagagaacagggtcgatatttcgggaatcctatagaaagactccaagcctcagaatgagtttggaccagataaaataatctagagttaaagatggcccacatagggagtgccagattcactcacaaggaaatgcagatgggatcaaaggttaataaacacatattgctttgaatagcatatgaaaaccttccagcagctctaataacgttaggcttggtatagaagatgcagagacatgctaaaatttctcccccaattattgccaagcagaaacttggacgatcgacatggaaattgtctccacaggaaacgaaactattactgaatttgtcctccttggcttctatgacatccctgaactgcatttcttgttttttattgtattcactgctgtctatgtcttcatcatcatagggaatatgctgattattgtagcagtggttagctcccagaggctccacaaacccatgtatattttcttggcgaatctgtccttcctggatattctctacacctccgcagtgatgccaaaaatgctggagggcttcctgcaagaagcaactatctctgtggctggttgcttgctccagttctttatcttcggctctctagccacagctgaatgcttactgctggctgtcatggcatatgaccgctacctggcaatttgctacccactccactacccactcctgatggggcccagacggtacatggggctggtggtcacaacctggctctctggatttgtggtagatggactggttgtggccctggtgacccagctgaggttctgtggccccaaccacattgaccagttttactgtgactttatgcttttcgtgggcctggcttgctcggatcccagagtggctcaggtgacaactctcattctgtctgtgttctgcctcactattccttttggactgattctgacatcttatgccagaattgtggtggcagtgctgagagttcctgctggggcaagcaggagaagggctttctccacatgctcctcccacctagctgtagtgaccacattctatggaacgctcatgatcttttatgttgcaccctctgctgtccattcccagctcctctccaaggtcttctccctgctctacactgtggtcacccctctcttcaatcctgtgatctataccatgaggaacaaggaggtgcatcaggcacttcggaagattctctgtatcaaacaaactgaaacacttgattgaaggagagtaatgaagatgttattttggacttcggacacctccactggggactcttccaggatgggttggagaggagtaactttgtcttattcgaccattctctttgaactcttctgcagttatactaaaaatgaaaatgatagggcaacaattttttaacttttattttaagttcaagggtacatgtgcaggtttgttacataggtaaacttgtgtcatgggggtttactgtacagattatttcatcacccaggtattaagcctagtactcattaatcatttttcctgatcttctccctcctcccaacctccaccctcaagtaggattcagtgtgttgttcccctctatgtatccatatgttttcataatttagctcccacttatgagtgaagacatacggtatttgattttctgttcctgtgttagtttgcgaaggatagtagcctccaattccatccatgtcaaataatcaaaattatttaaactttgattagttctttattaaatatgtcataaatatttaaaaataatacagcaataccaaaataaacctagaaatattgttttttatattattgttgtatgacatttaaaaatttctttctatgtgtatttatatttatacatacaagttggatcatggagtttgtaatctggttttccactgaacactgtgtcacgaacaactttttctattaacaagcatctatttctttattcttctgggcttcatcgtatggctaaacatgatttgttattctattttgggaatttttagttgtattctattcttttactgtacattgtttacatctggattttcctgtaataaacttttagcacctaaattgcaagatctaaggatatgtgtttttaaaaatctaaagctgaattccttttcttttaaacttcttttcttgtagaacatttcaaacatacataaaagagaagagcacagtgaacccccatgtactccatgtagccaccatccagcttcaacatcaacattttgctaatcttattttaattagctacagctccttgtttgttagttttcatggaaaattttagggcaaattccagatgttgtataactattatgttgtgtaagttatgtatgtacatattccacatatgtatttagtataatctgtgactaataaagacattttaaaaaaccatgcccaca

SEQ ID NO: 162004 - DNA, 2482 bp, Homo sapiens
  Payload ID: 11675
  Gene Symbol: OR11A1
  Gene Name: olfactory receptor, family 11, subfamily A, member 1
  Uniprot ID: Q9GZK7
  ENST ID: ENST00000411967
  CDS Start-End: 345-1292
caactcttaattggccctcaaaacttagcctacttgcttctatcttcagaaagccttccccgaccttgatcccacaccttctgccccacaaccccaggctgggtttggtccttctctgctcccatggcacctacttccttccctattaccatttaccacattttcactaccaactcctgaatgacttgatgaaactactatttaaggaaggcaataagtgaagaatatataagaattatccgaggaacagttgctctaataacgttaggcttggtatagaagatgcagagacatgctaaaatttctcccccaattattgccaagcagaaacttggacgatcgacatggaaattgtctccacaggaaacgaaactattactgaatttgtcctccttggcttctatgacatccctgaactgcatttcttgttttttattgtattcactgctgtctatgtcttcatcatcatagggaatatgctgattattgtagcagtggttagctcccagaggctccacaaacccatgtatattttcttggcgaatctgtccttcctggatattctctacacctccgcagtgatgccaaaaatgctggagggcttcctgcaagaagcaactatctctgtggctggttgcttgctccagttctttatcttcggctctctagccacagctgaatgcttactgctggctgtcatggcatatgaccgctacctggcaatttgctacccactccactacccactcctgatggggcccagacggtacatggggctggtggtcacaacctggctctctggatttgtggtagatggactggttgtggccctggtgacccagctgaggttctgtggccccaaccacattgaccagttttactgtgactttatgcttttcgtgggcctggcttgctcggatcccagagtggctcaggtgacaactctcattctgtctgtgttctgcctcactattccttttggactgattctgacatcttatgccagaattgtggtggcagtgctgagagttcctgctggggcaagcaggagaagggctttctccacatgctcctcccacctagctgtagtgaccacattctatggaacgctcatgatcttttatgttgcaccctctgctgtccattcccagctcctctccaaggtcttctccctgctctacactgtggtcacccctctcttcaatcctgtgatctataccatgaggaacaaggaggtgcatcaggcacttcggaagattctctgtatcaaacaaactgaaacacttgattgaaggagagtaatgaagatgttattttggacttcggacacctccactggggactcttccaggatgggttggagaggagtaactttgtcttattcgaccattctctttgaactcttctgcagttatactaaaaatgaaaatgatagggcaacaattttttaacttttattttaagttcaagggtacatgtgcaggtttgttacataggtaaacttgtgtcatgggggtttactgtacagattatttcatcacccaggtattaagcctagtactcattaatcatttttcctgatcttctccctcctcccaacctccaccctcaagtaggattcagtgtgttgttcccctctatgtatccatatgttttcataatttagctcccacttatgagtgaagacatacggtatttgattttctgttcctgtgttagtttgcgaaggatagtagcctccaattccatccatgtcaaataatcaaaattatttaaactttgattagttctttattaaatatgtcataaatatttaaaaataatacagcaataccaaaataaacctagaaatattgttttttatattattgttgtatgacatttaaaaatttctttctatgtgtatttatatttatacatacaagttggatcatggagtttgtaatctggttttccactgaacactgtgtcacgaacaactttttctattaacaagcatctatttctttattcttctgggcttcatcgtatggctaaacatgatttgttattctattttgggaatttttagttgtattctattcttttactgtacattgtttacatctggattttcctgtaataaacttttagcacctaaattgcaagatctaaggatatgtgtttttaaaaatctaaagctgaattccttttcttttaaacttcttttcttgtagaacatttcaaacatacataaaagagaagagcacagtgaacccccatgtactccatgtagccaccatccagcttcaacatcaacattttgctaatcttattttaattagctacagctccttgtttgttagttttcatggaaaattttagggcaaattccagatgttgtataactattatgttgtgtaagttatgtatgtacatattccacatatgtatttagtataatctgtgactaataaagacattttaaaaaaccatgcccaca

SEQ ID NO: 162005 - DNA, 2611 bp, Homo sapiens; identical to SEQ ID NO: 161995
  Payload ID: 11675
  Gene Symbol: OR11A1
  Gene Name: olfactory receptor, family 11, subfamily A, member 1
  Uniprot ID: Q9GZK7
  ENST ID: ENST00000444884
  CDS Start-End: 474-1421

SEQ ID NO: 162006 - DNA, 2229 bp, Homo sapiens
  Payload ID: 11675
  Gene Symbol: OR11A1
  Gene Name: olfactory receptor, family 11, subfamily A, member 1
  Uniprot ID: Q9GZK7
  ENST ID: ENST00000547506
  CDS Start-End: 92-1039
ctctaataacgttaggcttggtatagaagatgcagagacatgctaaaatttctcccccaattattgccaagcagaaacttggacgatcgacatggaaattgtctccacaggaaacgaaactattactgaatttgtcctccttggcttctatgacatccctgaactgcatttcttgttttttattgtattcactgctgtctatgtcttcatcatcatagggaatatgctgattattgtagcagtggttagctcccagaggctccacaaacccatgtatattttcttggcgaatctgtccttcctggatattctctacacctccgcagtgatgccaaaaatgctggagggcttcctgcaagaagcaactatctctgtggctggttgcttgctccagttctttatcttcggctctctagccacagctgaatgcttactgctggctgtcatggcatatgaccgctacctggcaatttgctacccactccactacccactcctgatggggcccagacggtacatggggctggtggtcacaacctggctctctggatttgtggtagatggactggttgtggccctggtggcccagctgaggttctgtggccccaaccacattgaccagttttactgtgactttatgcttttcgtgggcctggcttgctcggatcccagagtggctcaggtgacaactctcattctgtctgtgttctgcctcactattccttttggactgattctgacatcttatgccagaattgtggtggcagtgctgagagttcctgctggggcaagcaggagaagggctttctccacatgctcctcccacctagctgtagtgaccacattctatggaacgctcatgatcttttatgttgcaccctctgctgtccattcccagctcctctccaaggtcttctccctgctctacactgtggtcacccctctcttcaatcctgtgatctataccatgaggaacaaggaggtgcatcaggcacttcggaagattctctgtatcaaacaaactgaaacacttgattgaaggagagtaatgaagatgttattttggacttcggacacctccattggggactcttccaggatgggttggagaggagtaactttgtcttattcgaccattctctttgaactcttctgcagttatactaaaaatgaaaatgatagggcaacaattttttaacttttattttaagttcaagggtacatgtgcaggtttgttacataggtaaacttgtgtcatgggggtttactgtacagattatttcatcacccaggtattaagcctagtactcattaatcatttttcctgatcttctccctcctcccaacctccaccctcaagtaggattcagtgtgttgttcccctctatgtatccatatgttttcataatttagctcccacttatgagtgaagacatacggtatttgattttctgttcctgtgttagtttgcgaaggatagtagcctccaattccatccatgtcaaataatcaaaattatttaaactttgattagttctttattaaatatgtcataaatatttaaaaataatacagcaataccaaaataaacctagaaatattgttttttatattattgttgtatgacatttaaaaatttctttctatgtgtatttatatttatacatacaagttggatcatggagtttgtaatctggttttccactgaacactgtgtcacgaacaactttttctattaacaagcatctatttctttattcttctgggcttcatcgtatggctaaacatgatttgttattctattttgggaatttttagttgtattctattcttttactgtacattgtttacatctggattttcctgtaataaacttttagcacctaaattgcaagatctaaggatatgtgtttttaaaaatctaaagctgaattccttttcttttaaacttcttttcttgtagaacatttcaaacatacataaaagagaagagcacagtgaacccccatgtactccatgtagccaccatccagcttcaacatcaacattttgctaatcttattttaattagctacagctccttgtttgttagttttcatggaaaattttagggcaaattccagatgttgtataactattatgttgtgtaagttatgtatgtacatattccacatatgtatttagtataatctgtgactaataaagacattttaaaaaaccatgcccaca

SEQ ID NO: 162007 - DNA, 2229 bp, Homo sapiens; identical to SEQ ID NO: 162006
  Payload ID: 11675
  Gene Symbol: OR11A1
  Gene Name: olfactory receptor, family 11, subfamily A, member 1
  Uniprot ID: Q9GZK7
  ENST ID: ENST00000552225
  CDS Start-End: 92-1039

SEQ ID NO: 162008 - DNA, 2229 bp, Homo sapiens
  Payload ID: 11675
  Gene Symbol: OR11A1
  Gene Name: olfactory receptor, family 11, subfamily A, member 1
  Uniprot ID: Q9GZK7
  ENST ID: ENST00000548813
  CDS Start-End: 92-1039
ctctaataacgttaggcttggtatagaagatgcagagacatgctaaaatttctcccccaattattgccaagcagaaacttggacgatcgacatggaaattgtctccacaggaaacgaaactattactgaatttgtcctccttggcttctatgacatccctgaactgcatttcttgttttttattgtattcactgctgtctatgtcttcatcatcatagggaatatgctgattattgtagcagtggttagctcccagaggctccacaaacccatgtatattttcttggcgaatctgtccttcctggatattctctacacctccgcagtgatgccaaaaatgctggagggcttcctgcaagaagcaactatctctgtggctggttgcttgctccagttctttatcttcggctctctagccacagctgaatgcttactgctggctgtcatggcatatgaccgctacctggcaatttgctacccactccactacccactcctgatggggcccagacggtacatggggctggtggtcacaacctggctctctggatttgtggtagatggactggttgtggccctggtgacccagctgaggttctgtggccccaaccacattgaccagttttactgtgactttatgcttttcgtgggcctggcttgctcggatcccagagtggctcaggtgacaactctcattctgtctgtgttctgcctcactattccttttggactgattctgacatcttatgccagaattgtggtggcagtgctgagagttcctgctggggcaagcaggagaagggctttctccacatgctcctcccacctagctgtagtgaccacattctatggaacgctcatgatcttttatgttgcaccctctgctgtccattcccagctcctctccaaggtcttctccctgctctacactgtggtcacccctctcttcaatcctgtgatctataccatgaggaacaaggaggtgcatcaggcacttcggaagattctctgtatcaaacaaactgaaacacttgattgaaggagagtaatgaagatgttattttggacttcggacacctccactggggactcttccaggatgggttggagaggagtaactttgtcttattcgaccattctctttgaactcttctgcagttatactaaaaatgaaaatgatagggcaacaattttttaacttttattttaagttcaagggtacatgtgcaggtttgttacataggtaaacttgtgtcatgggggtttactgtacagattatttcatcacccaggtattaagcctagtactcattaatcatttttcctgatcttctccctcctcccaacctccaccctcaagtaggattcagtgtgttgttcccctctatgtatccatatgttttcataatttagctcccacttatgagtgaagacatacggtatttgattttctgttcctgtgttagtttgcgaaggatagtagcctccaattccatccatgtcaaataatcaaaattatttaaactttgattagttctttattaaatatgtcataaatatttaaaaataatacagcaataccaaaataaacctagaaatattgttttttatattattgttgtatgacatttaaaaatttctttctatgtgtatttatatttatacatacaagttggatcatggagtttgtaatctggttttccactgaacactgtgtcacgaacaactttttctattaacaagcatctatttctttattcttctgggcttcatcgtatggctaaacatgatttgttattctattttgggaatttttagttgtattctattcttttactgtacattgtttacatctggattttcctgtaataaacttttagcacctaaattgcaagatctaaggatatgtgtttttaaaaatctaaagctgaattccttttcttttaaacttcttttcttgtagaacatttcaaacatacataaaagagaagagcacagtgaacccccatgtactccatgtagccaccatccagcttcaacatcaacattttgctaatcttattttaattagctacagctccttgtttgttagttttcatggaaaattttagggcaaattccagatgttgtataactattatgttgtgtaagttatgtatgtacatattccacatatgtatttagtataatctgtgactaataaagacattttaaaaaaccatgcccaca

SEQ ID NO: 162009 - DNA, 2229 bp, Homo sapiens; identical to SEQ ID NO: 162006
  Payload ID: 11675
  Gene Symbol: OR11A1
  Gene Name: olfactory receptor, family 11, subfamily A, member 1
  Uniprot ID: Q9GZK7
  ENST ID: ENST00000551986
  CDS Start-End: 92-1039

SEQ ID NO: 162010 - DNA, 2229 bp, Homo sapiens; identical to SEQ ID NO: 162006
  Payload ID: 11675
  Gene Symbol: OR11A1
  Gene Name: olfactory receptor, family 11, subfamily A, member 1
  Uniprot ID: Q9GZK7
  ENST ID: ENST00000549749
  CDS Start-End: 92-1039

SEQ ID NO: 162011 - DNA, 2229 bp, Homo sapiens; identical to SEQ ID NO: 161989
  Payload ID: 11675
  Gene Symbol: OR11A1
  Gene Name: olfactory receptor, family 11, subfamily A, member 1
  Uniprot ID: Q9GZK7
  ENST ID: ENST00000546665
  CDS Start-End: 92-1039

SEQ ID NO: 162012 - DNA, 2229 bp, Homo sapiens; identical to SEQ ID NO: 162006
  Payload ID: 11675
  Gene Symbol: OR11A1
  Gene Name: olfactory receptor, family 11, subfamily A, member 1
  Uniprot ID: Q9GZK7
  ENST ID: ENST00000547645
  CDS Start-End: 92-1039

SEQ ID NO: 162013 - DNA, 1111 bp, Homo sapiens
  Payload ID: 11676
  Gene Symbol: OR11G2
  Gene Name: olfactory receptor, family 11, subfamily G, member 2
  Uniprot ID: Q8NGC1
  ENST ID: ENST00000357366
  CDS Start-End: 1-1038
atgcattttctttcccaaaatgatttaaatataaatctgattccccatctatgtttgcaccgtcattcagtaattgctggtgcttttacaattcacaggcacatgaaaatcttcaacagccccagcaactccagcaccttcactggcttcatcctcctgggcttcccttgccccagggaggggcagatcctcctctttgtgctcttcactgttgtttacctcctgaccctcatgggcaatggttccatcatctgtgctgtgcactgggatcagagactccacgcccccatgtacatcctgctcgccaacttctccttcttggagatatgttatgtcacctccacagtccccagcatgctggccaacttcctctctgacaccaagatcatctcgttctctggctgcttcctccagttctactttttcttctccttgggctctacagaatgctttttcctggcagttatggcatttgatcgataccttgccatctgtcggcctctacgctatccaaccattatgaccagacgtctctgtaccaatcttgtggtcaattgctgggtacttggtttcatctggttcttgattcctatcgtcaacatctcccaaatgtccttctgtggatctaggattattgaccacttcctatgtgacccagctcctcttctaactctcacttgcaaaaaaggccctgtgatagagcttgtcttttctgtcttaagtcctctgcctgtctttatgctctttctcttcattgtggggtcctatgctctggtcgtgagagctgtgttgagggtcccttcagcagctgggagaagaaaggctttctccacctgtgggtctcacctggctgtggtttcactgttctacggctcagtactggtcatgtatgggagcccaccatctaagaatgaagctggaaagcagaagactgtgactctgttttattctgttgttaccccactgcttaaccctgtgatatatagtcttaggaacaaagatatgagaaaagctctgaagaaattttggggaacataaaatgttaatcaaaaaggtccttgcgtaattaatcttgtctttaattttggggtttaaaaaaaaaactggtctt

SEQ ID NO: 162014 - DNA, 982 bp, Homo sapiens
  Payload ID: 11677
  Gene Symbol: OR11H1
  Gene Name: olfactory receptor, family 11, subfamily H, member 1
  Uniprot ID: Q8NG94
  ENST ID: ENST00000252835
  CDS Start-End: 2-982
aatgtgtcccttgaccttgcaggtcactggcctaatgaatgtctctgagccaaattccagctttgcttttgtaaatgaatttatactccaaggtttctcttgtgagtggacaattcagatcttcctcttctcactctttactacaacatatgcactgactataacagggaatggagccattgcttttgtcctgtggtgtgaccggcgacttcacactcccatgtacatgttcctgggaaatttctcctttttagagatatggtatgtctcttctacagttcccaagatgttggtcaacttcctttcagagaaaaaaaacatctcctttgctggatgttttctccagttttatttcttcttctctttgggtacatcagaatgcttgcttttgactgtgatggcctttgatcagtaccttgctatctgccgtcccttgctctatcctaatatcatgactgggcatctctatgccaaactggtcatactgtgctgggtttgtggatttctgtggttcctgatccccattgttctcatctctcagatgcccttctgtggcccaaacattattgaccatgttgtgtgtgacccagggccacgatttgcattggattgtgtttctgccccaagaatccaactgttttgctacactctaagctcattagttatttttggtaacttcctctttattattggatcctatactcttgtcctgaaagctatgttgggtatgccttcaagcactgggagacataaggccttctctacctgtgggtctcatttggctgtggtatcactgtgctatagctctcttatggtcatgtatgtgagcccaggactcggacattctacagggatgcagaaaattgaaactttgttctatgctatggtgaccccactcttcaatccccttatctatagcctccagaataaggagataaaggcagccctgaggaaagttctggggagttccaacataatctaa

SEQ ID NO: 162015 - DNA, 1085 bp, Homo sapiens
  Payload ID: 11678
  Gene Symbol: OR11H12
  Gene Name: olfactory receptor, family 11, subfamily H, member 12
  Uniprot ID: B2RN74
  ENST ID: ENST00000550708
  CDS Start-End: 73-1053
tgacttcatgttcattatcttctcttcattcttaaaaaaggaacacattttataaaagagtcctgactgataatgtgtcccttgaccttgcaggtcactggcctaatgaatgtctctgagccaaattccagctttgcttttgtaaatgaatttatactccaaggtttcacttgtgagtggacaattcagatcttcctcttctcactctttactacaacatatgcactgactataacagggaatggagccattgcttttgtcctgtggtgtgactggcgacttcacactcccatgtacatgttcctgggaaatttctcctttttagagatatggtatgtctcttctacagttcccaagatgttggtcaacttcctttcagagaaaaaaaacatctcctttgctggatgttttctccagttttatttcttcttctctttgggtacatcagaatgcttgcttttgactgtgatggcctttgatcagtaccttgctatctgccgtcccttgctctatcctaatatcatgactgggcatctctgtgccaaactggtcatactgtgctgggtttgtggatttctgtggttcctgatccccattgttctcatctctcagatgcccttctgtggcccaaacattattgaccatgttgtgtgtgacccagggccacgatttgcattggattgtgtttctgccccaagaatccaactgttttgctacactctaagctcattagttatttttggtaacttcctctttattattggatcctatactcttgtcctgaaagctgtgttgggtatgccttcaagcactgggagacataaggccttctctacctgtgggtctcatttggctgtggtatcactgtgctatagctctcttatggtcatgtatgtgagcccaggactcggacattctacagggatgcagaaaattgaaactttgttctatgctatggtgaccccactcttcaatccccttatctatagcctccagaataaggagataaaggcagccctgaggaaagttctgggaagttccaacataatctaaggcatattagattattcctccatgatcagatc

SEQ ID NO: 162016 - DNA, 985 bp, Homo sapiens
  Payload ID: 11679
  Gene Symbol: OR11H2
  Gene Name: olfactory receptor, family 11, subfamily H, member 2
  Uniprot ID: Q8NH07
  ENST ID: ENST00000556246
  CDS Start-End: 5-985
gataatgtgtcccttgaccttgcatgtcactggcctaatgaatgtctctgagccaaattccagctttgcttttgtaaatgaatttatactccaaggtttctcttgtgagtggacaattcagatcttcctcttctcactctttactacaatatatgcactgactataacagggaatggagccattgcttttgtcctgtggtgtgaccggcgacttcacactcccatgtacatgttcctgggaaatttctcctttttagagatatggtatgtctcttctacagttcccaagatgttggtcaacttcctttcagagaaaaaaaacatctcctttgctggatgttttctccagttttatttcttcttctctttgggtacatcagaatgcttgcttttgactgtgatggcctttgatcagtaccttgctatctgccgtcccttgctctatcctaatatcatgactgggcatctctatgccaaactggtcatactgtgctgggtttgtggatttctgtggttcctgatccccattgttctcatctctcagaagcccttctgtggcccaaacattattgaccatgttgtgtgtgacccagggccactatttgcattggattgtgtttctgccccaagaatccaactgttttgctacactctaagctcattagttatttttggtaacttcctctttattattggatcctatactcttgtcctgaaagctgtgttgggtatgccttcaagcactgggagacataaggccttctctacctgtgggtctcatttggctgtggtatcactgtgctatagccctcttatggtcatgtatgtgagcccaggactcggacattctacagggatgcagaaaattgaaactttgttctatgctatggtgaccccactcttcaatccccttatctatagcctccagaataaggagataaaggcagccctgaggaaagttctggggagttccaacataatctaa

SEQ ID NO: 162017 - DNA, 1082 bp, Homo sapiens
  Payload ID: 11680
  Gene Symbol: OR11H4
  Gene Name: olfactory receptor, family 11, subfamily H, member 4
  Uniprot ID: Q8NGC9
  ENST ID: ENST00000315409
  CDS Start-End: 54-1028
tgagatacgtagcaagcaattggattacactccaagagacttggattacactcatgtctttcttctttgtagacttaagacccatgaacaggtcagcaacacacatcgtgacagagtttattctcctgggattccctggttgctggaagattcagattttcctcttctcattgtttttggtgatttatgtcttgaccttgctgggaaatggagccatcatctatgcagtgagatgcaacccactactacacacccccatgtactttctgctgggaaattttgccttccttgagatctggtatgtgtcctccactattcctaacatgctagtcaacattctctccaagaccaaggccatctcattttctgggtgcttcctccagttctatttcttcttttcactgggaacaactgaatgtctctttctggcagtaatggcttatgatcgatacctggccatctgccacccactgcagtaccctgccatcatgactgtaaggttctgtggtaagctggtgtctttctgttggcttattggattccttggatacccaattcccattttctacatctcccaactccccttctgtggtcctaatatcattgatcacttcctgtgtgacatggacccattgatggctctatcctgtgccccagctcccataactgaatgtattttctatactcagagctcccttgtcctctttttcactagtatgtacattcttcgatcctatatcctgttactaacagctgtttttcaggtcccttctgcagctggtcggagaaaagccttctctacctgtggttctcatttggttgtggtatctcttttctatgggacagtcatggtaatgtatgtaagtcctacatatgggatcccaactttattgcagaagatcctcacactggtatattcagtaacgactcctctttttaatcctctgatctatactcttcgtaataaggacatgaaactcgctctgagaaatgtcctgtttggaatgagaattcgtcaaaattcgtgagccaaagatgtgccatacttacaagttctaacgaagaacaaggtcgagatgttg

SEQ ID NO: 162018 - DNA, 1174 bp, Homo sapiens
  Payload ID: 11681
  Gene Symbol: OR11H6
  Gene Name: olfactory receptor, family 11, subfamily H, member 6
  Uniprot ID: Q8NGC7
  ENST ID: ENST00000315519
  CDS Start-End: 79-1071
tcattaggaagaccaaatgagataatgtatgtaaaaatacttagtacatcatccagcatgagttagcaaaatctccaaatgttctttattattcattctttggttacttctgtttttctaacagctttgggaccccagaacagaacaatgcattttgtgactgagtttgtcctcctgggtttccatggtcaaagggagatgcagagctgcttcttctcattcatcctggttctctatctcctgacactgctagggaatggagctattgtctgtgcagtgaaattggacaggcggctccacacacccatgtacatccttctgggaaactttgcctttctagagatctggtacatttcctccactgtcccaaacatgctagtcaatatcctctctgagattaaaaccatctccttctctggttgcttcctgcaattctatttctttttttcactgggtacaacagagtgtttctttttatcagttatggcttatgatcggtacctggccatctgtcgtccattacactacccctccatcatgactgggaagttctgtataattctggtctgtgtatgctgggtaggcggatttctctgctatccagtccctattgttcttatctcccaacttcccttctgtgggcccaacatcattgaccacttggtgtgtgacccaggcccattgtttgcactggcctgcatctctgctccttccactgagcttatctgttacaccttcaactcgatgattatctttgggcccttcctctccatcttgggatcttacactctggtcatcagagctgtgctttgtattccctctggtgctggtcgaactaaagctttctccacatgtgggtcccacctaatggtggtgtctctattctatggaacccttatggtgatgtatgtgagcccaacatcagggaacccagcaggaatgcagaagatcatcactctggtatacacagcaatgactccattcttaaatccccttatctatagtcttcgaaacaaagacatgaaagatgctctaaagagagtcctggggttaacagttagccaaaactgagatatctttgaaaaagaagccaaattggccacttctgaccttaattttttataactatagagagtagcttcagtagtatgttctggctcacactcaggtagac

SEQ ID NO: 162019 - DNA, 940 bp, Homo sapiens
  Payload ID: 11682
  Gene Symbol: OR11H7
  Gene Name: olfactory receptor, family 11, subfamily H, member 7 (gene/pseudogene)
  ENST ID: ENST00000553765
  CDS Start-End: 1-940
atgaataactcacagatatctactgtgacgcagtttgtgttgttggggtttcctggtccctggaaaattcagatcatctttttctcaatgattttgttggtctacatcttcactctgactgggaatatggccatcatctgtgcagtgaggtgggaccatcgactccatacccctatgtacgtgctcctagccaacttctccttcctagagatctggtatgtgacctgcacagtccccaacatgctggtaaattttttctccaaaactaagaccatatcattctctggatgtttcactcagttccacttcttcttttccctgggcacaactgaatgcttcttcctctgtgtcatggcttatgatcggtacctggccatctgccacccactgcactatccctccattatgactggccagctctgtggcatcttggtgtctctttgttggctcattggtttccttggacattcaatttccattttcttcatttttcaactacctttctgtggtcccaacatcattgatcattttctgtgtgatgtagacccactgatggcattgtcctctgcccctactcacatcatagggcatgtgttccattctgtgagctctcttttcatcaacctcaccatggtgtacatccttgggtcctataccttggtgctcagaactgtgctttaggttccttcttcagctggatggcaaaaggccatctctacctgtgggtcacacttggttgttgtgtctctgttctatggagccataatgctgatgtatgtgagtcccacacctggcaactcagttgctatgcataagctcatcacactgatatattctgtggtaacacctgtcttaaaccccctcatctacagcctacgcaacaaggacatgaaatatgccctccatcatgtcttctgtggaatgagaattatccagagat

SEQ ID NO: 162020 - DNA, 969 bp, Homo sapiens
  Payload ID: 11683
  Gene Symbol: OR11L1
  Gene Name: olfactory receptor, family 11, subfamily L, member 1
  Uniprot ID: Q8NGX0
  ENST ID: ENST00000355784
  CDS Start-End: 1-969
atggagccccaaaatacctccactgtgactaactttcagctgttaggattccagaaccttcttgaatggcaggccctgctctttgtcattttcctgctcatctactgcctgaccattatagggaatgttgtcatcatcaccgtggtgagccagggcctgcgactgcactcccctatgtacatgttcctccagcatctctcctttctggaggtctggtacacgtccaccactgtgccccttctcctagccaacctgctgtcctggggccaagccatctccttctctgcctgcatggcacagctctacttcttcgtattcctcggcgccaccgagtgctttctcctggccttcatggcctatgaccgttacctggccatctgcagcccactccgctaccccttcctcatgcatcgtgggctctgtgccaggttggtggtggtctcctggtgcacaggggtcagcacaggctttctgccttccctgatgatttccaggttggacttctgtgggcgcaatcagattaaccatttcttctgcgacctcccgccactcatgcagctctcctgttccagagtttatatcaccgaggtgaccatcttcatcctgtcaattgccgtgctgtgcatttgtttttttctgacactggggccctatgttttcattgtgtcctccatattgagaatcccttccacctctggccggagaaagaccttttccacatgtggctcccacctggctgttgtcactctctactacgggaccatgatctccatgtatgtgtgtcccagtccccacctgttgcctgaaatcaacaagatcatttctgtcttctacactgtggtcacaccactgctgaacccagttatctacagcttgaggaacaaagacttcaaagaagctgttagaaaggtcatgagaaggaaatgtggtattctatggagtacaagtaaaaggaagttcctttattag

SEQ ID NO: 162021 - DNA, 947 bp, Homo sapiens
  Payload ID: 11684
  Gene Symbol: OR12D1
  Gene Name: olfactory receptor, family 12, subfamily D, member 1 (gene/pseudogene)
  ENST ID: ENST00000514827
  CDS Start-End: 1-947
atgctgaatacaacctcagtcactgaatttctccttttgggagtgacagacattcaagaactgcagccttttctcttcgttgttttccttaccatctacttcatcagtgtggctgggaatggagccattctgatgattgtcatctctgatcctagactccattcccctatgtatttcttcttgggaaacctgtcctgcctggacatctgctactccagcgtaacactgccaaaaatgctgcagaacttcctctctgcacacaaagcaatttctttcttgggatgcataagccaactccatttcttccacttcctgggcagcacagaggccatgttgttggccgtgatggcatttgaccgctttgtggctatttgcaagccacttcgctacactgtcattatgaaccctcagctctgtacccagatggccatcacaatctggatgattggttttttccatgccctgctgcactccctaatgacctctcgcttgaacttctgtggttctaaccgtatctatcacttcttctgtgatgtgaagccattgctaaagctgagcttaatcagtggctgctcagtactgtcacagggacaatcgccatgggccccttctttctcacattactctcctatttctacattatcacccatctcttcttcaagactcattcttttagcatgctccgcaaagcactgtccacttgtgcctcccacttgatggtagttattcttttgtatgcacctgttctcttcacctatattcatcatgcctcagggacctccatggaccaggaccggatcactgccatcatgtatactgtggtcactccagtactaaacccactgatctacactttgaggaacaaggaagtgaaaggggcctttaatagagcaatgaaaaggtggctttggcctaaagaaatcttgaagaactcttctgaagcataa

SEQ ID NO: 162022 - DNA, 1069 bp, Homo sapiens
  Payload ID: 11685
  Gene Symbol: OR12D2
  Gene Name: olfactory receptor, family 12, subfamily D, member 2 (gene/pseudogene)
  Uniprot ID: P58182
  ENST ID: ENST00000377140
  CDS Start-End: 146-1069
agcttctatacaacttctgaggtttggaagaagtacaacagtactctccttccaagtatctttggcttggtgagaaaattctgagccggaaggattctgattgcgattagtgttccatagattattttgtcttttgtctgaagtgatgctgaatacaacctcagtcaccgaatttctcctcttgggagtgacagacattcaagaactgcagccttttctcttcgtggttttcctcaccatctacttcatcagtgtgactgggaatggagccgttctgatgattgtcatctccgatcctagactccattcccttatgtatttcttcctgggaaacctgtcctacctggatatctgttactctacggtgacactgccaaaaatgctgcagaactttctctctacacacaaagcaatttctttcttgggatgcataagccagcttcatttcttccacttcctgggcagcacggagtccatgttgttcgccgtgatggcatttgacctctctgtggctatctgcaagccacttcgctacactgtcatcatgaaccctcagctctgtacccagatggccatcacaatctgggtcattggttttttccatgccctgctgcactccgtaatgacttctcgcttgaacttctgtggttccaaccgtatccatcattttctctgtgatattaagccattgctaaagctggcctgtgggaacactgagcttaatcagtggctactcagtactgtcacggggacaattgccatgggccccttctttctgacacttctctcctatttctacattatcacttatctcttcttcaagacccgttcttgtagcatgctctgtaaagcactgtccacttgtgcctcccacttcatggtagttattcttttctatgcacctgttcttttcacctatatccatcctgcgttagagagcttcatggaccaggaccggattgttgccatcatgtacactgtggtcactcctgtactaaacccactgatctatactttgaggaacaaggaagtgaagggggccttgggtagagtgatcagaaggctttga

SEQ ID NO: 162023 - DNA, 924 bp, Homo sapiens
  Payload ID: 11685
  Gene Symbol: OR12D2
  Gene Name: olfactory receptor, family 12, subfamily D, member 2 (gene/pseudogene)
  Uniprot ID: P58182
  ENST ID: ENST00000383555
  CDS Start-End: 1-924
atgctgaatacaacctcagtcaccgaatttctcctcttgggagtgacagacattcaagaactgcagccttttctcttcgtggttttcctcaccatctacttcatcagtgtgactgggaatggagccgttctgatgattgtcatctccgatcctagactccattcccttatgtatttcttcctgggaaacctgtcctacctggatatctgttactctacggtgacactgccaaaaatgctgcagaactttctctctacacacaaagcaatttctttcttgggatgcataagccagcttcatttcttccactccctgggcagcacggagtccatgttgttcgccgtgatggcatttgacctctctgtggctatctgcaagccacttcgctacactgtcatcatgaaccctcagctctgtacccagatggccatcacaatctgggtcattggttttttccatgccctgctgcactccgtaatgacttctcgcttgaacttctgtggttccaaccgtatccatcattttctctgtgatattaagccattgctaaagctggcctgtgggaacactgagcttaatcagtggctactcagtactgtcacggggacaattgccatgggccccttctttctgacacttctctcctatttctacattatcacttatctcttcttcaagacccgttcttgtagcatgctctgtaaagcactgtccacttgtgcctcccacttcatggtagttattcttttctatgcacctgttcttttcacctatatccatcctgcgttagagagcttcatggaccaggaccggattgttgccatcatgtacactgtggtcactcctgtactaaacccactgatctatactttgaggaacaaggaagtgaagggggccttgggtagagtgatcagaaggctttga

SEQ ID NO: 162024 - DNA, 1069 bp, Homo sapiens
  Payload ID: 11685
  Gene Symbol: OR12D2
  Gene Name: olfactory receptor, family 12, subfamily D, member 2 (gene/pseudogene)
  ENST ID: ENST00000432767
  CDS Start-End: 146-1069
agcttctatacaacttctgaggtttggaagaagtacaacagtactctccttccaagtatctttggcttggtgagaaaattctgagccggaaggattctgattgcgattagtgttccatagattattttgtcttttgtctgaagtgatgctgaatacaacctcagtcaccgaatttctcctcttgggagtgacagacattcaagaactgcagccttttctcttcgtggttttcctcaccatctacttcatcagtgtgactgggaatggagccgttctgatgattttcatctccgatcctagactccattcccctatgtatttcttcctgggaaacctgtcctacctggatatctgttactctacggtgacactgccaaaaatgctgcagaactttctctctacacacaaagcaatttctttcttgggatgcataagccagcttcatttcttccacttcctgggcagcacggagtccatgttgttggccgtgatggcatttgaccgctctgtggctatctgcaagccacttcgctacactgtcatcatgaaccctcagctctgtacccagatggccatcacaatctgggtcattggttttttccatgccctgctgcactccataatgacttctcgcttgaacttctgtggttccaaccgtatccatcattttctctgtgatattaagccattgctaaagctggcctgtgggaacactgagcttaatcagtggctactcagtactgtcacggggacaattgccatgggccccttctttctgacacttctctcctatttctacattatcacttatctcttcttcaagacccgttcttgtagcatgctctgtaaagcactgtccacttgtgcctcccacttcatggtagttattcttttctatgcacctgttctcttcacctatatccatcctgcgttagagagcttcatggaccaggaccggattgttgccatcatgtacactgtggtcactcctgtactaaacccactgatctatactttgaggaacaaggaagtgaagggggccttgggtagagtgatcagaaggctttga

SEQ ID NO: 162025 - DNA, 1069 bp, Homo sapiens
  Payload ID: 11685
  Gene Symbol: OR12D2
  Gene Name: olfactory receptor, family 12, subfamily D, member 2 (gene/pseudogene)
  ENST ID: ENST00000443442
  CDS Start-End: 146-1069
agcttctatacaacttctgaggtttggaagaagtacaacagtactctccttccaagtatctttggcttggtgagaaaattctgagccggaaggattctgattgcgattagtgttccatagattattttgtcttttgtctgaagtgatgctgaatacaacctcagtcaccgaatttctcctcttgggagtgacagacattcaagaactgcagccttttctcttcgtggttttcctcaccatctacttcatcagtgtgactgggaatggagccgttctgatgattttcatctccgatcctagactccattcccctatgtatttcttcctgggaaacctgtcctacctggatatctgttactctacggtgacactgccaaaaatgctgcagaactttctctctacacacaaagcaatttctttcttgggatgcataagccagcttcatttcttccacttcctgggcagcacggagtccatgttgttggccgtgatggcatttgaccgctgtgtggctatctgcaagccacttcgctacactgtcatcatgaaccctcagctctgtacccagatggccatcacaatctgggtcattggttttttccatgccctgctgcactccataatgacttctcgcttgaacttctgtggttccaaccgtatccatcattttctctgtgatattaagccattgctaaagctggcctgtgggaacactgagcttaatcagtggctactcagtactgtcacggggacaattgccatgggccccttctttctgacacttctctcctatttctacattatcacttatctcttcttcaagacccgttcttgtagcatgctctgtaaagcactgtccacttgtgcctcccacttcatggtagttattcttttctatgcacctgttctcttcacctatatccatcctgcgttagagagcttcatggaccaggaccggattgttgccatcatgtacactgtggtcactcctgtactaaacccactgatctatactttgaggaacaaggaagtgaagggggccttgggtagagtgatcagaaggctttga

SEQ ID NO: 162026 - DNA, 1069 bp, Homo sapiens; identical to SEQ ID NO: 162022
  Payload ID: 11685
  Gene Symbol: OR12D2
  Gene Name: olfactory receptor, family 12, subfamily D, member 2 (gene/pseudogene)
  Uniprot ID: P58182
  ENST ID: ENST00000414415
  CDS Start-End: 146-1069

SEQ ID NO: 162027 - DNA, 1069 bp, Homo sapiens; identical to SEQ ID NO: 162022
  Payload ID: 11685
  Gene Symbol: OR12D2
  Gene Name: olfactory receptor, family 12, subfamily D, member 2 (gene/pseudogene)
  Uniprot ID: P58182
  ENST ID: ENST00000438569
  CDS Start-End: 146-1069

SEQ ID NO: 162028 - DNA, 1033 bp, Homo sapiens
  Payload ID: 11685
  Gene Symbol: OR12D2
  Gene Name: olfactory receptor, family 12, subfamily D, member 2 (gene/pseudogene)
  Uniprot ID: P58182
  ENST ID: ENST00000623508
  CDS Start-End: 62-985
gccggaaggattctgattgcgattagtgttccatagattattttgtcttttgtctgaagtgatgctgaatacaacctcagtcaccgaatttctcctcttgggagtgacagacattcaagaactgcagccttttctcttcgtggttttcctcaccatctacttcatcagtgtgactgggaatggagccgttctgatgattgtcatctccgatcctagactccattcccttatgtatttcttcctgggaaacctgtcctacctggatatctgttactctacggtgacactgccaaaaatgctgcagaactttctctctacacacaaagcaatttctttcttgggatgcataagccagcttcatttcttccactccctgggcagcacggagtccatgttgttcgccgtgatggcatttgacctctctgtggctatctgcaagccacttcgctacactgtcatcatgaaccctcagctctgtacccagatggccatcacaatctgggtcattggttttttccatgccctgctgcactccgtaatgacttctcgcttgaacttctgtggttccaaccgtatccatcattttctctgtgatattaagccattgctaaagctggcctgtgggaacactgagcttaatcagtggctactcagtactgtcacggggacaattgccatgggccccttctttctgacacttctctcctatttctacattatcacttatctcttcttcaagacccgttcttgtagcatgctctgtaaagcactgtccacttgtgcctcccacttcatggtagttattcttttctatgcacctgttcttttcacctatatccatcctgcgttagagagcttcatggaccaggaccggattgttgccatcatgtacactgtggtcactcctgtactaaacccactgatctatactttgaggaacaaggaagtgaagggggccttgggtagagtgatcagaaggctttgatttgaataaaccagagaactctactgaggcataaataaccagcaatga

SEQ ID NO: 162029 - DNA, 1069 bp, Homo sapiens
  Payload ID: 11685
  Gene Symbol: OR12D2
  Gene Name: olfactory receptor, family 12, subfamily D, member 2 (gene/pseudogene)
  Uniprot ID: P58182
  ENST ID: ENST00000623183
  CDS Start-End: 146-1069
agcttctatacaacttctgaggtttggaagaagtacaacagtactctccttccaagtatctttggcttggtgagaaaattctgagccggaaggattctgattgcgattagtgttccatagattattttgtcttttgtctgaagtgatgctgaatacaacctcagtcaccgaatttctcctcttgggagtgacagacattcaagaactgcagccttttctcttcgtggttttcctcaccatctacttcatcagtgtgactgggaatggagccgttctgatgattgtcatctccgatcctagactccattcccttatgtatttcttcctgggaaacctgtcctacctggatatctgttactctacggtgacactgccaaaaatgctgcagaactttctctctacacacaaagcaatttctttcttgggatgcataagccagcttcatttcttccactccctgggcagcacggagtccatgttgttcgccgtgatggcatttgacctctctgtggctatctgcaagccacttcgctacactgtcatcatgaaccctcagctctgtacccagatggccatcacaatctgggtcattggttttttccatgccctgctgcactccgtaatgacttctcgcttgaacttctgtggttccaaccgtatccatcattttctctgtgatattaagccattgctaaagctggcctgtgggaacactgagcttaatcagtggctactcagtactgtcacggggacaattgccatgggccccttctttctgacacttctctcctatttctacattatcacttatctcttcttcaagacccgttcttgtagcatgctctgtaaagcactgtccacttgtgcctcccacttcatggtagttattcttttctatgcacctgttcttttcacctatatccatcctgcgttagagagcttcatggaccaggaccggattgttgccatcatgtacactgtggtcactcctgtactaaacccactgatctatactttgaggaacaaggaagtgaagggggccttgggtagagtgatcagaaggctttga

SEQ ID NO: 162030 - DNA, 2011 bp, Homo sapiens
  Payload ID: 11686
  Gene Symbol: OR12D3
  Gene Name: olfactory receptor, family 12, subfamily D, member 3
  Uniprot ID: Q9UGF7
  ENST ID: ENST00000383556
  CDS Start-End: 147-1097
aaactgtgctgccacaggcccatttttcggtgagaaagctagaaaagttggaggacttattctaagtcacgctgttaccagcctagaggggcatctcagtgttttgagcagcttctcgttttgtgagctttgtggatgagtgagcaatggagaatgtcactacaatgaatgagtttcttctacttggcctgactggtgttcaggagctgcagcctttcttctttgggattttcttaatcatttacctgataaacttgattggaaatggatctatattggtgatggttgttttggaaccacaactccactcccctatgtatttttttctgggaaacctttcttgtctggatatttcttattcttcagtgacactgcccaagctgctcgtaaacctcgtgtgcagtcgcagggctatatcttttctaggctgtatcacccagctacacttcttccactttttgggaagcacagaggccattttactggctatcatggcctttgaccgttttgttgccatctgcaatcctcttcgctacactgtcatcatgaacccccaggtgtgtattctgttggcagctgcagcctggctcatcagcttcttttacgctctgatgcattctgtcatgactgcacacctgagtttttgtggctctcagaaactcaatcacttcttctacgatgtcaagccgctcttagaattggcctgtagtgacacattactcaatcaatggcttctttccattgtcacaggcagcatatccatgggagctttctttctgactcttctctcctgcttctatgtaattggcttccttctgtttaagaacaggtcctgcagaatactccacaaggctctgtccacttgtgcctcccattttatggtggtatgtcttttctatggacctgtgggcttcacatatattcgtcctgcttcagccacctccatgattcaggaccggataatggccatcatgtatagcgccgtcacccctgtactgaatccactaatctacacccttaggaacaaagaagtgatgatggctctgaagaaaatctttggtaggaagttgtttaaagactggcagcaacaccactaggactaatgagggatatctgatttctattaagactgatttccatcacttcactgtaagaaatgatttgtttacctggtttatatttttctttcaaaaattttgagcacatattatattaggcagtgtagtaggttcaagaaacacaggagcaagcaaaacaaattccataatgtcatcaaacataaagtttaatgtgatggaggccccaaataaccaaacgcgtaagtacatatgtcaggataattcggtggcaaggagaactaaggaggtaggaagtatggggagggttagagtaggaatctgctgtgtaaaaaagaatgtggcatttctcctaggacaaaaacctttggaattttccaagtaatagaagtatcttactgaaattccatatgagataatctttatttttgcctattttttttccttttgtgtttccttcagcaggaatgtactgatgataatttttctcacaacagtttttatctagaatgtcatttttgttaatcttaattcttgaagagaatttttaatgggtatttaattttagggagagatttttctagccattgaaaatatcttgtttttccccagcttattgaagtataattaacaaataaaaattgcatatatttaggcttcacaacatgatgctttagtatatgtatacattgtgaagagactaccacaatcaagctaaacctacattactgtccctgcattagtttactgttgaatactagaagttcttcgttctatctaactgcattttcatacccattaagccaatgtgacaagctctttgttttagttggagtgtttgcacaatttaaatttgataaatttttgatagaattaaatttaaatttatcctccaactaaatttttgatagaattaaatttaaatttgtcctcca

SEQ ID NO: 162031 - DNA, 1869 bp, Homo sapiens
  Payload ID: 11686
  Gene Symbol: OR12D3
  Gene Name: olfactory receptor, family 12, subfamily D, member 3
  Uniprot ID: Q9UGF7
  ENST ID: ENST00000396806
  CDS Start-End: 5-955
agcaatggagaatgtcactacaatgaatgagtttcttctacttggcctgactggtgttcaggagctgcagcctttcttctttgggattttcttaatcatttacctgataaacttgattggaaatggatctatattggtgatggttgttttggaaccacaactccactcccctatgtatttttttctgggaaacctttcttgtctggatatttcttattcttcagtgacactgcccaagctgctcgtaaacctcgtgtgcagtcgcagggctatatcttttctaggctgtatcacccagctacacttcttccactttttgggaagcacagaggccattttactggctatcatggcctttgaccgttttgttgccatctgcaatcctcttcgctacactgtcatcatgaacccccaggtgtgtattctgttggcagctgcggcctggctcatcagcttcttttacgctctgatgcattctgtcatgactgcacacctgagtttttgtggctctcagaaactcaatcacttcttctacgatgtcaagccgctcttagaattggcctgtagtgacacattactcaatcaatggcttctttccattgtcacaggcagcatatccatgggagctttctttctgactcttctctcctgcttctatgtaattggcttccttctgtttaagaacaggtcctgcagaatactccacaaggctctgtccacttgtgcctcccattttatggtggtatgtcttttctatggacctgtgggcttcacatatattcgtcctgcttcagccacctccatgattcaggaccggataatggccatcatgtatagcgccgtcacccctgtactgaatccactaatctacacccttaggaacaaagaagtgatgatggctctgaagaaaatctttggtaggaagttgtttaaagactggcagcaacaccactaggactaatgagggatatctgatttctattaagactgatttccatcacttcactgtaagaaatgatttgtttacctggtttatatttttctttcaaaaattttgagcacatattatattaggcagtgtagtaggttcaagaaacacaggagcaagcaaaacaaattccataatgtcatcaaacataaagtttaatgtgatggaggccccaaataaccaaacgcgtaagtacatatgtcaggataattcggtggcaaggagaactaaggaggtaggaagtatggggagggttagagtaggaatctgctgtgtaaaaaagaatgtggcatttctcctaggacaaaaacctttggaattttccaagtaatagaagtatcttactgaaattccatatgagataatctttatttttgcctattttttttccttttgtgtttccttcagcaggaaagtactgatgataatttttctcacaacagtttttatctagaatatcatttttgttaatcttaattcttgaagagaatttttaatgggtatttaattttagggagagatttttctagccattgaaaatatcttgtttttccccagcttattgaagtataattaacaaataaaaattgcatatatttaggcttcacaacatgatgctttagtatatgtatacattgtgaagagactaccacaatcaagctaaacctacattactgtccctgcattagtttactgttgaatactagaagttcttcattctatctaactgcattttcatacccattaagccaatgtgacaagctctttgtttcagttggagtgtttgcacaatttaaatttgataaatttttgatagaattaaatttaaatttatcctccaactaaatttttgatagaattaaatttaaatttgtcctcca

SEQ ID NO: 162032 - DNA, 2011 bp, Homo sapiens
  Payload ID: 11686
  Gene Symbol: OR12D3
  Gene Name: olfactory receptor, family 12, subfamily D, member 3
  Uniprot ID: Q9UGF7
  ENST ID: ENST00000430148
  CDS Start-End: 147-1097
aaactgtgctgccacaggcccatttttcggtgagaaagctagaaaagttggaggacttgttctaagtcacgctgttaccagcctagaggggcatctcagtgttttgagcagcttctcgttttgtgagctttgtggatgagtgagcaatggagaatgtcactacaatgaatgagtttcttctacttggcctgactggtgttcaggagctgcagcctttcttctttgggattttcttaatcatttacctgataaacttgattggaaatggatctatattggtgatggttgttttggaaccacaactccactcccctatgtatttttttctgggaaacctttcttgtctggatatttcttattcttcagtgacactgcccaagctgcttgtaaacctcgtgtgcagtcgcagggctatatcttttctaggctgtatcacccagctacacttcttccactttttgggaagcacagaggccattttactggctatcatggcctttgaccgttttgttgccatctgcaatcctcttcgctacactgtcatcatgaacccccaggtgtgtattctgttggcagctgcggcctggctcatcagcttcttttacgctctgatgcattctgtcatgactgcacacctgagtttttgtggctctcagaaactcaatcacttcttctacgatgtcaagccgctcttagaattggcctgtagtgacacattactcaatcaatggcttctttccattgtcacaggcagcatatccatgggagctttctttctgactcttctctcctgcttctatgtaattggcttccttctgtttaagaacaggtcctgcagaatactccacaaggctctgtccacttgtgcctcccattttatggtggtatgtcttttctatggacctgtgggcttcacatatattcgtcctgcttcagccacctccatgattcaggaccggataatggccatcatgtatagcgccgtcacccctgtactgaatccactaatctacacccttaggaacaaagaagtgatgatggctctgaagaaaatctttggtaggaagttgtttaaagactggcagcaacaccactaggactaatgagggatatctgatttctattaagactgatttccatcacttcactgtaagaaatgatttgtttacctggtttatatttttctttcaaaaattttgagcacatattatattaggcagtgtagtaggttcaagaaacacaggagcaagcaaaacaaattccataatgtcatcaaacataaagtttaatgtgatggaggccccaaataaccaaacgcgtaagtacatatgtcaggataattcggtggcaaggagaactaaggaggtaggaagtatggggagggttagagtaggaatctgctgtgtaaaaaagaatgtggcatttctcctaggacaaaaacctttggaattttccaagtaatagaagtatcttactgaaattccatatgagataatctttatttttgcctattttttttccttttgtgtttccttcagcaggaatgtactgatgataatttttctcacaacagtttttatctagaatatcatttttgttaatcttaattcttgaagagaatttttaatgggtatttaattttagggagagatttttctagccattgaaaatatcttgtttttccccagcttattgaagtataattaacaaataaaaattgcatatatttaggcttcacaacatgatgctttagtatatgtacacattgtgaagagactaccacaatcaagctaaacctacattactgtccctgcattagtttactgttgaatactagaagttcttcattctatctaactgcattttcatacccattaagccaatgtgacaagctctttgtttcagttggagtgtttgcacaatttaaatttgataaatttttgatagaattaaatttaaatttatcctccaactaaatttttgatagaattaaatttaaatttgtcctcca

SEQ ID NO: 162033 - DNA, 2011 bp, Homo sapiens
  Payload ID: 11686
  Gene Symbol: OR12D3
  Gene Name: olfactory receptor, family 12, subfamily D, member 3
  Uniprot ID: Q9UGF7
  ENST ID: ENST00000505384
  CDS Start-End: 147-1097
aaactgtgctgccacaggcccatttttcggtgagaaagctagaaaagttggaggacttattctaagtcacgctgttaccagcctagaggggcatctcagtgttttgagcagcttctcgttttgtgagctttgtggatgagtgagcaatggagaatgtcactacaatgaatgagtttcttctacttggcctgactggtgttcaggagctgcagcctttcttctttgggattttcttaatcatttacctgataaacttgattggaaatggatctatattggtgatggttgttttggaaccacaactccactcccctatgtatttttttctgggaaacctttcttgtctggatatttcttattcttcagtgacactgcccaagctgcttgtaaacctcgtgtgcagtcgcagggctatatcttttctaggctgtatcacccagctacacttcttccactttttgggaagcacagaggccattttactggctatcatggcctttgaccgttttgttgccatctgcaatcctcttcgctacactgtcatcatgaacccccaggtgtgtattctgttggcagctgcggcctggctcatcagcttcttttacgctctgatgcattctgtcatgactgcacacctgagtttttgtggctctcagaaactcaatcacttcttctacgatgtcaagccgctcttagaattggcctgtagtgacacattactcaatcaatggcttctttccattgtcacaggcagcatatccatgggagctttctttctgactcttctctcctgcttctatgtaattggcttccttctgtttaagaacaggtcctgcagaatactccacaaggctctgtccacttgtgcctcccattttatggtggtatgtcttttctatggacctgtgggcttcacatatattcgtcctgcttcagccacctccatgattcaggaccggataatggccatcatgtatagcgccgtcacccctgtactgaatccactaatctacacccttaggaacaaagaagtgatgatggctctgaagaaaatctttggtaggaagttgtttaaagactggcagcaacaccactaggactaatgagggatatctgatttctattaagactgatttccatcacttcactgtaagaaatgatttgtttacctggtttatatttttctttcaaaaattttgagcacatattatattaggcagtgtagtaggttcaagaaacacaggagcaagcaaaacaaattccataatgtcatcaaacataaagtttaatgtgatggaggccccaaataaccaaacgcgtaagtacatatgtcaggataattcggtggcaaggagaactaaggaggtaggaagtatggggagggttagagtaggaatctgctgtgtaaaaaagaatgtggcatttctcctaggacaaaaacctttggaattttccaagtaatagaagtatcttactgaaattccatatgagataatctttatttttgcctattttttttccttttgtgtttccttcagcaggaatgtactgatgataatttttctcacaacagtttttatctagaatatcatttttgttaatcttaattcttgaagagaatttttaatgggtatttaattttagggagagatttttctagccattgaaaatatcttgtttttccccagcttattgaagtataattaacaaataaaaattgcatatatttaggcttcacaacatgatgctttagtatatgtacacattgtgaagagactaccacaatcaagctaaacctacattactgtccctgcattagtttactgttgaatactagaagttcttcattctatctaactgcattttcatacccattaagccaatgtgacaagctctttgtttcagttggagtgtttgcacaatttaaatttgataaatttttgatagaattaaatttaaatttatcctccaactaaatttttgatagaattaaatttaaatttgtcctcca

SEQ ID NO: 162034 - DNA, 2011 bp, Homo sapiens
  Payload ID: 11686
  Gene Symbol: OR12D3
  Gene Name: olfactory receptor, family 12, subfamily D, member 3
  ENST ID: ENST00000502578
  CDS Start-End: 147-1097
aaactgtgctgccacaggcccatttttcggtgagaaagctagaaaagttggaggacttattctaagtcacgctgttaccagcctagaggggcatctcagtgttttgagcagcttctcgttttgtgagctttgtggatgagtgagcaatggagaatgtcactacaatgaatgagtttcttctacttggcctgactggtgttcaggagctgcagcctttcttctttgggattttcttaatcatttacctgataaacttgattggaaatggatctatattggtgatggttgttttggaaccacaactccactcccctatgtatttttttctgggaaacctttcttgtctggatatttcttattcttcagtgacactgcccaagctgctcgtaaacctcgtgtgcagtcgcagggctatatcttttctaggctgtatcatccagctacacttcttccactttttgggaagcacagaggccattttactggctatcatggcctttgaccgttttgttgccatctgcaatcctcttcgctacactgtcatcatgaacccccaggtgtgtattctgttggcagctgcggcctggctcatcagcttcttttacgctctgatgcattctgtcatgactgcacacctgagtttttgtggctctcagaaactcaatcacttcttctacgatgtcaagccgctcttagaattggcctgtagtgacacattactcaatcaatggcttctttccattgtcacaggcagcatatccatgggagctttctttctgactcttctctcctgcttctatgtaattggcttccttctgtttaagaacaggtcctgcagaatactccacaaggctctgtccacttgtgcctcccattttatggtggtatgtcttttctatggacctgtgggcttcacatatattcgtcctgcttcagccacctccatgattcaggaccggataatggccatcatgtatagcgccgtcacccctgtactgaatccactaatctacacccttaggaacaaagaagtgatgatggctctgaagaaaatctttggtaggaagttgtttaaagactggcagcaacaccactaggactaatgagggatatctgatttctattaagactgatttccatcacttcactgtaagaaatgatttgtttacctggtttatatttttctttcaaaaattttgagcacatattatattaggcagtgtagtaggttcaagaaacacaggagcaagcaaaacaaattccataatgtcatcaaacataaagtttaatgtgatggaggccccaaataaccaaacgcgtaagtacatatgtcaggataattcggtggcaaggagaactaaggaggtaggaagtatggggagggttagagtaggaatctgctgtgtaaaaaagaatgtggcatttctcctaggacaaaaacctttggaattttccaagtaatagaagtatcttactgaaattccatatgagataatctttatttttgcctattttttttccttttgtgtttccttcagcaggaatgtactgatgataatttttctcacaacagtttttatctagaatatcatttttgttaatcttaattcttgaagagaatttttaatgggtatttaattttagggagagatttttctagccattgaaaatatcttgtttttccccagcttattgaagtataattaacaaataaaaattgcatatatttaggcttcacaacatgatgctttagtatatgtatacattgtgaagagactaccacaatcaagctaaacctacattactgtccctgcattagtttactgttgaatactagaagttcttcgttctatctaactgcattttcatacccattaagccaatgtgacaagctctttgttttagttggagtgtttgcacaatttaaatttgataaatttttgatagaattaaatttaaatttatcctccaactaaatttttgatagaattaaatttaaatttgtcctcca

SEQ ID NO: 162035 - DNA, 2011 bp, Homo sapiens
  Payload ID: 11686
  Gene Symbol: OR12D3
  Gene Name: olfactory receptor, family 12, subfamily D, member 3
  ENST ID: ENST00000508665
  CDS Start-End: 147-1097
aaactgtgctgccacaggcccatttttcggtgagaaagctagaaaagttggaggacttattctaagtcacgctgttaccagcctagaggggcatctcagtgttttgagcagcttctcgttttgtgagctttgtggatgagtgagcaatggagaatgtcactacaatgaatgagtttcttctacttggcctgactggtgttcaggagctgcagcctttcttctttgggattttcttaatcatttacctgataaacttgattggaaatggatctatattggtgatggttgttttggaaccacaactccactcccctatgtatttttttctgggaaacctttcttgtctggatatttcttattcttcagtgacactgcccaagctgctcgtaaacctcgtgtgcagtcgcagggctatatcttttctaggctgtatcatccagctacacttcttccactttttgggaagcacagaggccattttactggctatcatggcctttgaccgttttgttgccatctgcaatcctcttcgctacactgtcatcatgaacccccaggtgtgtattctgttggcagctgcggcctggctcatcagcttcttttacgctctgatgcattctgtcatgactgcacacctgagtttttgtggctctcagaaactcaatcacttcttctacgatgtcaagccgctcttagaattggcctgtagtgacacattactcaatcaatggcttctttccattgtcacaggcagcatatccatgggagctttctttctgactcttctctcctgcttctatgtaattggcttccttctgtttaagaacaggtcctgcagaatactccacaaggctctgtccacttgtgcctcccattttatggtggtatgtcttttctatggacctgtgggcttcacatatattcgtcctgcttcagccacctccatgattcaggaccggataatggccatcatgtatagcgccgtcacccctgtactgaatccactaatctacacccttaggaacaaagaagtgatgatggctctgaagaaaatctttggtaggaagttgtttaaagactggcagcaacaccactaggactaatgagggatatctgatttctattaagactgatttccatcacttcactgtaagaaatgatttgtttacctggtttatatttttctttcaaaaattttgagcacatattatattaggcagtgtagtaggttcaagaaacacaggagcaagcaaaacaaattccataatgtcatcaaacataaagtttaatgtgatggaggccccaaataaccaaacgcgtaagtacatatgtcaggataattcggtggcaaggagaactaaggaggtaggaagtatggggagggttagagtaggaatctgctgtgtaaaaaagaatgtggcatttctcctaggacaaaaacctttggaattttccaagtaatagaagtatcttactgaaattccatatgagataatctttatttttgcctattttttttccttttgtgtttccttcagcaggaatgtactgatgataatttttctcacaacagtttttatctagaatatcatttttgttaatcttaattcttgaagagaatttttaatgggtatttaattttagggagagatttttctagccattgaaaatatcttgtttttccccagcttattgaagtataattaacaaataaaaattgcatatatttaggcttcacaacatgatgctttagtatatgtatacattgtgaagagactaccacaatcaagctaaacctacattactgtccctgcattagtttactgttgaatactagaagttcttcattctatctaactgcattttcatacccattaagccaatgtgacaagctctttgtttcagttggagtgtttgcacaatttaaatttgataaatttttgatagaattaaatttaaatttatcctccaactaaatttttgatagaattaaatttaaatttgtcctcca

SEQ ID NO: 162036 - DNA, 1869 bp, Homo sapiens
  Payload ID: 11686
  Gene Symbol: OR12D3
  Gene Name: olfactory receptor, family 12, subfamily D, member 3
  ENST ID: ENST00000551240
  CDS Start-End: 5-955
agcaatggagaatgtcactacaatgaatgagtttcttctacttggcctgactggtgttcaggagctgcagcctttcttctttgggattttcttaatcatttacctgataaacttgattggaaatggatctatattggtgatggttgttttggaaccacaactccactcccctatgtatttttttctgggaaacctttcttgtctggatatttcttattcttcagtgacactgcccaagctgctcgtaaacctcgtgtgcagtcgcagggctatatcttttctaggctgtatcatccagctacacttcttccactttttgggaagcacagaggccattttactggctatcatggcctttgaccgttttgttgccatctgcaatcctcttcgctacactgtcatcatgaacccccaggtgtgtattctgttggcagctgcggcctggctcatcagcttcttttacgctctgatgcattctgtcatgactgcacacctgagtttttgtggctctcagaaactcaatcacttcttctacgatgtcaagccgctcttagaattggcctgtagtgacacattactcaatcaatggcttctttccattgtcacaggcagcatatccatgggagctttctttctgactcttctctcctgcttctatgtaattggcttccttctgtttaagaacaggtcctgcagaatactccacaaggctctgtccacttgtgcctcccattttatggtggtatgtcttttctatggacctgtgggcttcacatatattcgtcctgcttcagccacctccatgattcaggaccggataatggccatcatgtatagcgccgtcacccctgtactgaatccactaatctacacccttaggaacaaagaagtgatgatggctctgaagaaaatctttggtaggaagttgtttaaagactggcagcaacaccactaggactaatgagggatatctgatttctattaagactgatttccatcacttcactgtaagaaatgatttgtttacctggtttatatttttctttcaaaaattttgagcacatattatattaggcagtgtagtaggttcaagaaacacaggagcaagcaaaacaaattccataatgtcatcaaacataaagtttaatgtgatggaggccccaaataaccaaacgcgtaagtacatatgtcaggataattcggtggcaaggagaactaaggaggtaggaagtatggggagggttagagtaggaatctgctgtgtaaaaaagaatgtggcatttctcctaggacaaaaacctttggaattttccaagtaatagaagtatcttactgaaattccatatgagataatctttatttttgcctattttttttccttttgtgtttccttcagcaggaatgtactgatgataatttttctcacaacagtttttatctagaatatcatttttgttaatcttaattcttgaagagaatttttaatgggtatttaattttagggagagatttttctagccattgaaaatatcttgtttttccccagcttattgaagtataattaacaaataaaaattgcatatatttaggcttcacaacatgatgctttagtatatgtatacattgtgaagagactaccacaatcaagctaaacctacattactgtccctgcattagtttactgttgaatactagaagttcttcgttctatctaactgcattttcatacccattaagccaatgtgacaagctctttgttttagttggagtgtttgcacaatttaaatttgataaatttttgatagaattaaatttaaatttatcctccaactaaatttttgatagaattaaatttaaatttgtcctcca

SEQ ID NO: 162037 - DNA, 1869 bp, Homo sapiens
  Payload ID: 11686
  Gene Symbol: OR12D3
  Gene Name: olfactory receptor, family 12, subfamily D, member 3
  Uniprot ID: Q9UGF7
  ENST ID: ENST00000552446
  CDS Start-End: 5-955
agcaatggagaatgtcactacaatgaatgagtttcttctacttggcctgactggtgttcaggagctgcagcctttcttctttgggattttcttaatcatttacctgataaacttgattggaaatggatctatattggtgatggttgttttggaaccacaactccactcccctatgtatttttttctgggaaacctttcttgtctggatatttcttattcttcagtgacactgcccaagctgcttgtaaacctcgtgtgcagtcgcagggctatatcttttctaggctgtatcacccagctacacttcttccactttttgggaagcacagaggccattttactggctatcatggcctttgaccgttttgttgccatctgcaatcctcttcgctacactgtcatcatgaacccccaggtgtgtattctgttggcagctgcggcctggctcatcagcttcttttacgctctgatgcattctgtcatgactgcacacctgagtttttgtggctctcagaaactcaatcacttcttctacgatgtcaagccgctcttagaattggcctgtagtgacacattactcaatcaatggcttctttccattgtcacaggcagcatatccatgggagctttctttctgactcttctctcctgcttctatgtaattggcttccttctgtttaagaacaggtcctgcagaatactccacaaggctctgtccacttgtgcctcccattttatggtggtatgtcttttctatggacctgtgggcttcacatatattcgtcctgcttcagccacctccatgattcaggaccggataatggccatcatgtatagcgccgtcacccctgtactgaatccactaatctacacccttaggaacaaagaagtgatgatggctctgaagaaaatctttggtaggaagttgtttaaagactggcagcaacaccactaggactaatgagggatatctgatttctattaagactgatttccatcacttcactgtaagaaatgatttgtttacctggtttatatttttctttcaaaaattttgagcacatattatattaggcagtgtagtaggttcaagaaacacaggagcaagcaaaacaaattccataatgtcatcaaacataaagtttaatgtgatggaggccccaaataaccaaacgcgtaagtacatatgtcaggataattcggtggcaaggagaactaaggaggtaggaagtatggggagggttagagtaggaatctgctgtgtaaaaaagaatgtggcatttctcctaggacaaaaacctttggaattttccaagtaatagaagtatcttactgaaattccatatgagataatctttatttttgcctattttttttccttttgtgtttccttcagcaggaatgtactgatgataatttttctcacaacagtttttatctagaatatcatttttgttaatcttaattcttgaagagaatttttaatgggtatttaattttagggagagatttttctagccattgaaaatatcttgtttttccccagcttattgaagtataattaacaaataaaaattgcatatatttaggcttcacaacatgatgctttagtatatgtacacattgtgaagagactaccacaatcaagctaaacctacattactgtccctgcattagtttactgttgaatactagaagttcttcattctatctaactgcattttcatacccattaagccaatgtgacaagctctttgtttcagttggagtgtttgcacaatttaaatttgataaatttttgatagaattaaatttaaatttatcctccaactaaatttttgatagaattaaatttaaatttgtcctcca

SEQ ID NO: 162038 - DNA, 1869 bp, Homo sapiens; identical to SEQ ID NO: 162037
  Payload ID: 11686
  Gene Symbol: OR12D3
  Gene Name: olfactory receptor, family 12, subfamily D, member 3
  Uniprot ID: Q9UGF7
  ENST ID: ENST00000550913
  CDS Start-End: 5-955

SEQ ID NO: 162039 - DNA, 1869 bp, Homo sapiens
  Payload ID: 11686
  Gene Symbol: OR12D3
  Gene Name: olfactory receptor, family 12, subfamily D, member 3
  ENST ID: ENST00000552012
  CDS Start-End: 5-955
agcaatggagaatgtcactacaatgaatgagtttcttctacttggcctgactggtgttcaggagctgcagcctttcttctttgggattttcttaatcatttacctgataaacttgattggaaatggatctatattggtgatggttgttttggaaccacaactccactcccctatgtatttttttctgggaaacctttcttgtctggatatttcttattcttcagtgacactgcccaagctgctcgtaaacctcgtgtgcagtcgcagggctatatcttttctaggctgtatcatccagctacacttcttccactttttgggaagcacagaggccattttactggctatcatggcctttgaccgttttgttgccatctgcaatcctcttcgctacactgtcatcatgaacccccaggtgtgtattctgttggcagctgcggcctggctcatcagcttcttttacgctctgatgcattctgtcatgactgcacacctgagtttttgtggctctcagaaactcaatcacttcttctacgatgtcaagccgctcttagaattggcctgtagtgacacattactcaatcaatggcttctttccattgtcacaggcagcatatccatgggagctttctttctgactcttctctcctgcttctatgtaattggcttccttctgtttaagaacaggtcctgcagaatactccacaaggctctgtccacttgtgcctcccattttatggtggtatgtcttttctatggacctgtgggcttcacatatattcgtcctgcttcagccacctccatgattcaggaccggataatggccatcatgtatagcgccgtcacccctgtactgaatccactaatctacacccttaggaacaaagaagtgatgatggctctgaagaaaatctttggtaggaagttgtttaaagactggcagcaacaccactaggactaatgagggatatctgatttctattaagactgatttccatcacttcactgtaagaaatgatttgtttacctggtttatatttttctttcaaaaattttgagcacatattatattaggcagtgtagtaggttcaagaaacacaggagcaagcaaaacaaattccataatgtcatcaaacataaagtttaatgtgatggaggccccaaataaccaaacgcgtaagtacatatgtcaggataattcggtggcaaggagaactaaggaggtaggaagtatggggagggttagagtaggaatctgctgtgtaaaaaagaatgtggcatttctcctaggacaaaaacctttggaattttccaagtaatagaagtatcttactgaaattccatatgagataatctttatttttgcctattttttttccttttgtgtttccttcagcaggaatgtactgatgataatttttctcacaacagtttttatctagaatatcatttttgttaatcttaattcttgaagagaatttttaatgggtatttaattttagggagagatttttctagccattgaaaatatcttgtttttccccagcttattgaagtataattaacaaataaaaattgcatatatttaggcttcacaacatgatgctttagtatatgtatacattgtgaagagactaccacaatcaagctaaacctacattactgtccctgcattagtttactgttgaatactagaagttcttcattctatctaactgcattttcatacccattaagccaatgtgacaagctctttgtttcagttggagtgtttgcacaatttaaatttgataaatttttgatagaattaaatttaaatttatcctccaactaaatttttgatagaattaaatttaaatttgtcctcca

SEQ ID NO: 162040 - DNA, 1869 bp, Homo sapiens
  Payload ID: 11686
  Gene Symbol: OR12D3
  Gene Name: olfactory receptor, family 12, subfamily D, member 3
  Uniprot ID: Q9UGF7
  ENST ID: ENST00000550681
  CDS Start-End: 5-955
agcaatggagaatgtcactacaatgaatgagtttcttctacttggcctgactggtgttcaggagctgcagcctttcttctttgggattttcttaatcatttacctgataaacttgattggaaatggatctatattggtgatggttgttttggaaccacaactccactcccctatgtatttttttctgggaaacctttcttgtctggatatttcttattcttcagtgacactgcccaagctgctcgtaaacctcgtgtgcagtcgcagggctatatcttttctaggctgtatcacccagctacacttcttccactttttgggaagcacagaggccattttactggctatcatggcctttgaccgttttgttgccatctgcaatcctcttcgctacactgtcatcatgaacccccaggtgtgtattctgttggcagctgcagcctggctcatcagcttcttttacgctctgatgcattctgtcatgactgcacacctgagtttttgtggctctcagaaactcaatcacttcttctacgatgtcaagccgctcttagaattggcctgtagtgacacattactcaatcaatggcttctttccattgtcacaggcagcatatccatgggagctttctttctgactcttctctcctgcttctatgtaattggcttccttctgtttaagaacaggtcctgcagaatactccacaaggctctgtccacttgtgcctcccattttatggtggtatgtcttttctatggacctgtgggcttcacatatattcgtcctgcttcagccacctccatgattcaggaccggataatggccatcatgtatagcgccgtcacccctgtactgaatccactaatctacacccttaggaacaaagaagtgatgatggctctgaagaaaatctttggtaggaagttgtttaaagactggcagcaacaccactaggactaatgagggatatctgatttctattaagactgatttccatcacttcactgtaagaaatgatttgtttacctggtttatatttttctttcaaaaattttgagcacatattatattaggcagtgtagtaggttcaagaaacacaggagcaagcaaaacaaattccataatgtcatcaaacataaagtttaatgtgatggaggccccaaataaccaaacgcgtaagtacatatgtcaggataattcggtggcaaggagaactaaggaggtaggaagtatggggagggttagagtaggaatctgctgtgtaaaaaagaatgtggcatttctcctaggacaaaaacctttggaattttccaagtaatagaagtatcttactgaaattccatatgagataatctttatttttgcctattttttttccttttgtgtttccttcagcaggaatgtactgatgataatttttctcacaacagtttttatctagaatgtcatttttgttaatcttaattcttgaagagaatttttaatgggtatttaattttagggagagatttttctagccattgaaaatatcttgtttttccccagcttattgaagtataattaacaaataaaaattgcatatatttaggcttcacaacatgatgctttagtatatgtatacattgtgaagagactaccacaatcaagctaaacctacattactgtccctgcattagtttactgttgaatactagaagttcttcgttctatctaactgcattttcatacccattaagccaatgtgacaagctctttgttttagttggagtgtttgcacaatttaaatttgataaatttttgatagaattaaatttaaatttatcctccaactaaatttttgatagaattaaatttaaatttgtcctcca

SEQ ID NO: 162041 - DNA, 1177 bp, Homo sapiens
  Payload ID: 11687
  Gene Symbol: OR13A1
  Gene Name: olfactory receptor, family 13, subfamily A, member 1
  Uniprot ID: Q8NGR1
  ENST ID: ENST00000374401
  CDS Start-End: 113-1099
tgtcctcctgtccccacccaatcacaataagtggtgatgtgaggtgtggaagaaacacgggagcagccttcctcaggacacctcttgtttatctctctagctctgaaatcacatgaagctgtggatggagagtcacctgatagtcccagaaacccgtcccagcccaaggatgatgagtaaccagacgttggtaaccgagttcatcctgcagggcttttcggagcacccagaataccgggtgttcttattcagctgtttcctcttcctctactctggggccctcacaggtaatgtcctcatcaccttggccatcacgttcaaccctgggctccacgctcctatgtactttttcttactcaacttggctactatggacattatctgcacctcttccatcatgcccaaggcgctggccagtctggtgtcggaagagagctccatctcctacgggggctgcatggcccagctctatttcctcacgtgggctgcatcctcagagctgctgctcctcacggtcatggcctatgaccggtacgcagccatctgccacccgctgcattacagcagcatgatgagcaaggtgttctgcagcgggctggccacagccgtgtggctgctctgcgccgtcaacacggccatccacacggggctgatgctgcgcttggatttctgtggccccaatgtcattatccatttcttctgcgaggtccctcccctgctgcttctctcctgcagctccacctacgtcaacggtgtcatgattgtcctggcggatgctttctacggcatagtgaacttcctgatgaccatcgcgtcctatggcttcatcgtctccagcatcctgaaggtgaagactgcctgggggaggcagaaagccttctccacctgctcttcccacctcaccgtggtgtgcatgtattacaccgctgtcttctacgcctacataagcccggtctctggctacagcgcagggaagagcaagttggctggcctgctgtacactgtgctgagtcctaccctcaaccccctcatctatactttgagaaacaaggaggtcaaagcagccctcaggaagcttttccctttcttcagaaattaacttgtgtcttctgaagtttttgtccttggagactgcagttttagtggagtctgatgagcaagtttctggactgggagg

SEQ ID NO: 162042 - DNA, 2023 bp, Homo sapiens
  Payload ID: 11687
  Gene Symbol: OR13A1
  Gene Name: olfactory receptor, family 13, subfamily A, member 1
  Uniprot ID: Q8NGR1
  ENST ID: ENST00000536058
  CDS Start-End: 255-1241
taatccaagatgccttttttcccccttcagaagcttgagtgcccaagggtttgataaatgtggaaaataaccgctgttcgaatatcctgttggcctgctgaagaaatgactggctgaggctgtaaagaaatcttgtggtcattctcatggaaagaggattggagccccgattctttgatctcattattgaccagttgattgagaagactgtcctcctgtccccacccaatcacaataagtggctctgaaatcacatgaagctgtggatggagagtcacctgatagtcccagaaacccgtcccagcccaaggatgatgagtaaccagacgttggtaaccgagttcatcctgcagggcttttcggagcacccagaataccgggtgttcttattcagctgtttcctcttcctctactctggggccctcacaggtaatgtcctcatcaccttggccatcacgttcaaccctgggctccacgctcctatgtactttttcttactcaacttggctactatggacattatctgcacctcttccatcatgcccaaggcgctggccagtctggtgtcggaagagagctccatctcctacgggggctgcatggcccagctctatttcctcacgtgggctgcatcctcagagctgctgctcctcacggtcatggcctatgaccggtacgcagccatctgccacccgctgcattacagcagcatgatgagcaaggtgttctgcagcgggctggccacagccgtgtggctgctctgcgccgtcaacacggccatccacacggggctgatgctgcgcttggatttctgtggccccaatgtcattatccatttcttctgcgaggtccctcccctgctgcttctctcctgcagctccacctacgtcaacggtgtcatgattgtcctggcggatgctttctacggcatagtgaacttcctgatgaccatcgcgtcctatggcttcatcgtctccagcatcctgaaggtgaagactgcctgggggaggcagaaagccttctccacctgctcttcccacctcaccgtggtgtgcatgtattacaccgctgtcttctacgcctacataagcccggtctctggctacagcgcagggaagagcaagttggctggcctgctgtacactgtgctgagtcctaccctcaaccccctcatctatactttgagaaacaaggaggtcaaagcagccctcaggaagcttttccctttcttcagaaattaacttgtgtcttctgaagtttttgtccttggagactgcagttttagtggagtctgatgagcaagtttctggactgggaggtaaatagacttgttttttctaacccagcagaacctgtgcatggatgagctgggagtgctggttccctgagacttggtgatggggggattgcggtaggtgtgacccaccagcctctgagacaccagatctcttggtctgactccaaggtggtgtcagtgctgagttggcagagaaacacagggcctaggaggagaaaagtgttccttgtgttttcaactcatagccacatcaaacattttccttttgtatgtacaacactcagggtgtaaattctaaaatcacacctagaattcagctgtgtgggtctaaaaagttaggcagaattgtggaccccacagcccctgaagggttgtcagactgaagctttgttttaaggtgaccactggcctctaggaaaccttctacccccattatcttacctcaactgtttcctctggagccacttggacttcaaaaatagtttgattttaatgcaaactgttgtttctgcttttgtcttttcttcttactaacacttcagattctgagtatctgacctacctaattggcctggagcgaggacagctgccatgagtcagctctaataagttaaacggcattgtagtaaggcattgctatccttccattgtttcagataaaactgggtgaacgaatcctctgtgtctaataaagacaggtcttgtgcttgtgctccatgctattac

SEQ ID NO: 162043 - DNA, 2078 bp, Homo sapiens
  Payload ID: 11687
  Gene Symbol: OR13A1
  Gene Name: olfactory receptor, family 13, subfamily A, member 1
  Uniprot ID: Q8NGR1
  ENST ID: ENST00000553795
  CDS Start-End: 310-1296
actatattgaatagaagcgaagagacagagtatacttgtcttgttcctaatccagaagaaaagtttgaatcttttaccattgagtaagcttgagtgcccaagggtttgataaatgtggaaaataaccgctgttcgaatatcctgttggcctgctgaagaaatgactggctgaggctgtaaagaaatcttgtggtcattctcatggaaagaggattggagccccgattctttgatctcattattgaccagttgattgagaagactgtcctcctgtccccacccaatcacaataagtggctctgaaatcacatgaagctgtggatggagagtcacctgatagtcccagaaacccgtcccagcccaaggatgatgagtaaccagacgttggtaaccgagttcatcctgcagggcttttcggagcacccagaataccgggtgttcttattcagctgtttcctcttcctctactctggggccctcacaggtaatgtcctcatcaccttggccatcacgttcaaccctgggctccacgctcctatgtactttttcttactcaacttggctactatggacattatctgcacctcttccatcatgcccaaggcgctggccagtctggtgtcggaagagagctccatctcctacgggggctgcatggcccagctctatttcctcacgtgggctgcatcctcagagctgctgctcctcacggtcatggcctatgaccggtacgcagccatctgccacccgctgcattacagcagcatgatgagcaaggtgttctgcagcgggctggccacagccgtgtggctgctctgcgccgtcaacacggccatccacacggggctgatgctgcgcttggatttctgtggccccaatgtcattatccatttcttctgcgaggtccctcccctgctgcttctctcctgcagctccacctacgtcaacggtgtcatgattgtcctggcggatgctttctacggcatagtgaacttcctgatgaccatcgcgtcctatggcttcatcgtctccagcatcctgaaggtgaagactgcctgggggaggcagaaagccttctccacctgctcttcccacctcaccgtggtgtgcatgtattacaccgctgtcttctacgcctacataagcccggtctctggctacagcgcagggaagagcaagttggctggcctgctgtacactgtgctgagtcctaccctcaaccccctcatctatactttgagaaacaaggaggtcaaagcagccctcaggaagcttttccctttcttcagaaattaacttgtgtcttctgaagtttttgtccttggagactgcagttttagtggagtctgatgagcaagtttctggactgggaggtaaatagacttgttttttctaacccagcagaacctgtgcatggatgagctgggagtgctggttccctgagacttggtgatggggggattgcggtaggtgtgacccaccagcctctgagacaccagatctcttggtctgactccaaggtggtgtcagtgctgagttggcagagaaacacagggcctaggaggagaaaagtgttccttgtgttttcaactcatagccacatcaaacattttccttttgtatgtacaacactcagggtgtaaattctaaaatcacacctagaattcagctgtgtgggtctaaaaagttaggcagaattgtggaccccacagcccctgaagggttgtcagactgaagctttgttttaaggtgaccactggcctctaggaaaccttctacccccattatcttacctcaactgtttcctctggagccacttggacttcaaaaatagtttgattttaatgcaaactgttgtttctgcttttgtcttttcttcttactaacacttcagattctgagtatctgacctacctaattggcctggagcgaggacagctgccatgagtcagctctaataagttaaacggcattgtagtaaggcattgctatccttccattgtttcagataaaactgggtgaacgaatcctctgtgtctaataaagacaggtcttgtgcttgtgctccatgctattac

SEQ ID NO: 162044 - DNA, 1177 bp, Homo sapiens; identical to SEQ ID NO: 162041
  Payload ID: 11687
  Gene Symbol: OR13A1
  Gene Name: olfactory receptor, family 13, subfamily A, member 1
  Uniprot ID: Q8NGR1
  ENST ID: ENST00000615770
  CDS Start-End: 113-1099

SEQ ID NO: 162045 - DNA, 2078 bp, Homo sapiens; identical to SEQ ID NO: 162043
  Payload ID: 11687
  Gene Symbol: OR13A1
  Gene Name: olfactory receptor, family 13, subfamily A, member 1
  Uniprot ID: Q8NGR1
  ENST ID: ENST00000616267
  CDS Start-End: 310-1296

SEQ ID NO: 162046 - DNA, 2023 bp, Homo sapiens; identical to SEQ ID NO: 162042
  Payload ID: 11687
  Gene Symbol: OR13A1
  Gene Name: olfactory receptor, family 13, subfamily A, member 1
  Uniprot ID: Q8NGR1
  ENST ID: ENST00000612185
  CDS Start-End: 255-1241

SEQ ID NO: 162047 - DNA, 957 bp, Homo sapiens
  Payload ID: 11688
  Gene Symbol: OR13C2
  Gene Name: olfactory receptor, family 13, subfamily C, member 2
  Uniprot ID: Q8NGS9
  ENST ID: ENST00000542196
  CDS Start-End: 1-957
atggaatgggaaaaccacaccattctggtggaattttttctgaagggactttctggtcacccaagacttgagttactcttttttgtgctcatcttcataatgtatgtggtcatccttctggggaatggtactctcattttaatcagcatcttggaccctcaccttcacacccctatgtacttctttctggggaacctctccttcttggacatctgctacaccaccacctctattccctccacgctagtgagcttcctttcagaaagaaagaccatttccctttctggctgtgcagtgcagatgttcctcggcttggccatggggacaacagagtgtgtgcttctgggcatgatggcctttgaccgctatgtggctatctgcaaccctctgagatatcccatcatcatgagtaaggatgcctatgtacccatggcagctgggtcctggatcataggagctgtcaattctgcagtacaatcagtgtttgtggtacaattgcctttctgcaggaataacatcatcaatcatttcacctgtgaaattctggctgtcatgaaactggcctgtgctgacatctcagacaatgagttcatcatgcttgtggccacaacattgttcatattgacacctttgttattaatcattgtctcttacacgttaatcattgtgagcatcttcaaaattagctcttccgaggggagaagcaaagcttcctctacctgttcagcccatctgactgtggtcataatattctatgggaccatcctcttcatgtacatgaagcccaagtctaaagagacacttaattcggatgacttggatgctaccgacaaaattatatccatgttctatggggtgatgactcccatgatgaatcctttaatctacagtcttagaaacaaggatgtgaaagaggcagtaaaacacctactgaacagaaggttctttagcaagtga

SEQ ID NO: 162048 - DNA, 1108 bp, Homo sapiens
  Payload ID: 11689
  Gene Symbol: OR13C3
  Gene Name: olfactory receptor, family 13, subfamily C, member 3
  Uniprot ID: Q8NGS6
  ENST ID: ENST00000374781
  CDS Start-End: 44-1087
tcagaacttcaagcaagcactccttctaatatgtgtcaaaagaatgattgttcagttaatttgtactgtttgtttcttggcagtaaatacatttcatgttagatcttcttttgatttcctgaaagcagatgacatgggtgagattaaccagacacttgtgtcagaatttcttcttctgggtctttctggatacccaaagattgagattgtttactttgctctcattctagttatgtacctagtgattctaattggcaatggtgttctaatcatagccagcatctttgattctcattttcacacaccaatgtacttcttcctgggcaacctctctttcctggatatctgctatacatcctcctctgttccctcaacattggtgagcttaatctcaaagaaaagaaacatttccttctctggatgtgcagtgcagatgttctttgggtttgcaatggggtcaacagaatgtctgcttcttggcatgatggcatttgatcgttatgtggccatctgcaacccactgagataccccatcatcctgagcaaggtggcgtatgtattgatggcttctgtgtcctggctgtccggtggaataaattcagctgtgcaaacattacttgccatgagactgcctttctgtgggaataatattatcaatcatttcgcatgtgaaatattagctgtcctcaagctggcctgtgctgatatatccctcaatattatcaccatggtgatatcaaatatggccttcctggttcttccactgatggtcatttttttctcctatatgttcatcctctacaccatcttgcaaatgaattcagccacaggaagacgcaaggcattttccacgtgctcagctcacctgactgtggtgatcatattttacggtaccatcttctttatgtatgcgaaaccgaagtctcaagacctgattggggaagaaaaattgcaagcattagacaagctcatttctctgttttatggggtagtgacacccatgctgaatcctatactctatagcttgagaaataaggatgtaaaagctgctgtaaaatatttgctgaacaaaaaaccaattcactaatgaaaccaggacatgtaggtc

SEQ ID NO: 162049 - DNA, 957 bp, Homo sapiens
  Payload ID: 11690
  Gene Symbol: OR13C4
  Gene Name: olfactory receptor, family 13, subfamily C, member 4
  Uniprot ID: Q8NGS5
  ENST ID: ENST00000277216
  CDS Start-End: 1-957
atggacaagataaaccagacatttgtgagagaattcattcttctgggactctctggttaccccaaacttgagatcattttctttgctctgattctagttatgtacgtagtgattctaattggcaatggtgttctgatcatagcaagcatcttggattctcgtcttcacatgcccatgtacttcttcctgggcaacctctctttcctggatatctgctatacaacctcctccattccctcaacactggtgagcttaatctcaaagaaaagaaacatttccttctctggatgtgcagtgcagatgttctttgggtttgcaatggggtcaacagaatgtttcctccttggcatgatggcatttgatcgttatgtggccatctgtaaccctctgagataccccatcatcatgaacaaggtggtgtatgtactgctgacttctgtatcatggctttctggtggaatcaattcaactgtgcaaacatcacttgccatgcgatggcctttctgtgggaacaatattattaatcatttcttatgcgagatcttagctgtcctaaaattagcttgttctgatatatctgtcaatattgttaccctagcagtgtcaaatattgctttcctagttcttcctctgctcgtgatttttttctcctatatgttcatcctctacaccatcttgcgaacgaactcggccacaggaagacacaaggcattttctacatgctcagctcacctgactgtggtgatcatattttatggtaccatcttctttatgtatgcaaaacctaagtcccaggacctccttgggaaagacaacttgcaagctacagaggggcttgtttccatgttttatggggttgtgacccccatgttaaaccccataatctatagcttgagaaataaagatgtaaaagctgctataaaatatttgctgagcaggaaagctattaaccagtaa

SEQ ID NO: 162050 - DNA, 957 bp, Homo sapiens
  Payload ID: 11691
  Gene Symbol: OR13C5
  Gene Name: olfactory receptor, family 13, subfamily C, member 5
  Uniprot ID: Q8NGS8
  ENST ID: ENST00000374779
  CDS Start-End: 1-957
atggaatgggaaaaccacaccattctggtggaattttttctgaagggactttctggtcacccaagacttgagttactcttttttgtgctcatcttcataatgtatgtggtcatccttctggggaatggtactctcattttaatcagcatcttggaccctcaccttcacacccctatgtacttctttctggggaacctctccttcttggacatctgctacaccaccacctctattccctccacgctagtgagcttcctttcagaaagaaagaccatttccctttctggctgtgcagtgcagatgttcctcagcttggccatggggacaacagagtgtgtgcttctgggcgtgatggcctttgaccgctatgtggctatctgcaaccctctgagatatcccatcatcatgagtaaggatgcctatgtacccatggcagctgggtcctggatcataggagctgtcaattctgcagtacaaacagtgtttgtggtacaattgcctttctgcaggaataacatcatcaatcatttcacctgtgaaattctagctgtcatgaaactggcctgtgctgacatctcaggcaatgagttcatcctgcttgtgaccacaacattgttcctattgacacctttgttattaattattgtctcttacacgttaatcattttgagcatcttcaaaattagctcttcggaggggagaagcaaaccttcctctacctgctcagctcgtctgactgtggtgataacattctgtgggaccatcttcctcatgtacatgaagcccaagtctcaagagacacttaattcagatgacttggatgccactgacaaacttatattcatattctacagggtgatgactcccatgatgaatcctttaatctacagtcttagaaacaaggatgtgaaggaggcagtaaaacacctactgagaagaaaaaattttaacaagtaa

SEQ ID NO: 162051 - DNA, 959 bp, Homo sapiens
  Payload ID: 11692
  Gene Symbol: OR13C7
  Gene Name: olfactory receptor, family 13, subfamily C, member 7 (gene/pseudogene)
  ENST ID: ENST00000424348
  CDS Start-End: 1-959
atggtaagtgccaatcagacagcctctgtgaccgagtttattctcctgggcctctctgcccacccaaagctggagaaaacgttctttgtgctcatcctgctgatgtacctggtgatcctactgggcaatggggtcctcatcctgatgactgtgtccaactcccacctgcacatgcccatgtacttcttcctggggaacctctccttcctggacatctgctatacaacatcctcagtccccctcatccttgacagcttcttgacccccaggaaaaccatctccttctcagcctgtgcagtgcagatgttcctctcctttgccatgggagccacagagtgtgttctcctgagcatgatggcgtttgatcgctacgtggccatctgcaacccccttaggtaccctgtggtcatgagcaaggctgcctacatgcccataaggctgccggctcctgggtagctggaagcactgcttccatggtgcagacatcccttgcaatgaggctgcccttctgtggagacaacatcatcaaccacttcacctgtgagattctggctgtcctgaagttggcctgtgctgatatctctgtcaatgtgatcagtatgggagtgaccaatgtgatcttcctgggggtcccggttctgttcatctctttctcctatgtcttcatcattgccaccatcctgaggatcccctcagctgaggggaggaaaaaggccttctccacctgctctgcccacctcacagtcgtggtcatcttctatgggaccatcctcttcatgtatgggaagcccaagtctaaggacccgctgggggcagacaagcaagaccttgcagacaaactcatttcccttttctatggggtggtgacccccatgctcaaccccatcatctacagcctgaggaacaaggatgtaaaggctgctgtgagggacttgatatttcagaaatgctttgcctag

SEQ ID NO: 162052 - DNA, 963 bp, Homo sapiens
  Payload ID: 11693
  Gene Symbol: OR13C8
  Gene Name: olfactory receptor, family 13, subfamily C, member 8
  Uniprot ID: Q8NGS7
  ENST ID: ENST00000335040
  CDS Start-End: 1-963
atggaaaggaccaacgattccacgtcgacagaatttttcctggtagggctttctgcccacccaaagctccagacagttttcttcgttctaattttgtggatgtacctgatgatcctgcttggaaatggagtccttatctcagttatcatctttgattctcacctgcacacccccatgtatttcttcctctgtaatctttccttcctcgacgtttgctacacaagttcctctgtcccactaattcttgccagctttctggcagtaaagaaaaaggtttccttctctgggtgtatggtgcaaatgtttatttcttttgccatgggggccacggagtgcatgatcttaggcacgatggcactggaccgctatgtggccatctgctacccactgagataccctgtcatcatgagcaagggtgcctatgtggccatggcagctgggtcctgggtcactgggcttgtggactcagtagtgcagacagcttttgcaatgcagttaccattctgtgctaataatgtcattaaacattttgtctgtgaaattctggctatcttgaaactggcctgtgctgatatttcaatcaatgtgattagtatgacagggtcgaatctgattgttctggttattccattgttagtaatttccatctcttacatatttattgttgccactattctgaggattccttccactgaaggaaaacataaggccttctccacctgctcagcccacctgacagtggtgattatattctatggaaccatcttcttcatgtacgcaaagcctgagtctaaagcctctgttgattcaggtaatgaagacatcattgaggccctcatctcccttttctatggagtgatgactcccatgcttaatcctctcatctatagtctgcgaaacaaggatgtaaaggctgctgtcaaaaacatactgtgtaggaaaaacttttctgatggaaaatga

SEQ ID NO: 162053 - DNA, 957 bp, Homo sapiens
  Payload ID: 11694
  Gene Symbol: OR13C9
  Gene Name: olfactory receptor, family 13, subfamily C, member 9
  Uniprot ID: Q8NGT0
  ENST ID: ENST00000259362
  CDS Start-End: 1-957
atggaatgggaaaaccaaaccattctggtggaattttttctgaagggacattctgttcacccaaggcttgagttactcttttttgtgctaatcttcataatgtatgtggtcatccttctggggaatggtactctcattttaatcagcatcttggaccctcaccttcacacccctatgtacttctttctggggaacctctccttcttggacatctgctacaccaccacctctattccctccacactagtgagcttcctttcagaaagaaagaccatttccttttctggctgtgcagtgcagatgttccttggcttggccatggggacaacagagtgtgtgcttctgggcatgatggcctttgaccgctatgtggctatctgcaaccctctgagatatcccatcatcatgagcaagaatgcctatgtacccatggctgttgggtcctggtttgcagggattgtcaactctgcagtacaaactacatttgtagtacaattgcctttctgcaggaagaatgtcatcaatcatttctcatgtgaaattctagctgtcatgaagttggcctgtgctgacatctcaggcaatgagttcctcatgcttgtggccacaatattgttcacattgatgccactgctcttgatagttatctcttactcattaatcatttccagcatcctcaagattcactcctctgaggggagaagcaaagctttctctacctgctcagcccatctgactgtggtcataatattctatgggaccatcctcttcatgtatatgaagcccaagtctaaagagacacttaattcagatgacttggatgctaccgacaaaattatatccatgttctatggggtgatgactcccatgatgaatcctttaatctacagtcttagaaacaaggatgtgaaagaggcagtaaaacacctaccgaacagaaggttctttagcaagtga

SEQ ID NO: 162054 - DNA, 1041 bp, Homo sapiens
  Payload ID: 11695
  Gene Symbol: OR13D1
  Gene Name: olfactory receptor, family 13, subfamily D, member 1
  Uniprot ID: Q8NGV5
  ENST ID: ENST00000318763
  CDS Start-End: 1-1041
atgtacagatttacagattttgatgtatcaaacatttcaatttacctgaatcatgtccttttctatactacccagcaggcaggtgacctagaacacatggagacaagaaattactctgccatgactgaattctttctggtggggctttcccaatatccagagctccagctttttctgttcctgctctgcctcatcatgtacatgataatcctcctgggaaatagcctcctcattatcatcaccatcttggattctcgcctccatactcccatgtatttctttcttggaaacctctcattcttggacatctgttacacatcctcatccattcctccaatgcttattatatttatgtctgagagaaaatccatctccttcattggctgtgctctgcagatggttgtgtcccttggcttgggctccactgagtgtgtcctcctggctgtgatggcctatgaccactatgtggccatctgcaacccactgaggtactccatcatcatgaacggagtgctgtatgtgcaaatggctgcatggtcctggatcataggctgtctgacctccctattgcaaacagttctgacaatgatgttgcctttctgtgggaataatgtcattgatcatattacctgtgaaattttggcccttctaaaacttgtttgttcagatatcaccatcaatgtgcttatcatgacagtgacaaatattgtttcactggtgattcttctactgttaattttcatctcctatgtgtttattctctcttccatcctgagaattaattgtgctgagggaagaaagaaagccttctctacctgttcagcgcactcgattgtggtcatcttattctacggttcagccctttttatgtacatgaaacccaagtcaaagaacactaatacatctgatgagattattgggctgtcttatggagtggtaagcccaatgttaaatcccatcatctatagcctcaggaataaagaggtcaaagaggctgtaaagaaagtcctgagcagacatctgcatttattgaaaatgtga

SEQ ID NO: 162055 - DNA, 960 bp, Homo sapiens
  Payload ID: 11696
  Gene Symbol: OR13F1
  Gene Name: olfactory receptor, family 13, subfamily F, member 1
  Uniprot ID: Q8NGS4
  ENST ID: ENST00000334726
  CDS Start-End: 1-960
atgttcccggcaaattggacatctgtaaaagtatttttcttcctgggattttttcactaccccaaagttcaggtcatcatatttgcggtgtgcttgctgatgtacctgatcaccttgctgggcaacatttttctgatctccatcaccattctagattcccacctgcacacccctatgtacctcttcctcagcaatctctcctttctggacatctggtactcctcttctgccctctctccaatgctggcaaactttgtttcagggagaaacactatttcattctcagggtgcgccactcagatgtacctctcccttgccatgggctccactgagtgtgtgctcctgcccatgatggcatatgaccggtatgtggccatctgcaaccccctgagataccctgtcatcatgaataggagaacctgtgtgcagattgcagctggctcctggatgacaggctgtctcactgccatggtggaaatgatgtctgtgctgccactgtctctctgtggtaatagcatcatcaatcatttcacttgtgaaattctggccatcttgaaattggtttgtgtggacacctccctggtgcagttaatcatgctggtgatcagtgtacttcttctccccatgccaatgctactcatttgtatctcttatgcatttatcctcgccagtatcctgagaatcagctcagtggaaggtcgaagtaaagccttttcaacgtgcacagcccacctgatggtggtagttttgttctatgggacggctctctccatgcacctgaagccctccgctgtagattcacaggaaatagacaaatttatggctttggtgtatgccggacaaacccccatgttgaatcctatcatctatagtctacggaacaaagaggtgaaagtggccttgaaaaaattgctgattagaaatcattttaatactgccttcatttccatcctcaaataa

SEQ ID NO: 162056 - DNA, 924 bp, Homo sapiens
  Payload ID: 11697
  Gene Symbol: OR13G1
  Gene Name: olfactory receptor, family 13, subfamily G, member 1
  Uniprot ID: Q8NGZ3
  ENST ID: ENST00000359688
  CDS Start-End: 1-924
atgaatcacagcgttgtaactgagttcattattctgggcctcaccaaaaagcctgaactccagggaattatcttcctcttttttctcattgtctatcttgtggcttttctcggcaacatgctcatcatcattgccaaaatctataacaacaccttgcatacgcccatgtatgttttccttctgacactggctgttgtggacatcatctgcacaacaagcatcataccgaagatgctggggaccatgctaacatcagaaaataccatttcatatgcaggctgcatgtcccagctcttcttgttcacatggtctctgggagctgagatggttctcttcaccaccatggcctatgaccgctatgtggccatttgtttccctcttcattacagtactattatgaaccaccatatgtgtgtagccttgctcagcatggtcatggctattgcagtcaccaattcctgggtgcacacagctcttatcatgaggttgactttctgtgggccaaacaccattgaccacttcttctgtgagatacccccattgctggctttgtcctgtagccctgtaagaatcaatgaggtgatggtgtatgttgctgatattaccctggccataggggactttattcttacctgcatctcctatggttttatcattgttgctattctccgtatccgcacagtagaaggcaagaggaaggccttctcaacatgctcatctcatctcacagtggtgaccctttactattctcctgtaatctacacctatatccgccctgcttccagctatacatttgaaagagacaaggtggtagctgcactctatactcttgtgactcccacattaaacccgatggtgtacagcttccagaatagggagatgcaggcaggaattaggaaggtgtttgcatttctgaaacactag

SEQ ID NO: 162057 - DNA, 927 bp, Homo sapiens
  Payload ID: 11698
  Gene Symbol: OR13H1
  Gene Name: olfactory receptor, family 13, subfamily H, member 1
  Uniprot ID: Q8NG92
  ENST ID: ENST00000338616
  CDS Start-End: 1-927
atggccatggacaatgtcacagcagtgtttcagtttctccttattggcatttctaactatcctcaatggagagacacgtttttcacattagtgctgataatttacctcagcacattgttggggaatggatttatgatctttcttattcactttgaccccaacctccacactccaatctacttcttccttagtaacctgtctttcttagacctttgttatggaacagcttccatgccccaggctttggtgcattgtttctctacccatccctacctctcttatccccgatgtttggctcaaacgagtgtctccttggctttggccacagcagagtgcctcctactggctgccatggcctatgaccgtgtggttgctatcagcaatcccctgcgttattcagtggttatgaatggcccagtatgtgtctgcttggttgctacctcatgggggacatcacttgtgctcactgccatgctcatcctatccctgaggcttcacttctgtggggctaatgtcatcaaccattttgcctgtgagattctctccctcattaagctgacctgttctgataccagcctcaatgaatttatgatcctcatcaccagtatcttcaccctgctgctaccatttgggtttgttctcctctcctacatacgaattgctatggctatcataaggattcgctcactccagggcaggctcaaggcctttaccacatgtggctctcacctgaccgtggtgacaatcttctatgggtcagccatctccatgtatatgaaaactcagtccaagtcctaccctgaccaggacaagtttatctcagtgttttatggagctttgacacccatgttgaaccccctgatatatagcctgagaaaaaaagatgttaaacgggcaataaggaaagttatgttgaaaaggacatga

SEQ ID NO: 162058 - DNA, 1339 bp, Homo sapiens
  Payload ID: 11699
  Gene Symbol: OR13J1
  Gene Name: olfactory receptor, family 13, subfamily J, member 1
  Uniprot ID: Q8NGT2
  ENST ID: ENST00000377981
  CDS Start-End: 201-1139
atgctcatttttcacatggataaactgaggcctagagaggataaagggattgcccgacgtcacagacagtgagtgtggcagtgctggaaaagatcctgacagtccacctcgtcccagaaagggctctgtgagcttccccgcaccctgtaccctctctccttccatcccagctgtggaccatctcttcagaactctgcagcatggagccgctcaacagaacagaggtgtccgagttctttctgaaaggattttctggctacccagccctggagcatctgctcttccctctgtgctcagccatgtacctggtgaccctcctggggaacacagccatcatggcggtgagcgtgctagatatccacctgcacacgcccgtgtacttcttcctgggcaacctctctaccctggacatctgctacacgcccacctttgtgcctctgatgctggtccacctcctgtcatcccggaagaccatctcctttgctgtctgtgccatccagatgtgtctgagcctgtccacgggctccacggagtgcctgctactggccatcacggcctatgaccgctacctggccatctgccagccactcaggtaccacgtgctcatgagccaccggctctgcgtgctgctgatgggagctgcctgggtcctctgcctcctcaagtcggtgactgagatggtcatctccatgaggctgcccttctgtggccaccacgtggtcagtcacttcacctgcaagatcctggcagtgctgaagctggcatgcggcaacacgtcggtcagcgaagacttcctgctggcgggctccatcctgctgctgcctgtacccctggcattcatctgcctgtcctacttgctcatcctggccaccatcctgagggtgccctcggccgccaggtgctgcaaagccttctccacctgcttggcacacctggctgtagtgctgcttttctacggcaccatcatcttcatgtacttgaagcccaagagtaaggaagcccacatctctgatgaggtcttcacagtcctctatgccatggtcacgaccatgctgaaccccaccatctacagcctgaggaacaaggaggtgaaggaggccgccaggaaggtgtggggcaggagtcgggcctccaggtgagggagggcggggctctgtacagacgcaggtctcaggttagtagctgaggccatcgtatgccaatgccagtgaagacatggcagggctggggctacaggtctggtatcttcatcccagcaaggcagcaccaagtcccgctgatcctgccacagaacagcccccaaatcaccctctgctctcagcatcaccctggccttcac

SEQ ID NO: 162059 - DNA, 930 bp, Homo sapiens
  Payload ID: 11700
  Gene Symbol: OR14A16
  Gene Name: olfactory receptor, family 14, subfamily A, member 16
  Uniprot ID: Q8NHC5
  ENST ID: ENST00000357627
  CDS Start-End: 1-930
atggcaaatctcacaatcgtgactgaatttatccttatggggttttctaccaataaaaatatgtgcattttgcattcgattctcttcttgttgatttatttgtgtgccctgatggggaatgtcctcattatcatgatcacaactttggaccatcatctccacacccccgtgtatttcttcttgaagaatctatctttcttggatctctgccttatttcagtcacggctcccaaatctatcgccaattctttgatacacaacaactccatttcattccttggctgtgtttcccaggtctttttgttgctttcttcagcatctgcagagctgctcctcctcacggtgatgtcctttgaccgctatactgctatatgtcaccctctgcactatgatgtcatcatggacaggagcacctgtgtccaaagagccactgtgtcttggctgtatgggggtctgattgctgtgatgcacacagctggcaccttctccttatcctactgtgggtccaacatggtccatcagttcttctgtgacattccccagttattagctatttcttgctcagaaaatttaataagagaaattgcactcatccttattaatgtagttttggatttctgctgttttattgtcatcatcattacctatgtccacgtcttctctacagtcaagaagatcccttccacagaaggccagtcaaaagcctactctatttgccttccacacttgctggttgtgttatttctttccactggattcattgcttatctgaagccagcttcagagtctccttctattttggatgctgtaatttctgtgttctacactatgctgcccccaacctttaatcccattatatacagtttgagaaacaaggccataaaggtggctctggggatgttgataaagggaaagctcaccaaaaagtaa

SEQ ID NO: 162060 - DNA, 945 bp, Homo sapiens
  Payload ID: 11701
  Gene Symbol: OR14A2
  Gene Name: olfactory receptor, family 14, subfamily A, member 2
  Uniprot ID: Q96R54
  ENST ID: ENST00000366485
  CDS Start-End: 1-945
atggccaatgtcaccttggtgacaggatttcttcttatggggttttctaatatccagaagctgcggattttatatggtgtgctcttcctactgatttacctggcagccctaatgagtaaccttctcatcattactctcattaccctggacgtaaagctccaaacacccatgtacttcttcctgaagaacttatcctttttggatgtcttcctggtgtctgttccaatcccaaaattcattgtcaacaacctaacccacaacaattccatttccattctaggatgtgccttccagctacttttaatgacttccttctcagcaggagagatatttatcctcactgccatgtcctatgaccgctatgtagccatctgctgtcccctgaactacgaggtaatcatgaatactggagtctgtgtgttaatggcaagtgtttcctgggccattggagggctctttggtactgcgtacacagctggcacattttccatgcctttctgtggctccagtgtgattccacagtttttctgtgatgttccttcattactaaggatttcctgttctgaaacactaatggtaatttatgcaggtattggagttggtgcatgtttaagcatttcttgtttcatctgtattgtgatctcttacatttatatcttctccactgtactgaagatccctaccactaaaggtcagtccaaagctttttccacatgcttcccccatctcactgttttcactgtttttatcataactgcttattttgtttatcttaagccaccttcaaattcaccatctgttattgacaggctgctttctgtgatctacactgtgatgcctccagtatttaaccctgtaacctacagcctgcggaacaatgacatgaaatgtgctctgataaggttgctgcagaaaacatatggtcaggaggcttacttcatttaa

SEQ ID NO: 162061 - DNA, 939 bp, Homo sapiens
  Payload ID: 11702
  Gene Symbol: OR14C36
  Gene Name: olfactory receptor, family 14, subfamily C, member 36
  Uniprot ID: Q8NHC7
  ENST ID: ENST00000317861
  CDS Start-End: 1-939
atgcccaattcaaccaccgtgatggaatttctcctcatgaggttttctgatgtgtggacactacagattttacattctgcatccttctttatgttgtatttggtaactctaatgggaaacatcctcattgtgaccgtcaccacctgtgacagcagccttcacatgcccatgtacttcttcctcaggaatctgtctatcttggatgcctgctacatttctgttacagtccctacctcatgtgtcaattccctactggacagcaccaccatttctaaggcgggatgtgtagctcaggtcttcctcgtggttttttttgtatatgtggagcttctgtttctcaccattatggctcatgaccgctatgtggctgtctgccagccacttcactaccctgtgatcgtgaactctcgaatctgcatccagatgacactggcctccctactcagtggtcttgtctatgcaggcatgcacactggcagcacattccagctgcccttctgtcggtccaacgttattcatcaattcttctgtgacatcccctctctgctgaagctctcttgctctgacaccttcagcaatgaggtcatgattgttgtctctgctctgggggtaggtggcggctgtttcatctttatcatcaggtcttacattcacatcttttcgaccgtgctcgggtttccaagaggagcagacagaacaaaggccttttccacctgcatccctcacatcctggtggtgtcagtcttcctcagttcatgctcttctgtgtacctcaggccacctgcgatacctgcagccacccaggatctgatcctttctggtttttattccataatgcctcccctctttaaccctattatttacagtcttagaaataagcaaataaaggtggccatcaagaaaatcatgaagagaattttttattcagaaaatgtgtaa

SEQ ID NO: 162062 - DNA, 936 bp, Homo sapiens
  Payload ID: 11703
  Gene Symbol: OR14I1
  Gene Name: olfactory receptor, family 14, subfamily I, member 1
  Uniprot ID: A6ND48
  ENST ID: ENST00000342623
  CDS Start-End: 1-936
atggacaatctcacaaaagtgacagaattcctgctgatggagttttctggtatctgggagctgcaggtgctgcacgccgggctgtttctgctgatttatctggcagtgctggtggggaacctgctcatcattgcagtcatcactctcgatcagcatcttcacacacccatgtacttcttcctgaagaacctctccgttttggatctgtgctacatctcagtcactgtgcctaaatccatccgtaactccctgactcgcagaagctccatctcttatcttggctgtgtggctcaagtctattttttctctgcctttgcatctgctgagctggccttccttactgtcatgtcttatgaccgctatgttgccatttgccaccccctccaatacagagccgtgatgacatcaggagggtgctatcagatggcagtcaccacctggctaagctgcttttcctacgcagccgtccacactggcaacatgtttcgggagcacgtttgcagatccagtgtgatccaccagttcttccgtgacatccctcatgtgttggccctggtttcctgtgaggttttctttgtagagtttttgaccctggccctgagctcatgcttggttctgggatgctttattctcatgatgatctcctatttccaaatcttctcaacggtgctcagaatcccttcaggacagagtcgagcaaaagccttctccacctgctccccccagctcattgtcatcatgctctttcttaccacagggctctttgctgccttaggaccaattgcaaaagctctgtccattcaggatttagtgattgctctgacatacacagttttgcctcccttcctcaatcccatcatatatagtcttaggaataaggagattaaaacagccatgtggagactctttgtgaagatatattttctgcaaaagtag

SEQ ID NO: 162063 - DNA, 966 bp, Homo sapiens
  Payload ID: 11704
  Gene Symbol: OR14J1
  Gene Name: olfactory receptor, family 14, subfamily J, member 1
  Uniprot ID: Q9UGF5
  ENST ID: ENST00000230221
  CDS Start-End: 1-966
atggtcaatttgacttcaatgagtggattccttcttatggggttttctgatgagcgtaagcttcagattttacatgcattggtatttctggtgacatacctgctggccttgacaggcaacctcctcattatcaccatcattaccgtggaccgtcgtctccattcccccatgtattactttttaaagcacctctctcttctggacctctgcttcatctctgtcacagtcccccagtccattgcaaattcacttatgggcaacggttacatttctcttgttcagtgcattcttcaggttttcttcttcatagctctggcctcatcagaagtggccattctcacagtgatgtcttatgacaggtacgcagcaatctgtcaaccacttcattatgagactattatggatccccgtgcctgtaggcatgcagtgatagctgtgtggattgctgggggcctctctgggctcatgcatgctgccattaacttctccatacctctctgtgggaagagagtcattcaccaattcttctgtgatgttcctcagatgctgaaactagcctgttcttatgaattcattaatgagattgcactggctgcattcacaacgtctgcagcatttatctgtttgatctccattgtgctctcctacattcgcatcttctctacagtgctgagaatcccatcagctgagggccggaccaaggtcttctccacctgcctaccacacctatttgtagccaccttctttctttcagctgcaggctttgagtttctcagactgccttctgattcctcatcgactgtggaccttgtattctccgtattctatactgtgatacctccaacactcaatccagtcatttatagcttacggaatgattccatgaaggcagcactgaggaagatgctgtcaaaggaagagcttcctcagagaaaaatgtgcttaaaagccatgtttaaactctga

SEQ ID NO: 162064 - DNA, 966 bp, Homo sapiens; identical to SEQ ID NO: 162063
  Payload ID: 11704
  Gene Symbol: OR14J1
  Gene Name: olfactory receptor, family 14, subfamily J, member 1
  Uniprot ID: Q9UGF5
  ENST ID: ENST00000377160
  CDS Start-End: 1-966

SEQ ID NO: 162065 - DNA, 966 bp, Homo sapiens
  Payload ID: 11704
  Gene Symbol: OR14J1
  Gene Name: olfactory receptor, family 14, subfamily J, member 1
  Uniprot ID: Q9UGF5
  ENST ID: ENST00000420495
  CDS Start-End: 1-966
atggtcaatttgacttcaacgagtggattccttcttatggggttttctgatgagcgtaagcttcagattttacatgcattggtatttctggtgacatacctgctggccttgacaggcaacctcctcattatcaccatcattaccgtggaccgtcgtctccattcccccatgtattactttttaaagcacctctctcttctggacctctgcttcatctctgtcacagtcccccagtccattgcaaattcacttatgggcaacggttacatttctcttgttcagtgcattcttcaggttttcttcttcatagctctggcctcatcagaagtggccattctcacagtgatgtcttatgacaggtacgcagcaatctgtcaaccacttcattatgagactattatggatccccgtgcctgtaggcatgcagtgatagctgtgtggattgctgggggcctctctgggctcatgcatgctgccattaacttctccatacctctctgtgggaagagagtcattcaccaattcttctgtgatgttcctcagatgctgaaactagcctgttcttatgaattcattaatgagattgcactggctgcattcacaacgtctgcagcatttatctgtttgatctccattgtgctctcctacattcgcatcttctctacagtgctgagaatcccatcagctgagggccggaccaaggtcttctccacctgcctaccacacctatttgtagccaccttctttctttcagctgcaggctttgagtttctcagactgccttctgattcctcatcgactgtggaccttgtattctccgtattctatactgtgatacctccaacactcaatccagtcatttatagcttacggaatgattccatgaaggcagcactgaggaagatgctgtcaaaggaagagcttcctcagagaaaaatgtgcttaaaagccatgtttaaactctga

SEQ ID NO: 162066 - DNA, 966 bp, Homo sapiens; identical to SEQ ID NO: 162063
  Payload ID: 11704
  Gene Symbol: OR14J1
  Gene Name: olfactory receptor, family 14, subfamily J, member 1
  Uniprot ID: Q9UGF5
  ENST ID: ENST00000434778
  CDS Start-End: 1-966

SEQ ID NO: 162067 - DNA, 966 bp, Homo sapiens; identical to SEQ ID NO: 162065
  Payload ID: 11704
  Gene Symbol: OR14J1
  Gene Name: olfactory receptor, family 14, subfamily J, member 1
  Uniprot ID: Q9UGF5
  ENST ID: ENST00000435798
  CDS Start-End: 1-966

SEQ ID NO: 162068 - DNA, 966 bp, Homo sapiens; identical to SEQ ID NO: 162065
  Payload ID: 11704
  Gene Symbol: OR14J1
  Gene Name: olfactory receptor, family 14, subfamily J, member 1
  Uniprot ID: Q9UGF5
  ENST ID: ENST00000421489
  CDS Start-End: 1-966

SEQ ID NO: 162069 - DNA, 966 bp, Homo sapiens; identical to SEQ ID NO: 162065
  Payload ID: 11704
  Gene Symbol: OR14J1
  Gene Name: olfactory receptor, family 14, subfamily J, member 1
  Uniprot ID: Q9UGF5
  ENST ID: ENST00000451272
  CDS Start-End: 1-966

SEQ ID NO: 162070 - DNA, 945 bp, Homo sapiens
  Payload ID: 11705
  Gene Symbol: OR14K1
  Gene Name: olfactory receptor, family 14, subfamily K, member 1
  Uniprot ID: Q8NGZ2
  ENST ID: ENST00000283225
  CDS Start-End: 1-945
atgaccaatcagacacagatgatggaattcttgcttgtgagatttactgagaattgggtgctcctgaggctgcatgctttgctcttctcactgatctacctcacggctgtgctgatgaatttagtcatcattctcctcatgattctggaccatcgtctccacatggcaatgtactttttcctccgacatttgtccttcttagacctgtgtctcatttctgccacagtccccaaatccatcctcaactctgtcgcctccactgactccatctccttcctggggtgtgtgttgcagctcttcttggtggtactgctggctggatcagagattggcatccttactgccatgtcctatgaccgctatgctgccatctgctgccccctacactgtgaggctgtcatgagcagagggctctgtgtccagttgatggctctgtcctggctcaacagaggggccttgggactcttgtacacagctggaacattctctctgaatttttatggctctgatgagctacatcagttcttctgcgatgtccctgccctactaaagctcacttgttctaaagaacatgccatcattagtgtcagtgtggccattggggtctgttatgcattttcatgtttagtttgcattgtagtttcctatgtgtacattttctctgctgtgttaaggatatcacagagacagagacaatccaaagccttttccaactgtgtgcctcacctcattgttgtcactgtgtttcttgtaacaggtgctgttgcttatttaaagccagggtctgatgcaccttctattctagacttgctggtgtctgtgttctattctgtcgcacctccaaccttgaaccctgttatctactgtctgaagaacaaggacattaaatccgctctgagtaaagtcctgtggaatgttagaagcagtggggtaatgaaaagatga

SEQ ID NO: 162071 - DNA, 933 bp, Homo sapiens
  Payload ID: 11706
  Gene Symbol: OR2A1
  Gene Name: olfactory receptor, family 2, subfamily A, member 1
  Uniprot ID: Q8NGT9
  ENST ID: ENST00000408951
  CDS Start-End: 1-933
atgggggaaaatcagacaatggtcacagagttcctcctactgggatttctcctgggcccaaggattcagatgctcctctttgggctcttctccctgttctatatcttcaccctgctggggaacggggccatcctggggctcatctcactggactccagactccacacccccatgtacttcttcctctcacacctggctgtcgtcgacatcgcctacacccgcaacacggtgccccagatgctggcgaacctcctgcatccagccaagcccatctcctttgctggctgcatgacgcagacctttctctgtttgagttttggacacagcgaatgtctcctgctggtgctgatgtcctacgatcgttacgtggccatctgccaccctctccgatactccgtcatcatgacctggagagtctgcatcaccctggccgtcacttcctggacgtgtggctccctcctggctctggcccatgtggttctcatcctaagactgcccttctctgggcctcatgaaatcaaccacttcttctgtgaaatcctgtctgtcctcaggctggcctgtgctgacacctggctcaaccaggtggtcatctttgcagcctgcgtgttcttcctggtggggccacccagcctggtgcttgtctcctactcgcacatcctggcggccatcctgaggatccagtctggggagggccgcagaaaggccttctccacctgctcctcccacctctgcgtggtgggactcttctttggcagtgccatcatcatgtacatggcccccaagtcccgccatcctgaggagcagcaaaaggtcttttttctattttacagttttttcaacccaacacttaaccccctgatttacagcctgaggaacggagaggtcaagggtgccctgaggagagcactgggcaaggaaagtcattcctaa

SEQ ID NO: 162072 - DNA, 1046 bp, Homo sapiens
  Payload ID: 11707
  Gene Symbol: OR2A12
  Gene Name: olfactory receptor, family 2, subfamily A, member 12
  Uniprot ID: Q8NGT7
  ENST ID: ENST00000408949
  CDS Start-End: 61-993
tcccattagctgtgaaatttctgtcttaagtacatcacaagatttttctgtcacgagaacatggaaagcaatcagacctggatcacagaagtcatcctgttgggattccaggtggacccagctctggagttgttcctctttgggtttttcttgctattctacagcttaaccctgatgggaaatgggattatcctggggctcatctacttggactctagactgcacacacccatgtatgtcttcctgtcacacctggccattgtggacatgtcctatgcctcgagtactgtccctaagatgctagcaaatcttgtgatgcacaaaaaagtcatctcctttgctccttgcatacttcagacttttttgtatttggcgtttgctattacagagtgtctgattttggtgatgatgtgctatgatcggtatgtggcaatctgtcaccccttgcaatacaccctcattatgaactggagagtgtgcactgtcctggcctcaacttgctggatatttagctttctcttggctctggtccatattactcttattctgaggctgcctttttgtggcccacaaaagatcaaccactttttctgtcaaatcatgtccgtattcaaattggcctgtgctgacactaggctcaaccaggtggtcctatttgcgggttctgcgttcatcttagtggggccgctctgcctggtgctggtctcctacttgcacatcctggtggccatcttgaggatccagtctggggagggccgcagaaaggccttctctacctgctcctcccacctctgcgtggtggggcttttctttggcagcgccattgtcatgtacatggcccccaagtcaagccattctcaagaacggaggaagatcctttccctgttttacagccttttcaacccgatcctgaaccccctcatctacagccttaggaatgcagaggtgaaaggggctctaaagagagtcctttggaaacagagatcaatgtgaagaatcatttgagatatcctgagtgtgtaagcatggttctcatgaccctgggt

SEQ ID NO: 162073 - DNA, 1012 bp, Homo sapiens
  Payload ID: 11708
  Gene Symbol: OR2A14
  Gene Name: olfactory receptor, family 2, subfamily A, member 14
  Uniprot ID: Q96R47
  ENST ID: ENST00000408899
  CDS Start-End: 56-988
gcatctttgactggcccacagctctgaccttcctgtcctagatgtccacaagagcatggaaggcaacaagacatggatcacagacatcaccttgccgcgattccaggttggtccagcactggagattctcctctgtggacttttctctgccttctatacactcaccctgctggggaatggggtcatctttgggattatctgcctggactgtaagcttcacacacccatgtacttcttcctctcacacctggccattgttgacatatcctatgcttccaactatgtccccaagatgctgacgaatcttatgaaccaggaaagcaccatctccttttttccatgcataatgcagacattcttgtatttggcttttgctcacgtagagtgtctgattttggtggtgatgtcctatgatcgctatgcggacatctgccaccccttacgttacaatagcctcatgagctggagagtgtgcactgtcctggctgtggcttcctgggtgttcagcttcctcctggctctggtccctttagttctcatcctgagcctgcccttctgcgggcctcatgaaatcaaccacttcttctgtgaaatcctgtctgtcctcaagttggcctgtgctgacacctggctcaaccaggtggtcatctttgcagcctgcgtgttcatcctggtggggccactctgcctggtgctggtctcctacttgcgcatcctggccgccatcttgaggatccagtctggggagggccgcagaaaggccttctccacctgctcctcccacctttgcgtggtgggactcttctttggcagcgccattgtcacgtacatggcccccaagtcccgccatcctgaggagcagcagaaagttctttccctgttttacagccttttcaatccaatgctgaaccccctgatatatagcctaaggaatgcagaggtcaagggcgccctgaggagggcactgaggaaggagaggctgacgtgagacatctcaaagggaaccatgggg

SEQ ID NO: 162074 - DNA, 924 bp, Homo sapiens
  Payload ID: 11708
  Gene Symbol: OR2A14
  Gene Name: olfactory receptor, family 2, subfamily A, member 14
  ENST ID: ENST00000627593
  CDS Start-End: 1-924
atggaaggcaaccagacatggatcacagacatcaccctgctgggattccaggttggtccagcactggcgattctcctctgtggactcttctctgtcttctatacactcaccctgctggggaatggggtcatctttgggattatctgcctggactctaagcttcacacacccatgtacttcttcctctcacacctggccatcattgacatgtcctatgcttccaacaatgttcccaagatgttggcaaacctaatgaaccagaaaagaaccatctcctttgttccatgcataatgcagacttttttgtatttggcttttgctgttacagagtgcctgattttggtggtgatgtcctatgataggtatgtggccatctgccaccctttccagtacactgtcatcatgagctggagagtgtgcactgtcctggctgtggcttcctgggtgttcagcttcctcctggctctggtccctttagttctcatcctgagcctgcccttctgcgggcctcatgaaatcaaccacttcttctgtgaaatcctgtctgtcctcaagttggcctgtgctgacacctggctcaaccaggtggtcatctttgcagcctgcgtgttcatcctggtggggccactctgcctggtgctggtctcctacttgcgcatcctggccgccatcttgaggatccagtctggggagggccgcagaaaggccttctccacctgctcctcccacctttgcgtggtgggactcttctttggcagcgccattgtcacgtacatggcccccaagtcccgccatcctgaggagcagcagaaagttctttccctgttttacagccttttcaatccaatgctgaaccccctgatatatagcctaaggaatgcagaggtcaagggcgccctgaggagggcactgaggaaggagagg

SEQ ID NO: 162075 - DNA, 1051 bp, Homo sapiens
  Payload ID: 11709
  Gene Symbol: OR2A2
  Gene Name: olfactory receptor, family 2, subfamily A, member 2
  Uniprot ID: Q6IF42
  ENST ID: ENST00000408979
  CDS Start-End: 70-1026
tgcatctttgacccacagctctgaccttcctgtcctagatgagggtttgtctttctctgccacaagagcatggaaggcaaccagacatggatcacagacatcaccctgctgggattccaggttggtccagcactggcgattctcctctgtggactcttctctgtcttctatacactcaccctgctggggaatggggtcatctttgggattatctgcctggactctaagcttcacacacccatgtacttcttcctctcacacctggccatcattgacatgtcctatgcttccaacaatgttcccaagatgttggcaaacctaatgaaccagaaaagaaccatctcctttgttccatgcataatgcagacttttttgtatttggcttttgctgttacagagtgcctgattttggtggtgatgtcctatgataggtatgtggccatctgccaccctttccagtacactgtcatcatgagctggagagtgtgcacgatcctggttctcacgtcctggtcatgtgggtttgccctgtccctggtacatgaaattctccttctaaggttgcccttctgtgggccccgggatgtgaaccacctcttctgtgaaattctgtctgtcctcaagctggcctgtgctgacacctgggttaaccaagtggtcatatttgctacctgtgtgtttgtcttagtcgggcctctttccttgattctggtctcctacatgcacatcctcggggccatcctgaagatccagacaaaggagggccgcataaaggccttctccacctgctcctcccacctgtgtgtggttggactattctttggcatagccatggtggtttacatggtcccagactctaatcaacgagaggagcaggagaaaatgctgtccctgtttcacagtgtctttaatccaatgctgaaccccctgatctacagcctgaggaatgctcagttgaagggcgccctccacagagcactccagaggaagaggtccatgagaacggtgtatgggctttgcctttaaaacatgtggtttgctgaagcaagaa

SEQ ID NO: 162076 - DNA, 1014 bp, Homo sapiens
  Payload ID: 11710
  Gene Symbol: OR2A25
  Gene Name: olfactory receptor, family 2, subfamily A, member 25
  Uniprot ID: A4D2G3
  ENST ID: ENST00000408898
  CDS Start-End: 39-971
ttcagacttggtgagctccttgtttcttctacagggaaatggggggaaatcagacttccatcacagagttcctcctactgggatttcccattggcccaaggattcagatgctcctctttgggctcttctccctgttctacatcttcattctgttggggaacgggacaatcctggggctcatctcactggactccagactccacacccccatgtacttcttcctctcacacctggcggtcgtcgacatcgcctgtgcttgcagcacggtgccccagatgctggtgaacctcctgcatccagccaagcccatctcctttgctggctgcatgacccagatgtttctgtttttgagttttgcacatacagaatgtctcctcctggtggtgatgtcctatgatcggtacgtggccatctgccaccctctccgatattctaccatcatgacctggaaagtctgcatcactttggcattgacttcctggattttaggagtcttattggcccttgtccatctagtgttactgctaccactgtccttctgtggaccccagaaacttaatcactttttctgtgaaattatggctgttctcaaacttgcctgtgcggatacccacattaatgaggtaatggttttggcaggggcagtgtctgtgctggtgggagccttcttttccactgtaatatcttatgttcatattctatgtgccattctaaagatccagtcaggagaggggtgccagaaagccttctccatctgctcctcccacctctgtgtggttggactcttttatggcacagccatcatcatgtatgttgagccccagtatgagagccccaaggagcagaagaaatatctcctgctgtttcacagcctcttcaatcccatgcttaatcccctaatttatagtcttaggaacaaggaagtccaaggtactctaaagaggatgcttgaaaagaagagaacttcatgaaagcctgaaagaatagtaaaatagctggcttcaaagggctttg

SEQ ID NO: 162077 - DNA, 933 bp, Homo sapiens
  Payload ID: 11711
  Gene Symbol: OR2A4
  Gene Name: olfactory receptor, family 2, subfamily A, member 4
  Uniprot ID: O95047
  ENST ID: ENST00000315453
  CDS Start-End: 1-933
atgggagacaatataacatccatcagagagttcctcctactgggatttcccgttggcccaaggattcagatgctcctctttgggctcttctccctgttctacgtcttcaccctgctggggaacgggaccatactggggctcatctcactggactccagactgcacgcccccatgtacttcttcctctcacacctggcggtcgtcgacatcgcctacgcctgcaacacggtgccccggatgctggtgaacctcctgcatccagccaagcccatctcctttgcgggccgcatgatgcagacctttctgttttccacttttgctgtcacagaatgtctcctcctggtggtgatgtcctatgatctgtacgtggccatctgccaccccctccgatatttggccatcatgacctggagagtctgcatcaccctcgcggtgacttcctggaccactggagtccttttatccttgattcatcttgtgttacttctacctttacccttctgtaggccccagaaaatttatcactttttttgtgaaatcttggctgttctcaaacttgcctgtgcagatacccacatcaatgagaacatggtcttggccggagcaatttctgggctggtgggacccttgtccacaattgtagtttcatatatgtgcatcctctgtgctatccttcagatccaatcaagggaagttcagaggaaagccttccgcacctgcttctcccacctctgtgtgattggactcgtttatggcacagccattatcatgtatgttggacccagatatgggaaccccaaggagcagaagaaatatctcctgctgtttcacagcctctttaatcccatgctcaatccccttatctgtagtcttaggaactcagaagtgaagaatactttgaagagagtgctgggagtagaaagggctttatga

SEQ ID NO: 162078 - DNA, 933 bp, Homo sapiens
  Payload ID: 11712
  Gene Symbol: OR2A42
  Gene Name: olfactory receptor, family 2, subfamily A, member 42
  Uniprot ID: Q8NGT9
  ENST ID: ENST00000391496
  CDS Start-End: 1-933
atgggggaaaatcagacaatggtcacagagttcctcctactgggatttctcctgggcccaaggattcagatgctcctctttgggctcttctccctgttctatatcttcaccctgctggggaacggggccatcctggggctcatctcactggactccagactccacacccccatgtacttcttcctctcacacctggctgtcgtcgacatcgcctacacccgcaacacggtgccccagatgctggcgaacctcctgcatccagccaagcccatctcctttgctggttgcatgacgcagacctttctctgtttgagttttggacacagcgaatgtctcctgctggtgctgatgtcctacgatcgttacgtggccatctgccaccctctccgatactccgtcatcatgacctggagagtctgcatcaccctggccgtcacttcctggacgtgtggctccctcctggctctggcccatgtggttctcatcctaagactgcccttctctgggcctcatgaaatcaaccacttcttctgtgaaatcctgtctgtcctcaggctggcctgtgctgacacctggctcaaccaggtggtcatctttgcagcctgcgtgttcttcctggtggggccacccagcctggtgcttgtctcctactcgcacatcctggcggccatcctgaggatccagtctggggagggccgcagaaaggccttctccacctgctcctcccacctctgcgtggtgggactcttctttggcagtgccatcatcatgtacatggcccccaagtcccgccatcctgaggagcagcaaaaggtcttttttctattttacagttttttcaacccaacacttaaccccctgatttacagcctgaggaacggagaggtcaagggtgccctgaggagagcactgggcaaggaaagtcattcctaa

SEQ ID NO: 162079 - DNA, 1013 bp, Homo sapiens
  Payload ID: 11713
  Gene Symbol: OR2A5
  Gene Name: olfactory receptor, family 2, subfamily A, member 5
  Uniprot ID: Q96R48
  ENST ID: ENST00000408906
  CDS Start-End: 35-970
cagcagagtccaacgcaggtactgtcacaagggcatgacaaaaaatcagacatgggtcacagaattcattctcctgggatttccactcagcctaaggattcagatgctcctctctgggcttttctccctgttatacgtcttcaccctgctgggaaatggggccatcctggggctcatctggctggactccagactgcacacccccatgtacttctttctctcacacctggccatcattgatatttcgtatgcttccaacaatgtccccaagatgctgacaaaccttggcttgaacaagagaaaaacaatctcctttgtcccatgcacaatgcagacctttttatacatggcttttgctcacactgagtgtctcatcttggtaatgatgtcctacgatcggtacatggctatctgccaccctctgcaatattctgtcatcatgagatggggagtgtgcacagtcctggctgtcacttcttgggcatgtggttcccttctggccctggtccatgtggttctcatcctgaggctgcccttctgtgggccccatgaaatcaaccacttcttctgtgaaatcctgtctgtcctcaagttggcctgtgctgacacctggctcaaccaggtggtcatctttgctgcttcagtgttcatcctggtggggccgctctgcctggtgctggtctcctactcgcgcatcctggcggccatcttgaggatccagtctggggagggccgcagaaaggccttctccacctgctcctcccacctttgcatggtgggactcttctttggcagcgccattgtcatgtacatggcccccaagtcccgccaccctgaggagcagcagaaggtcctttccctgttttacagccttttcaacccgatgctgaaccccttgatctatagcctgaggaacgcagaggtcaagggtgccctgaaaagagtgttgtggaaacagagatcaaagtgagggatgccagggaaagtctagagggttgaagatttgctcccaa

SEQ ID NO: 162080 - DNA, 1116 bp, Homo sapiens
  Payload ID: 11714
  Gene Symbol: OR2A7
  Gene Name: olfactory receptor, family 2, subfamily A, member 7
  Uniprot ID: Q96R45
  ENST ID: ENST00000493325
  CDS Start-End: 95-1027
tcaccaaagagtgccgaacaagttaaaatgaatctgtttttaaacacttctcctaaaccatgagcattaacttgatttcctctgtcatagggatatgggggacaatataacatccatcacagagttcctcctactgggatttcccgttggcccaaggattcagatgctcctctttgggctcttctccctgttctacgtcttcaccctgctggggaacgggaccatactggggctcatctcactggactccagactgcacgcccccatgtacttcttcctctcacacctggcggtcgtcgacatcgcctacgcctgcaacacggtgccccggatgctggtgaacctcctgcatccagccaagcccatctcctttgcgggccgcatgatgcagacctttctgttttccacttttgctgtcacagaatgtctcctcctggtggtgatgtcctatgatctgtacgtggccatctgccaccccctccgatatttggccatcatgacctggagagtctgcatcaccctcgcggtgacttcctggaccactggagtccttttatccttgattcatcttgtgttacttctacctttacccttctgtaggccccagaaaatttatcactttttttgtgaaatcttggctgttctcaaacttgcctgtgcagatacccacatcaatgagaacatggtcttggccggagcaatttctgggctggtgggacccttgtccacaattgtagtttcatatatgtgcatcctctgtgctatccttcagatccaatcaagggaagttcagaggaaagccttctgcacctgcttctcccacctctgtgtgattggactcttttatggcacagccattatcatgtatgttggacccagatatgggaaccccaaggagcagaagaaatatctcctgctgtttcacagcctctttaatcccatgctcaatccccttatctgtagtcttaggaactcagaagtgaagaatactttgaagagagtgctgggagtagaaagggctttatgaaaaggattatggcattgtgactgacagtgacctaggaagttacatcattgagcggttcttaacccatctctgcactggtgggacctctg

SEQ ID NO: 162081 - DNA, 1071 bp, Homo sapiens
  Payload ID: 11715
  Gene Symbol: OR2AE1
  Gene Name: olfactory receptor, family 2, subfamily AE, member 1
  Uniprot ID: Q8NHA4
  ENST ID: ENST00000316368
  CDS Start-End: 25-996
cctcagggattgagaaaggggacaatgtggcagaagaatcagacctctctggcagacttcatccttgaggggctcttcgatgactcccttacccaccttttccttttctccttgaccatggtggtcttccttattgcggtgagtggcaacaccctcaccattctcctcatctgcattgatccccagcttcatacaccaatgtatttcctgctcagccagctctccctcatggatctgatgcatgtctccacaatcatcctgaagatggctaccaactacctatctggcaagaaatctatctcctttgtgggctgtgcaacccagcacttcctctatttgtgtctaggtggtgctgaatgttttctcttagctgtcatgtcctatgaccgctatgttgccatctgtcatccactgcgctatgctgtgctcatgaacaagaaggtgggactgatgatggctgtcatgtcatggttgggggcatccgtgaactccctaattcacatggcgatcttgatgcacttccctttctgtgggcctcggaaagtctaccacttctactgtgagttcccagctgttgtgaagttggtatgtggcgacatcactgtgtatgagaccacagtgtacatcagcagcattctcctcctcctccccatcttcctgatttctacatcctatgtcttcatccttcaaagtgtcattcagatgcgctcatctgggagcaagagaaatgcctttgccacttgtggctcccacctcacggtggtttctctttggtttggtgcctgcatcttctcctacatgagacccaggtcccagtgcactctattgcagaacaaagttggttctgtgttctacagcatcattacgcccacattgaattctctgatttatactctccggaataaagatgtagctaaggctctgagaagagtgctgaggagagatgttatcacccagtgcattcaacgactgcaattgtggttgccccgagtgtagagtggaataggataagctccttaaattaattcatataaacctctaaagtttttcagggagatagcttccttatgc

SEQ ID NO: 162082 - DNA, 998 bp, Homo sapiens
  Payload ID: 11716
  Gene Symbol: OR2AG1
  Gene Name: olfactory receptor, family 2, subfamily AG, member 1 (gene/pseudogene)
  Uniprot ID: Q9H205
  ENST ID: ENST00000307401
  CDS Start-End: 22-972
ggtgatgaaagaaaccacagcatggagctctggaacttcaccttgggaagtggcttcattttggtggggattctgaatgacagtgggtctcctgaactgctctgtgctacaattacaatcctatacttgttggccctgatcagcaatggcctactgctcctggctatcaccatggaagcccggctccacatgcccatgtacctcctgcttgggcagctctctctcatggacctcctgttcacatctgttgtcactcccaaggcccttgcggactttctgcgcagagaaaacaccatctcctttggaggctgtgcccttcagatgttcctggcactgacaatgggtggtgctgaggacctcctactggccttcatggcctatgacaggtatgtggccatttgtcatcctctgacatacatgaccctcatgagctcaagagcctgctggctcatggtggccacgtcctggatcctggcatccctaagtgccctaatatataccgtgtataccatgcactatcccttctgcagggcccaggagatcaggcatcttctctgtgagatcccacacttgctgaaggtggcctgtgctgatacctccagatatgagctcatggtatatgtgatgggtgtgaccttcctgattccctctcttgctgctatactggcctcctatacacaaattctactcactgtgctccatatgccatcaaatgaggggaggaagaaagcccttgtcacctgctcttcccacctgactgtggttgggatgttctatggagctgccacattcatgtatgtcttgcccagttccttccacagcaccagacaagacaacatcatctctgttttctacacaattgtcactccagccctgaatccactcatctacagcctgaggaataaggaggtcatgcgggccttgaggagggtcctgggaaaatacatgctgccagcacactccacgctctagggaaggatcatggctagcttccagaa

SEQ ID NO: 162083 - DNA, 998 bp, Homo sapiens; identical to SEQ ID NO: 162082
  Payload ID: 11716
  Gene Symbol: OR2AG1
  Gene Name: olfactory receptor, family 2, subfamily AG, member 1 (gene/pseudogene)
  Uniprot ID: Q9H205
  ENST ID: ENST00000624502
  CDS Start-End: 22-972

SEQ ID NO: 162084 - DNA, 951 bp, Homo sapiens
  Payload ID: 11716
  Gene Symbol: OR2AG1
  Gene Name: olfactory receptor, family 2, subfamily AG, member 1 (gene/pseudogene)
  Uniprot ID: Q9H205
  ENST ID: ENST00000623437
  CDS Start-End: 1-951
atggagctctggaacttcaccttgggaagtggcttcattttggtggggattctgaatgacagtgggtctcctgaactgctctgtgctacaattacaatcctatacttgttggccctgatcagcaatggcctactgctcctggctatcaccatggaagcccggctccacatgcccatgtacctcctgcttgggcagctctctctcatggacctcctgttcacatctgttgtcactcccaaggcccttgcggactttctgcgcagagaaaacaccatctcctttggaggctgtgcccttcagatgttcctggcactgacaatgggtggtgctgaggacctcctactggccttcatggcctatgacaggtatgtggccatttgtcatcctctgacatacatgaccctcatgagctcaagagcctgctggctcatggtggccacgtcctggatcctggcatccctaagtgccctaatatataccgtgtataccatgcactatcccttctgcagggcccaggagatcaggcatcttctctgtgagatcccacacttgctgaaggtggcctgtgctgatacctccagatatgagctcatggtatatgtgatgggtgtgaccttcctgattccctctcttgctgctatactggcctcctatacacaaattctactcactgtgctccatatgccatcaaatgaggggaggaagaaagcccttgtcacctgctcttcccacctgactgtggttgggatgttctatggagctgccacattcatgtatgtcttgcccagttccttccacagcaccagacaagacaacatcatctctgttttctacacaattgtcactccagccctgaatccactcatctacagcctgaggaataaggaggtcatgcgggccttgaggagggtcctgggaaaatacatgctgccagcacactccacgctctag

SEQ ID NO: 162085 - DNA, 1069 bp, Homo sapiens
  Payload ID: 11717
  Gene Symbol: OR2AG2
  Gene Name: olfactory receptor, family 2, subfamily AG, member 2
  Uniprot ID: A6NM03
  ENST ID: ENST00000338569
  CDS Start-End: 99-1049
tgcacagtgacctagaacaatccaaagctagagtgaacacctttagaaaagcttccactgataatatatttggttctaggcaactaaaaaaacacatcatggagctccggaactccaccttgggaagcggcttcatcttggtggggattctgaatgacagtgggtctcctgaactgctctatgctacatttacaatcctatacatgttggcactgaccagcaatggtctgctgctcctggccatcaccatagaagcccggctccacatgcccatgtacctcctgcttgggcagctctctctcatggacctcctgttcacatctgttgtcactcccaaggcccttgcggactttctgcgcagagaaaacactatctcctttggaggctgtgcacttcagatgttcctggcactgacaatgggtagcgctgaggacctcctactggccttcatggcctatgacaggtatgtggccatttgtcatcctctgaaatacatgaccctcatgagcccaagagtctgctggatcatggtggccacatcctggatcctggcatccctgattgctataggacataccatgtacactatgcacctccctttctgtgtgtcctgggaaatcaggcatctgctctgtgagatcccacccttgctgaagttggcctgtgctgatacctccaggtatgagcttataatatacgtgacaggtgtgactttcctcttgctccccatttctgccattgtggcctcctacacactagtcctattcactgtgcttcgtatgccatcaaatgaggggaggaagaaagcccttgtcacctgctcttcccacctgattgtggtcgggatgttctatggagctgccacattcatgtatgtcttgcccagttccttccacagccccaaacaagacaacatcatctctgttttctacacaattgtcactccagccctgaatccactcatctacagcctgaggaataaggaggtcatgcgggccttgaggagggtcctgggaaaatacatactgctggcacattccacgctctagggaaggatcatggcttgcct

SEQ ID NO: 162086 - DNA, 987 bp, Homo sapiens
  Payload ID: 11718
  Gene Symbol: OR2AJ1
  Gene Name: olfactory receptor, family 2, subfamily AJ, member 1
  Uniprot ID: Q8NGZ0
  ENST ID: ENST00000318244
  CDS Start-End: 1-987
atgggccatcagaatcacactttcagcagtgatttcatacttttgggattgttctcttcttccccaacaagtgtggtcttcttcttagttttatttgtcattttcattatgagtgtaacagaaaatacgctcatgatcctcctcattcgcagtgactcccgactccacactccaatgtattttctgctcagccatctctccttaatggatatcttgcatgtttccaacatcgttcccaaaatggtcactaactttctgtcaggcagcagaactatttcatttgcaggttgtgggttccaggtatttctgtccctcaccctcctgggtggtgagtgccttctcctggctgcaatgtcctgtgatcgctatgtggctatctgtcacccgctgcgctatccgattcttatgaaggagtatgccagcgctctcatggctggaggctcctggctcattggggttttcaactccacagtccacacagcttatgcactgcagtttcccttctgtggctctagggcaattgatcacttcttctgtgaagtccctgccatgttgaagttgtcctgtgcagacacaacacgctatgaacgaggggtttgtgtaagtgctgtgatcttcctgctgatccctttctccttgatctctgcttcttatggccaaattattcttactgtcctccagatgaaatcatcagaggcaaggaaaaagtcattttccacttgttccttccacatgattgtggtcacgatgtactatgggccatttatttttacatatatgagacctaaatcataccacactccaggccaggataagttcctggcaatattctatacgatcctcacacccacactcaaccctttcatctacagctttaggaataaagatgttctggcggtgatgaaaaatatgctcaaaagtaactttctgcacaaaaaaatgaataggaaaattcctgaatgtgtgttctgtctatttctatgttaa

SEQ ID NO: 162087 - DNA, 1107 bp, Homo sapiens
  Payload ID: 11719
  Gene Symbol: OR2AK2
  Gene Name: olfactory receptor, family 2, subfamily AK, member 2
  Uniprot ID: Q8NG84
  ENST ID: ENST00000366480
  CDS Start-End: 100-1107
tgctctaaacatgtagatagttgccaaacatgtaagtgaatatttatttctgaatgccatgtcattttactttctcttaagggaagtcaacattattacatgaacatttcagatgtcatctcctttgatattttggtttcagccatgaaaacaggaaatcaaagttttgggacagattttctacttgttggtcttttccaatatggctggataaactctcttctctttgtcgtcattgccaccctctttacagttgctctgacaggaaatatcatgctgatccacctcattcgactgaacaccagactccacactccaatgtactttctgctcagtcagctctccatcgttgacctcatgtacatctccaccacagtgcccaagatggcagtcagcttcctctcacagagtaagaccattagatttttgggctgtgagattcaaacgtatgtgttcttggcccttggtggaactgaagcccttctccttggttttatgtcttatgatcgctatgtagctatctgtcaccctttacattatcctatgcttatgagcaagaagatctgctgcctcatggttgcatgtgcatgggccagtggttctatcaatgctttcatacatacattgtatgtgtttcagcttccattctgtaggtctcggctcattaaccactttttctgtgaagttccagctctactatcattggtgtgtcaggacacctcccagtatgagtatacagtcctcctgagtggacttattatcttgctactaccattcctagccattctggcttcctatgctcgtgtgcttattgtggtattccagatgagctcaggaaaaggacaggcaaaagctgtttccacttgttcctcccacctgattgtggcaagcctgttctatgcaaccactctctttacctacacaaggccacactccttgcgttccccttcacgggataaggcggtggcagtattttacaccattgtcacacctctactgaacccatttatctacagcctgagaaataaggaagtgacgggggcagtgaggagactgttgggatattggatatgctgtagaaaatatgacttcagatctctgtattga

SEQ ID NO: 162088 - DNA, 930 bp, Homo sapiens
  Payload ID: 11720
  Gene Symbol: OR2AP1
  Gene Name: olfactory receptor, family 2, subfamily AP, member 1
  Uniprot ID: Q8NGE2
  ENST ID: ENST00000321688
  CDS Start-End: 1-930
atgaaaaataaaaccgtgttaactgagtttatccttctgggtctaacagatgtccctgaactccaggtggcagttttcacctttcttttccttgcgtatttactcagcatccttggaaatctgactatcctcatcctcaccttgctggactcccaccttcagactcccatgtatttctttctccggaacttctccttcttggaaatttccttcacaaacatcttcattccaagggtcctgattagcatcacaacagggaacaagagtatcagctttgctggctgcttcactcagtatttctttgccatgttccttggggctacagagttttaccttctggctgccatgtcctatgaccgctatgtggccatctgcaaacctctgcattacaccaccatcatgagcagcagaatctgcatccagctgattttctgctcttggctgggtgggctaatggctattataccaacaatcaccctgatgagtcagcaggacttttgtgcatccaacagactgaatcattacttctgtgactatgagcctcttctggaactctcatgttcagacacaagcctcatagagaaggttgtctttcttgtggcatctgtgaccctggtggtcactctggtgctagtgattctctcctatgcattcattatcaagactattctgaagctcccctctgcccaacaaaggacaaaagccttttccacatgttcttcccacatgattgtcatctccctctcttacggaagctgcatgtttatgtacattaatccctctgcaaaagaaggggatacattcaacaagggagtagctctactcattacttcagttgctcctttgttgaacccctttatttacaccctaaggaaccaacaggtaaaacaacccttcaaggatatggtcaaaaagcttctgaatctttaa

SEQ ID NO: 162089 - DNA, 1042 bp, Homo sapiens
  Payload ID: 11721
  Gene Symbol: OR2AT4
  Gene Name: olfactory receptor, family 2, subfamily AT, member 4
  Uniprot ID: A6NND4
  ENST ID: ENST00000305159
  CDS Start-End: 42-1004
ttccagctgcccatctctgagaaatccagctgtgtctcacaatggatgccacagcctgtaatgaatcagtggatggctcacccgtcttctatctattgggcatcccctctctgccagagaccttcttcctccctgtgttttttattttcctcctcttctaccttctcatcctgatgggtaatgccctgatcctggtggccgtggtggcagagcccagcctccacaagcccatgtacttctttctgatcaatctctccaccttggacatccttttcaccacaaccactgtccccaagatgctgtccttattcttgcttggggaccgcttcctcagcttttcttcctgcttactgcagatgtacctcttccaaagttttacatgttcagaagccttcatcctggtggtcatggcctatgaccgctatgtggctatctgccacccactgcactaccctgtcctcatgaacccacagaccaatgctaccttggcagccagtgcctggctaactgccctcctcctgcccatcccagcagtagtaaggacctcccagatggcatataacagcattgcctacatctaccactgcttctgtgatcatctggctgtggtccaggcctcctgctctgacaccaccccccagaccctcatgggcttctgcatcgccatggtggtgtccttcctcccccttctcctggtgcttctctcctatgtccacatcctggcctcagtgcttcgcatcagttccctagaaggacgggcaaaagccttctccacctgcagctcccaccttctggtcgtgggcacctactactcatctattgccatagcctacgtggcctacagggctgacctgccccttgacttccatatcatgggcaatgtggtatatgccattctcacaccaattctcaaccccctcatttacacgctgagaaacagggatgtaaaggcagccatcaccaaaatcatgtctcaagacccaggctgtgacaggagcatttgacctttaaatgcagctaactctgcttccaggacaccaaa
